(19) United States
(12) Patent Application Publication
(10) Pub. No.: US 2002/0061569 A1
(43) Pub. Date: May 23, 2002

(54) Identification of essential genes in prokaryotes

(76) Inventors: Robert Haselbeck, San Diego, CA (US); Kari L. Ohlsen, San Diego, CA (US); Judith W. Zyskind, La Jolla, CA (US); Daniel Wall, San Diego, CA (US); John D. Trawick, La Mesa, CA (US); Grant J. Carr, Escondido, CA (US); Robert T. Yamamoto, San Diego, CA (US); H. Howard Xu, San Diego, CA (US)

Correspondence Address: KNOBBE MARTENS OLSON & BEAR LLP, 620 NEWPORT CENTER DRIVE, SIXTEENTH FLOOR, NEWPORT BEACH, CA, 92660, US

(21) Appl. No.: 09/815,242

(22) Filed: Mar. 21, 2001

Related U.S. Application Data
(60) Provisional application No. 60/191,078, filed on Mar. 21, 2000.
(60) Provisional application No. 60/206,848, filed on May 23, 2000.
(60) Provisional application No. 60/207,727, filed on May 26, 2000.
(60) Provisional application No. 60/242,578, filed on Oct. 23, 2000.
(60) Provisional application No. 60/253,625, filed on Nov. 27, 2000.
(60) Provisional application No. 60/257,931, filed on Dec. 22, 2000.
(60) Provisional application No. 60/269,308, filed on Feb. 16, 2001.

(51) Int. Cl. C12N 9/00; C12Q 1/68; C07H 21/04; C07K 14/435; C12P 21/02; C12N 5/06

(52) U.S. Cl. 435/183; 530/350; 435/6; 536/23.2; 435/69.1; 435/320.1; 435/325

(57) ABSTRACT

The sequences of antisense nucleic acids which inhibit the proliferation of prokaryotes are disclosed. Cell-based assays which employ the antisense nucleic acids to identify and develop antibiotics are also disclosed. The antisense nucleic acids can also be used to identify proteins required for proliferation, express these proteins or portions thereof, obtain antibodies capable of specifically binding to the expressed proteins, and to use those expressed proteins as a screen to isolate candidate molecules for rational drug discovery programs. The nucleic acids can also be used to screen for homologous nucleic acids that are required for proliferation in cells other than Staphylococcus aureus, Salmonella typhimurium, Klebsiella pneumoniae, and Pseudomonas aeruginosa. The nucleic acids of the present invention can also be used in various assay systems to screen for proliferation required genes in other organisms.

### RELATED APPLICATIONS

[0001] This application claims priority from U.S. Provisional Patent Application Ser. No. 60/191,078, filed Mar. 21, 2000, U.S. Provisional Patent Application Ser. No. 60/206,848, filed May 23, 2000, U.S. Provisional Patent Application Ser. No. 60/207,727, filed May 26, 2000, U.S. Provisional Patent Application Ser. No. 60/242,578, filed Oct. 23, 2000, U.S. Provisional Patent Application Ser. No. 60/253,625, filed Nov. 27, 2000, U.S. Provisional Patent Application Ser. No. 60/257,931, filed Dec. 22, 2000, and U.S. Provisional Patent Application Ser. No. 60/269,308, filed Feb. 16, 2001 the disclosures of which are incorporated herein by reference in their entireties.

### SEQUENCE LISTING

[0002] The present application is being filed along with duplicate copies of a CD-ROM marked “Copy 1” and “Copy 2” containing a Sequence Listing in electronic format. The duplicate copies of the CD-ROM each contain a file entitled SEQLIST_FINAL_{—}9PM created on Mar. 20, 2001 which is 37,487,912 bytes in size. The information on these duplicate CD-ROMs is incorporated herein by reference in its entirety.

### BACKGROUND OF THE INVENTION

[0003] Since the discovery of penicillin, the use of antibiotics to treat the ravages of bacterial infections has saved millions of lives. With the advent of these “miracle drugs,” for a time it was popularly believed that humanity might, once and for all, be saved from the scourge of bacterial infections. In fact, during the 1980s and early 1990s, many large pharmaceutical companies cut back or eliminated antibiotics research and development. They believed that infectious disease caused by bacteria finally had been conquered and that markets for new drugs were limited. Unfortunately, this belief was overly optimistic.

[0004] The tide is beginning to turn in favor of the bacteria as reports of drug resistant bacteria become more frequent. The United States Centers for Disease Control announced that one of the most powerful known antibiotics, vancomycin, was unable to treat an infection of the common Staphylococcus aureus (staph). This organism is commonly found in our environment and is responsible for many nosocomial infections. The import of this announcement becomes clear when one considers that vancomycin was used for years to treat infections caused by Staphylococcus species as well as other stubborn strains of bacteria. In short, bacteria are becoming resistant to our most powerful antibiotics. If this trend continues, it is conceivable that we will return to a time when what are presently considered minor bacterial infections are fatal diseases.

[0005] Over-prescription and improper prescription habits by some physicians have caused an indiscriminate increase in the availability of antibiotics to the public. The patients are also partly responsible, since they will often improperly use the drug, thereby generating yet another population of bacteria that is resistant, in whole or in part, to traditional antibiotics.

[0006] The bacterial pathogens that have haunted humanity remain, in spite of the development of modern scientific practices to deal with the diseases that they cause. Drug resistant bacteria are now an increasing threat to the health of humanity. A new generation of antibiotics is needed to once again deal with the pending health threat that bacteria present.

### Discovery of New Antibiotics

[0007] As more and more bacterial strains become resistant to the panel of available antibiotics, new antibiotics are required to treat infections. In the past, practitioners of pharmacology would have to rely upon traditional methods of drug discovery to generate novel, safe and efficacious compounds for the treatment of disease. Traditional drug discovery methods involve blindly testing potential drug candidate-molecules, often selected at random, in the hope that one might prove to be an effective treatment for some disease. The process is painstaking and laborious, with no guarantee of success. Today, the average cost to discover and develop a new drug exceeds US $500 million, and the average time from laboratory to patient is 15 years. Improving this process, even incrementally, would represent a huge advance in the generation of novel antimicrobial agents.

[0008] Newly emerging practices in drug discovery utilize a number of biochemical techniques to provide for directed approaches to creating new drugs, rather than discovering them at random. For example, gene sequences and proteins encoded thereby that are required for the proliferation of a cell or microorganism make excellent targets since exposure of bacteria to compounds active against these targets would result in the inactivation of the cell or microorganism. Once a target is identified, biochemical analysis of that target can be used to discover or to design molecules that interact with and alter the functions of the target. Use of physical and computational techniques to analyze structural and biochemical properties of targets in order to derive compounds that interact with such targets is called rational drug design and offers great potential. Thus, emerging drug discovery practices use molecular modeling techniques, combinatorial chemistry approaches, and other means to produce and screen and/or design large numbers of candidate compounds.

[0009] Nevertheless, while this approach to drug discovery is clearly the way of the future, problems remain. For example, the initial step of identifying molecular targets for investigation can be an extremely time consuming task. It may also be difficult to design molecules that interact with the target by using computer modeling techniques. Furthermore, in cases where the function of the target is not known or is poorly understood, it may be difficult to design assays to detect molecules that interact with and alter the functions of the target. To improve the rate of novel drug discovery and development, methods of identifying important molecular targets in pathogenic cells or microorganisms and methods for identifying molecules that interact with and alter the functions of such molecular targets are urgently required.

[0010] Staphylococcus aureus is a Gram positive microorganism which is the causative agent of many infectious diseases. Local infection by Staphylococcus aureus can cause abscesses on skin and cellulitis in subcutaneous tissues and can lead to toxin-related diseases such as toxic shock and scalded skin syndromes. Staphylococcus aureus can cause serious systemic infections such as osteomyelitis, endocarditis, pneumonia, and septicemia. Staphylococcus aureus is also a common cause of food poisoning, often arising from contact between prepared food and infected food industry workers. Antibiotic resistant strains of Staphylococcus aureus have recently been identified, including those that are now resistant to all available antibiotics, thereby severely limiting the options of care available to physicians.

[0011] Pseudomonas aerginosa is an important Gram-negative opportunistic pathogen. It is the most common Gram-negative found in nosocomial infections. P. aeruginosa is responsible for 16% of nosocomial pneumonia cases, 12% of hospital-acquired urinary tract infections, 8% of surgical wound infections, and 10% of bloodstream infections. Immunocompromised patients, such as neutropenic cancer and bone marrow transplant patients, are particular susceptible to opportunistic infections. In this group of patients, P. aeruginosa is responsible for pneumonia and septicemia with attributable deaths reaching 30%. P. aeruginosa is also one of the most common and lethal pathogens responsible for ventilator-associated pneumonia in intubated patients, with directly attributable death rates reaching 38%. Although P. aeruginosa outbreaks in bum patients are rare, it is associated with 60% death rates. In the AIDS population, P. aerginosa is associated with 50% of deaths. Cystic fibrosis patients are characteristically susceptible to chronic infection by P. aeruginosa, which is responsible for high rates of illness and death. Current antibiotics work poorly for CF infections (Van Delden & Igelwski. 1998. Emerging Infectious Diseases 4:551-560; references therein).

[0012] The gram-negative enteric bacterial genus, Salmonella, encompasses at least 2 species. One of these, S. enterica, is divided into multiple subspecies and thousands of serotypes or serovars (Brenner, et al. 2000 J. Clin. Microbiol. 38:2465-2467). The S. enterica human pathogens include serovars Typhi, Paratyphi, Typhimurium, Cholerasuis, and many others deemed so closely related that they are variants of a widespread species. Worldwide, disease in humans caused by Salmonella is a very serious problem. In many developing countries, S. enterica ser. Typhi still causes often-fatal typhoid fever. This problem has been reduced or eliminated in wealthy industrial states. However, enteritis induced by Salmonella is widespread and is the second most common disease caused by contaminated food in the United States (Edwards, B H 1999 “Salmonella and Shigella species” Clin. Lab Med. 19(3):469-487). Though usually self-limiting in healthy individuals, others such as children, seniors, and those with compromising illnesses can be at much greater risk of serious illness and death.

[0013] Some S. enterica serovars (e.g. Typhimurium) cause a localized infection in the gastrointestinal tract. Other serovars (i.e. Typhi and Paratyphi) cause a much more serious systemic infection. In animal models, these roles can be reversed which has allowed the use of the relatively safe S. enterica ser. Typhimurium as a surrogate in mice for the typhoid fever agent, S. enterica ser. Typhi. In mice, S. enterica ser Typhimurium causes a systemic infection similar in outcome to typhoid fever. Years of study of the Salmonella have led to the identification of many determinants of virulence in animals and humans. Salmonella is interesting in its ability to localize to and invade the intestinal epithelium, induce morphologic changes in target cells via injection of certain cell-remodeling proteins, and to reside intracellularly in membrane-bound vesicles (Wallis, T S and Galyov, EE 2000 “Molecular basis of Salmonella-induced enteritis.” Molec. Microb. 36:997-1005; Falkow, S “The evolution of pathogenicity in Escherichia, Shigella, and Salmonella,” Chap. 149 in Neidhardt, et al. eds pp 2723-2729; Gulig, P A “Pathogenesis of Systemic Disease,” Chap. 152 in Neidhardt, et al. ppp 2774-2787). The immediate infection often results in a severe watery diarrhea but Salmonella also can establish and maintain a subclinical carrier state in some individuals. Spread is via food contaminated with sewage.

[0014] The gene products implicated in Salmonella pathogenesis include type three secretion systems (TTSS), proteins affecting cytoplasmic structure of the target cells, many proteins carrying out functions necessary for survival and proliferation of Salmonella in the host, as well as “traditional” factors such as endotoxin and secreted exotoxins. Additionally, there must be factors mediating species-specific illnesses. Despite this most of the genomes of S. enterica ser. Typhi (see http://www.sanger.ac.uk/Proiects/S_typhi/ for the genome database) and S. enterica ser. Typhimurium (see http://genome.wustl.edu/gsc/bacterial/salmonella.shtml for the genome database) are highly conserved and are mutually useful for gene identification in multiple serovars. The Salmonella are a complex group of enteric bacteria causing disease similar to but distinct from other gram-negative enterics such as E. coli and have been a focus of biomedical research for the last century.

[0015] Enterococcus faecalis, a Gram-positive bacterium, is by far the most common member of the enterococci to cause infections in humans. Enterococcus faecium generally accounts for less than 20% of clinical isolates. Enterococci infections are mostly hospital-acquired though they are also associated with some community-acquired infections. Of nosocomial infections enterococci account for 12% of bacteremia, 15% of surgical wound infections, 14% of urinary tract infections, and 5 to 15% of endocarditis cases (Huycke, M. M., D. F., Sahm and M. S. Gilmore. 1998. Emerging Infectious Diseases 4:239-249). Additionally enterococci are frequently associated with intraabdominal and pelvic infections. Enterococci infections are often hard to treat because they are resistant to a vast array of antimicrobial drugs, including aminoglycosides, penicillin, ampicillin and vancomycin. The development of multiple-drug resistant (MDR) enterococci has made this bacteria a major concern for treating nosocomial infections.

[0016] These reasons underscore the urgency of developing new antibiotics that are effective against Staphylococcus aureus, Salmonella typhimurium, Klebsiella pneumoniae, Pseudomonas aeruginosa, and Enterococcus faecalis. Accordingly, there is an urgent need for more novel methods to identify and characterize bacterial genomic sequences that encode gene products involved in proliferation, and are thereby potential new targets for antibiotic development. Prior to the present invention, the discovery of Staphylococcus aureus, Salmonella typhimurium, Klebsiella pneumoniae, and Pseudomonas aerginosa and Enterococcus faecalis genes required for proliferation of the microorganism was a painstaking and slow process. While the detection of new cellular drug targets within a Staphylococcus aureus, Salmonella typhimurium, Klebsiella pneumoniae, Pseudomonas aeruginosa or Enterococcus faecalis cell is key for novel antibiotic development, the current methods of drug target discovery available prior to this invention have required painstaking processes requiring years of effort.

### SUMMARY OF THE INVENTION

[0017] Some aspects of the present invention are described in the numbered paragraphs below.

[0018] 1. A purified or isolated nucleic acid sequence comprising a nucleotide sequence consisting essentially of one of SEQ ID NOs: 8-3795, wherein expression of said nucleic acid inhibits proliferation of a cell.

[0019] 2. The nucleic acid sequence of Paragraph 1, wherein said nucleotide sequence is complementary to at least a portion of a coding sequence of a gene whose expression is required for proliferation of a cell.

[0020] 3. The nucleic acid of Paragraph 1, wherein said nucleic acid sequence is complementary to at least a portion of a nucleotide sequence of an RNA required for proliferation of a cell.

[0021] 4. The nucleic acid of Paragraph 3, wherein said RNA is an RNA comprising a sequence of nucleotides encoding more than one gene product.

[0022] 5. A purified or isolated nucleic acid comprising a fragment of one of SEQ ID NOs.: 8-3795, said fragment selected from the group consisting of fragments comprising at least 10, at least 20, at least 25, at least 30, at least 50 and more than 50 consecutive nucleotides of one of SEQ ID NOs: 8-3795.

[0023] 6. The fragment of Paragraph 5, wherein said fragment is included in a nucleic acid obtained from an organism selected from the group consisting of Anaplasma marginale, Aspergillus fumigatus, Bacillus anthracis, Bacterioides fragilis Bordetella pertussis, Burkholderia cepacia, Campylobacter jejuni, Candida albicans, Candida glabrata (also called Torulopsis glabrata), Candida tropicalis, Candida parapsilosis, Candida guilliermondii, Candida krusei, Candida kefyr (also called Candida pseudotropicalis), Candida dubliniensis, Chlamydia pneumoniae, Chlamydia trachomatus, Clostridium botulinum, Clostridium difficile, Clostridium perfringens, Coccidiodes immitis, Corynebacterium diptheriae, Cryptococcus neoformans, Enterobacter cloacae, Enterococcus faecalis, Enterococcus faecium, Escherichia coli, Haemophilus influenzae, Helicobacter pylori, Histoplasma capsulatum, Klebsiella pneumoniae, Listeria monocytogenes, Mycobacterium leprae, Mycobacterium tuberculosis, Neisseria gonorrhoeae, Neisseria meningitidis, Nocardia asteroides, Pasteurella haemolytica, Pasteurella multocida, Pneumocystis carinii, Proteus vulgaris, Pseudomonas aeruginosa, Salmonella bongori, Salmonella cholerasuis, Salmonella enterica, Salmonella paratyphi, Salmonella typhi, Salmonella typhimurium, Staphylococcus aureus, Listeria monocytogenes, Moxarella catarrhalis, Shigella boydii, Shigella dysenteriae, Shigella flexneri, Shigella sonnei, Staphylococcus epidermidis, Streptococcus pneumoniae, Streptococcus mutans, Treponema pallidum, Yersinia enterocolitica, Yersinia pestis and any species falling within the genera of any of the above species.

[0024] 7. The fragment of Paragraph 5, wherein said fragment is included in a nucleic acid obtained from an organism other than Escherichia coli.

[0025] 8. A vector comprising a promoter operably linked to the nucleic acid of any one of Paragraphs 1-7.

[0026] 9. The vector of Paragraph 8, wherein said promoter is active in a microorganism selected from the group consisting of Anaplasma marginale, Aspergillus fumigatus, Bacillus anthracis, Bacterioides fragilis Bordetella pertussis, Burkholderia cepacia, Campylobacter jejuni, Candida albicans, Candida glabrata (also called Torulopsis glabrata), Candida tropicalis, Candida parapsilosis, Candida guilliermondii, Candida krusei, Candida kefyr (also called Candida pseudotropicalis), Candida dubliniensis, Chlamydia pneumoniae, Chlamydia trachomatus, Clostridium botulinum, Clostridium difficile, Clostridium perfringens, Coccidiodes immitis, Corynebacterium diptheriae, Cryptococcus neoformans, Enterobacter cloacae, Enterococcus faecalis, Enterococcus faecium, Escherichia coli, Haemophilus influenzae, Helicobacter pylori, Histoplasma capsulatum, Klebsiella pneumoniae, Listeria monocytogenes, Mycobacterium leprae, Mycobacterium tuberculosis, Neisseria gonorrhoeae, Neisseria meningitidis, Nocardia asteroides, Pasteurella haemolytica, Pasteurella multocida, Pneumocystis carinii, Proteus vulgaris, Pseudomonas aeruginosa, Salmonella bongori, Salmonella cholerasuis, Salmonella enterica, Salmonella paratyphi, Salmonella typhi, Salmonella typhimurium, Staphylococcus aureus, Listeria monocytogenes, Moxarella catarrhalis, Shigella boydii, Shigella dysenteriae, Shigella flexneri, Shigella sonnei, Staphylococcus epidermidis, Streptococcus pneumoniae, Streptococcus mutans, Treponema pallidum, Yersinia enterocolitica, Yersinia pestis and any species falling within the genera of any of the above species.

[0027] 10. A host cell containing the vector of Paragraph 8 or Paragraph 9.

[0028] 11. A purified or isolated antisense nucleic acid comprising a nucleotide sequence complementary to at least a portion of an intragenic sequence, intergenic sequence, sequences spanning at least a portion of two or more genes, 5′ noncoding region, or 3′ noncoding region within an operon comprising a proliferation-required gene whose activity or expression is inhibited by an antisense nucleic acid comprising the nucleotide sequence of one of SEQ ID NOs.: 8-3795.

[0029] 12. The purified or isolated antisense nucleic acid of Paragraph 11, wherein said antisense nucleic acid is complementary to a nucleic acid from an organism selected from the group consisting of Anaplasma marginale, Aspergillus fumigatus, Bacillus anthracis, Bacterioides fragilis Bordetella pertussis, Burkholderia cepacia, Campylobacter jejuni, Candida albicans, Candida glabrata (also called Torulopsis glabrata), Candida tropicalis, Candida parapsilosis, Candida guilliermondii, Candida krusei, Candida kefyr (also called Candida pseudotropicalis), Candida dubliniensis, Chlamydia pneumoniae, Chlamydia trachomatus, Clostridium botulinum, Clostridium difficile, Clostridium perfringens, Coccidiodes immitis, Corynebacterium diptheriae, Cryptococcus neoformans, Enterobacter cloacae, Enterococcus faecalis, Enterococcus faecium, Escherichia coli, Haemophilus influenzae, Helicobacter pylori, Histoplasma capsulatum, Klebsiella pneumoniae, Listeria monocytogenes, Mycobacterium leprae, Mycobacterium tuberculosis, Neisseria gonorrhoeae, Neisseria meningitidis, Nocardia asteroides, Pasteurella haemolytica, Pasteurella multocida, Pneumocystis carinii, Proteus vulgaris, Pseudomonas aeruginosa, Salmonella bongori, Salmonella cholerasuis, Salmonella enterica, Salmonella paratyphi, Salmonella typhi, Salmonella typhimurium, Staphylococcus aureus, Listeria monocytogenes, Moxarella catarrhalis, Shigella boydii, Shigella dysenteriae, Shigella flexneri, Shigella sonnei, Staphylococcus epidermidis, Streptococcus pneumoniae, Streptococcus mutans, Treponema pallidum, Yersinia enterocolitica, Yersinia pestis and any species falling within the genera of any of the above species.

[0030] 13. The purified or isolated antisense nucleic acid of Paragraph 11, wherein said nucleotide sequence is complementary to a nucleotide sequence of a nucleic acid from an organism other than E. coli.

[0031] 14. The purified or isolated antisense nucleic acid of Paragraph 11, wherein said proliferation-required gene comprises a nucleotide sequence selected from the group consisting of SEQ ID NOS.: 3796-3800, 3806-4860, 5916-10012.

[0032] 15. A purified or isolated nucleic acid comprising a nucleotide sequence having at least 70% identity to a nucleotide sequence selected from the group consisting of SEQ ID NOs.: 8-3795, fragments comprising at least 25 consecutive nucleotides of SEQ ID NOs.: 8-3795, the nucleotide sequences complementary to SEQ ID NOs.: 8-3795 and the sequences complementary to fragments comprising at least 25 consecutive nucleotides of SEQ ID NOs.: 8-3795 as determined using BLASTN version 2.0 with the default parameters.

[0033] 16. The purified or isolated nucleic acid of Paragraph 15, wherein said nucleic acid is obtained from an organism selected from the group consisting of Anaplasma marginale, Aspergillus fumigatus, Bacillus anthracis, Bacterioides fragilis Bordetella pertussis, Burkholderia cepacia, Campylobacter jejuni, Candida albicans, Candida glabrata (also called Torulopsis glabrata), Candida tropicalis, Candida parapsilosis, Candida guilliermondii, Candida krusei, Candida kefyr (also called Candida pseudotropicalis), Candida dubliniensis, Chlamydia pneumoniae, Chlamydia trachomatus, Clostridium botulinum, Clostridium difficile, Clostridium perfringens, Coccidiodes immitis, Corynebacterium diptheriae, Cryptococcus neoformans, Enterobacter cloacae, Enterococcus faecalis, Enterococcus faecium, Escherichia coli, Haemophilus influenzae, Helicobacter pylori, Histoplasma capsulatum, Klebsiella pneumoniae, Listeria monocytogenes, Mycobacterium leprae, Mycobacterium tuberculosis, Neisseria gonorrhoeae, Neisseria meningitidis, Nocardia asteroides, Pasteurella haemolytica, Pasteurella multocida, Pneumocystis carinii, Proteus vulgaris, Pseudomonas aeruginosa, Salmonella bongori, Salmonella cholerasuis, Salmonella enterica, Salmonella paratyphi, Salmonella typhi, Salmonella typhimurium, Staphylococcus aureus, Listeria monocytogenes, Moxarella catarrhalis, Shigella boydii, Shigella dysenteriae, Shigella flexneri, Shigella sonnei, Staphylococcus epidermidis, Streptococcus pneumoniae, Streptococcus mutans, Treponema pallidum, Yersinia enterocolitica, Yersinia pestis and any species falling within the genera of any of the above species.

[0034] 17. The nucleic acid of Paragraph 15, wherein said nucleic acid is obtained from an organism other than E. coli.

[0035] 18. A vector comprising a promoter operably linked to a nucleic acid encoding a polypeptide whose expression is inhibited by an antisense nucleic acid comprising a nucleotide sequence of any one of SEQ ID NOs.: 8-3795.

[0036] 19. The vector of Paragraph 18, wherein said nucleic acid encoding said polypeptide is obtained from an organism selected from the group consisting of Anaplasma marginale, Aspergillus fumigatus, Bacillus anthracis, Bacterioides fragilis Bordetella pertussis, Burkholderia cepacia, Campylobacter jejuni, Candida albicans, Candida glabrata (also called Torulopsis glabrata), Candida tropicalis, Candida parapsilosis, Candida guilliermondii, Candida krusei, Candida kefyr (also called Candida pseudotropicalis), Candida dubliniensis, Chlamydia pneumoniae, Chlamydia trachomatus, Clostridium botulinum, Clostridium difficile, Clostridium perfringens, Coccidiodes immitis, Corynebacterium diptheriae, Cryptococcus neoformans, Enterobacter cloacae, Enterococcus faecalis, Enterococcus faecium, Escherichia coli, Haemophilus influenzae, Helicobacter pylori, Histoplasma capsulatum, Klebsiella pneumoniae, Listeria monocytogenes, Mycobacterium leprae, Mycobacterium tuberculosis, Neisseria gonorrhoeae, Neisseria meningitidis, Nocardia asteroides, Pasteurella haemolytica, Pasteurella multocida, Pneumocystis carinii, Proteus vulgaris, Pseudomonas aeruginosa, Salmonella bongori, Salmonella cholerasuis, Salmonella enterica, Salmonella paratyphi, Salmonella typhi, Salmonella typhimurium, Staphylococcus aureus, Listeria monocytogenes, Moxarella catarrhalis, Shigella boydii, Shigella dysenteriae, Shigella flexneri, Shigella sonnei, Staphylococcus epidermidis, Streptococcus pneumoniae, Streptococcus mutans, Treponema pallidum, Yersinia enterocolitica, Yersinia pestis and any species falling within the genera of any of the above species.

[0037] 20. The vector of Paragraph 18, wherein said nucleotide sequence encoding said polypeptide is obtained from an organism other than E. coli.

[0038] 21. A host cell containing the vector of Paragraph 18.

[0039] 22. The vector of Paragraph 18, wherein said polypeptide comprises a polypeptide comprising an amino acid sequence selected from the group consisting of SEQ ID NOs: 3801-3805, 4861-5915, 10013-14110.

[0040] 23. The vector of Paragraph 18, wherein said promoter is operably linked to a nucleic acid comprising a nucleotide sequence selected from the group consisting of SEQ ID NOS.: 3796-3800, 3806-4860, 5916-10012.

[0041] 24. A purified or isolated polypeptide comprising a polypeptide whose expression is inhibited by an antisense nucleic acid comprising a nucleotide sequence of any one of SEQ ID NOs.: 8-3795, or a fragment selected from the group consisting of fragments comprising at least 5, at least 10, at least 20, at least 30, at least 40, at least 50, at least 60 or more than 60 consecutive amino acids of one of the said polypeptides.

[0042] 25. The polypeptide of Paragraph 24, wherein said polypeptide comprises an amino acid sequence of any one of SEQ ID NOs.: 3801-3805, 4861-5915, 10013-14110 or a fragment comprising at least 5, at least 10, at least 20, at least 30, at least 40, at least 50, at least 60 or more than 60 consecutive amino acids of a polypeptide comprising an amino acid sequence selected from the group consisting of SEQ ID NOs.: 3801-3805, 4861-5915, 10013-14110.

[0043] 26. The polypeptide of Paragraph 24, wherein said polypeptide is obtained from an organism selected from the group consisting of Anaplasma marginale, Aspergillus fumigatus, Bacillus anthracis, Bacterioides fragilis Bordetella pertussis, Burkholderia cepacia, Campylobacter jejuni, Candida albicans, Candida glabrata (also called Torulopsis glabrata), Candida tropicalis, Candida parapsilosis, Candida guilliermondii, Candida krusei, Candida kefyr (also called Candida pseudotropicalis), Candida dubliniensis, Chlamydia pneumoniae, Chlamydia trachomatus, Clostridium botulinum, Clostridium difficile, Clostridium perfringens, Coccidiodes immitis, Corynebacterium diptheriae, Cryptococcus neoformans, Enterobacter cloacae, Enterococcus faecalis, Enterococcus faecium, Escherichia coli, Haemophilus influenzae, Helicobacter pylori, Histoplasma capsulatum, Klebsiella pneumoniae, Listeria monocytogenes, Mycobacterium leprae, Mycobacterium tuberculosis, Neisseria gonorrhoeae, Neisseria meningitidis, Nocardia asteroides, Pasteurella haemolytica, Pasteurella multocida, Pneumocystis carinii, Proteus vulgaris, Pseudomonas aeruginosa, Salmonella bongori, Salmonella cholerasuis, Salmonella enterica, Salmonella paratyphi, Salmonella typhi, Salmonella typhimurium, Staphylococcus aureus, Listeria monocytogenes, Moxarella catarrhalis, Shigella boydii, Shigella dysenteriae, Shigella flexneri, Shigella sonnei, Staphylococcus epidermidis, Streptococcus pneumoniae, Streptococcus mutans, Treponema pallidum, Yersinia enterocolitica, Yersinia pestis and any species falling within the genera of any of the above species.

[0044] 27. The polypeptide of Paragraph 24, wherein said polypeptide is obtained from an organism other than E. coli.

[0045] 28. A purified or isolated polypeptide comprising a polypeptide having at least 25% amino acid identity to a polypeptide whose expression is inhibited by a nucleic acid comprising a nucleotide sequence selected from the group consisting of SEQ ID NOs.: 8-3795, or at least 25% amino acid identity to a fragment comprising at least 10, at least 20, at least 30, at least 40, at least 50, at least 60 or more than 60 consecutive amino acids of a polypeptide whose expression is inhibited by a nucleic acid comprising a nucleotide sequence selected from the group consisting of SEQ ID NOs.: 8-3795 as determined using FASTA version 3.0t78 with the default parameters.

[0046] 29. The polypeptide of Paragraph 28, wherein said polypeptide has at least 25% identity to a polypeptide comprising one of SEQ ID NOs: 3801-3805, 4861-5915, 10013-14110 or at least 25% identity to a fragment comprising at least 5, at least 10, at least 20, at least 30, at least 40, at least 50, at least 60 or more than 60 consecutive amino acids of a polypeptide comprising one of SEQ ID NOs.: 3801-3805, 4861-5915, 10013-14110 as determined using FASTA version 3.0t78 with the default parameters.

[0047] 30. The polypeptide of Paragraph 28, wherein said polypeptide is obtained from an organism selected from the group consisting of Anaplasma marginale, Aspergillus fumigatus, Bacillus anthracis, Bacterioides fragilis Bordetella pertussis, Burkholderia cepacia, Campylobacter jejuni, Candida albicans, Candida glabrata (also called Torulopsis glabrata), Candida tropicalis, Candida parapsilosis, Candida guilliermondii, Candida krusei, Candida kefyr (also called Candida pseudotropicalis), Candida dubliniensis, Chlamydia pneumoniae, Chlamydia trachomatus, Clostridium botulinum, Clostridium difficile, Clostridium perfringens, Coccidiodes immitis, Corynebacterium diptheriae, Cryptococcus neoformans, Enterobacter cloacae, Enterococcus faecalis, Enterococcus faecium, Escherichia coli, Haemophilus influenzae, Helicobacter pylori, Histoplasma capsulatum, Klebsiella pneumoniae, Listeria monocytogenes, Mycobacterium leprae, Mycobacterium tuberculosis, Neisseria gonorrhoeae, Neisseria meningitidis, Nocardia asteroides, Pasteurella haemolytica, Pasteurella multocida, Pneumocystis carinii, Proteus vulgaris, Pseudomonas aeruginosa, Salmonella bongori, Salmonella cholerasuis, Salmonella enterica, Salmonella paratyphi, Salmonella typhi, Salmonella typhimurium, Staphylococcus aureus, Listeria monocytogenes, Moxarella catarrhalis, Shigella boydii, Shigella dysenteriae, Shigella flexneri, Shigella sonnei, Staphylococcus epidermidis, Streptococcus pneumoniae, Streptococcus mutans, Treponema pallidum, Yersinia enterocolitica, Yersinia pestis and any species falling within the genera of any of the above species.

[0048] 31. The polypeptide of Paragraph 28, wherein said polypeptide is obtained from an organism other than E. coli.

[0049] 32. An antibody capable of specifically binding the polypeptide of one of Paragraphs 28-31.

[0050] 33. A method of producing a polypeptide, comprising introducing a vector comprising a promoter operably linked to a nucleic acid comprising a nucleotide sequence encoding a polypeptide whose expression is inhibited by an antisense nucleic acid comprising one of SEQ ID NOs.: 8-3795 into a cell.

[0051] 34. The method of Paragraph 33, further comprising the step of isolating said polypeptide.

[0052] 35. The method of Paragraph 33, wherein said polypeptide comprises an amino acid sequence selected from the group consisting of SEQ ID NOs.: 3801-3805, 4861-5915, 10013-14110.

[0053] 36. The method of Paragraph 33, wherein said nucleic acid encoding said polypeptide is obtained from an organism selected from the group consisting of Anaplasma marginale, Aspergillus fumigatus, Bacillus anthracis, Bacterioides fragilis Bordetella pertussis, Burkholderia cepacia, Campylobacter jejuni, Candida albicans, Candida glabrata (also called Torulopsis glabrata), Candida tropicalis, Candida parapsilosis, Candida guilliermondii, Candida krusei, Candida kefyr (also called Candida pseudotropicalis), Candida dubliniensis, Chlamydia pneumoniae, Chlamydia trachomatus, Clostridium botulinum, Clostridium difficile, Clostridium perfringens, Coccidiodes immitis, Corynebacterium diptheriae, Cryptococcus neoformans, Enterobacter cloacae, Enterococcus faecalis, Enterococcus faecium, Escherichia coli, Haemophilus influenzae, Helicobacter pylori, Histoplasma capsulatum, Klebsiella pneumoniae, Listeria monocytogenes, Mycobacterium leprae, Mycobacterium tuberculosis, Neisseria gonorrhoeae, Neisseria meningitidis, Nocardia asteroides, Pasteurella haemolytica, Pasteurella multocida, Pneumocystis carinii, Proteus vulgaris, Pseudomonas aeruginosa, Salmonella bongori, Salmonella cholerasuis, Salmonella enterica, Salmonella paratyphi, Salmonella typhi, Salmonella typhimurium, Staphylococcus aureus, Listeria monocytogenes, Moxarella catarrhalis, Shigella boydii, Shigella dysenteriae, Shigella flexneri, Shigella sonnei, Staphylococcus epidermidis, Streptococcus pneumoniae, Streptococcus mutans, Treponema pallidum, Yersinia enterocolitica, Yersinia pestis and any species falling within the genera of any of the above species.

[0054] 37. The method of Paragraph 33, wherein said nucleic acid encoding said polypeptide is obtained from an organism other than E. coli.

[0055] 38. The method of Paragraph 33, wherein said promoter is operably linked to a nucleic acid comprising a nucleotide sequence selected from the group consisting of SEQ ID NOS.: 3796-3800, 3806-4860, 5916-10012.

[0056] 39. A method of inhibiting proliferation of a cell in an individual comprising inhibiting the activity or reducing the amount of a gene product whose expression is inhibited by an antisense nucleic acid comprising a nucleotide sequence selected from the group consisting of SEQ ID NOs.: 8-3795 or inhibiting the activity or reducing the amount of a nucleic acid encoding said gene product.

[0057] 40. The method of Paragraph 39, wherein said method comprises inhibiting said activity or reducing said amount of a gene product in an organism selected from the group consisting of Anaplasma marginale, Aspergillus fumigatus, Bacillus anthracis, Bacterioides fragilis Bordetella pertussis, Burkholderia cepacia, Campylobacter jejuni, Candida albicans, Candida glabrata (also called Torulopsis glabrata), Candida tropicalis, Candida parapsilosis, Candida guilliermondii, Candida krusei, Candida kefyr (also called Candida pseudotropicalis), Candida dubliniensis, Chlamydia pneumoniae, Chlamydia trachomatus, Clostridium botulinum, Clostridium difficile, Clostridium perfringens, Coccidiodes immitis, Corynebacterium diptheriae, Cryptococcus neoformans, Enterobacter cloacae, Enterococcus faecalis, Enterococcus faecium, Escherichia coli, Haemophilus influenzae, Helicobacter pylori, Histoplasma capsulatum, Klebsiella pneumoniae, Listeria monocytogenes, Mycobacterium leprae, Mycobacterium tuberculosis, Neisseria gonorrhoeae, Neisseria meningitidis, Nocardia asteroides, Pasteurella haemolytica, Pasteurella multocida, Pneumocystis carinii, Proteus vulgaris, Pseudomonas aeruginosa, Salmonella bongori, Salmonella cholerasuis, Salmonella enterica, Salmonella paratyphi, Salmonella typhi, Salmonella typhimurium, Staphylococcus aureus, Listeria monocytogenes, Moxarella catarrhalis, Shigella boydii, Shigella dysenteriae, Shigella flexneri, Shigella sonnet, Staphylococcus epidermidis, Streptococcus pneumoniae, Streptococcus mutans, Treponema pallidum, Yersinia enterocolitica, Yersinia pestis and any species falling within the genera of any of the above species.

[0058] 41. The method of Paragraph 39, wherein said method comprises inhibiting said activity or reducing said amount of a gene product in an organism other than E. coli.

[0059] 42. The method of Paragraph 39, wherein said gene product is present in an organism other than E. coli.

[0060] 43. The method of Paragraph 39, wherein said gene product comprises a polypeptide comprising a sequence selected from the group consisting of SEQ ID NOs.: 3801-3805, 4861-5915, 10013-14110.

[0061] 44. A method for identifying a compound which influences the activity of a gene product required for proliferation, said gene product comprising a gene product whose expression is inhibited by an antisense nucleic acid comprising a nucleotide sequence selected from the group consisting of SEQ ID NOs.: 8-3795, said method comprising:

[0062] contacting said gene product with a candidate compound; and

[0063] determining whether said compound influences the activity of said gene product.

[0064] 45. The method of Paragraph 44, wherein said gene product is from an organism selected from the group consisting of Anaplasma marginale, Aspergillus fumigatus, Bacillus anthracis, Bacterioides fragilis Bordetella pertussis, Burkholderia cepacia, Campylobacter jejuni, Candida albicans, Candida glabrata (also called Torulopsis glabrata), Candida tropicalis, Candida parapsilosis, Candida guilliermondii, Candida krusei, Candida kefyr (also called Candida pseudotropicalis), Candida dubliniensis, Chlamydia pneumoniae, Chlamydia trachomatus, Clostridium botulinum, Clostridium difficile, Clostridium perfringens, Coccidiodes immitis, Corynebacterium diptheriae, Cryptococcus neoformans, Enterobacter cloacae, Enterococcus faecalis, Enterococcus faecium, Escherichia coli, Haemophilus influenzae, Helicobacter pylori, Histoplasma capsulatum, Klebsiella pneumoniae, Listeria monocytogenes, Mycobacterium leprae, Mycobacterium tuberculosis, Neisseria gonorrhoeae, Neisseria meningitidis, Nocardia asteroides, Pasteurella haemolytica, Pasteurella multocida, Pneumocystis carinii, Proteus vulgaris, Pseudomonas aeruginosa, Salmonella bongori, Salmonella cholerasuis, Salmonella enterica, Salmonella paratyphi, Salmonella typhi, Salmonella typhimurium, Staphylococcus aureus, Listeria monocytogenes, Moxarella catarrhalis, Shigella boydii, Shigella dysenteriae, Shigella flexneri, Shigella sonnei, Staphylococcus epidermidis, Streptococcus pneumoniae, Streptococcus mutans, Treponema pallidum, Yersinia enterocolitica, Yersinia pestis and any species falling within the genera of any of the above species.

[0065] 46. The method of Paragraph 44, wherein said gene product is from an organism other than E coli.

[0066] 47. The method of Paragraph 44, wherein said gene product is a polypeptide and said activity is an enzymatic activity.

[0067] 48. The method of Paragraph 44, wherein said gene product is a polypeptide and said activity is a carbon compound catabolism activity.

[0068] 49. The method of Paragraph 44, wherein said gene product is a polypeptide and said activity is a biosynthetic activity.

[0069] 50. The method of Paragraph 44, wherein said gene product is a polypeptide and said activity is a transporter activity.

[0070] 51. The method of Paragraph 44, wherein said gene product is a polypeptide and said activity is a transcriptional activity.

[0071] 52. The method of Paragraph 44, wherein said gene product is a polypeptide and said activity is a DNA replication activity.

[0072] 53. The method of Paragraph 44, wherein said gene product is a polypeptide and said activity is a cell division activity.

[0073] 54. The method of Paragraph 44, wherein said gene product is an RNA.

[0074] 55. The method of Paragraph 44, wherein said gene product is a polypeptide comprising an amino acid sequence selected from the group consisting of SEQ ID NOs.: 3801-3805, 4861-5915, 10013-14110.

[0075] 56. A compound identified using the method of Paragraph 44.

[0076] 57. A method for identifying a compound or nucleic acid having the ability to reduce the activity or level of a gene product required for proliferation, said gene product comprising a gene product whose activity or expression is inhibited by an antisense nucleic acid comprising a nucleotide sequence selected from the group consisting of SEQ ID NOs.: 8-3795, said method comprising:

[0077] (a) contacting a target gene or RNA encoding said gene product with a candidate compound or nucleic acid; and

[0078] (b) measuring an activity of said target.

[0079] 58. The method of Paragraph 57, wherein said target gene or RNA is from an organism selected from the group consisting of Anaplasma marginale, Aspergillus fumigatus, Bacillus anthracis, Bacterioides fragilis Bordetella pertussis, Burkholderia cepacia, Campylobacter jejuni, Candida albicans, Candida glabrata (also called Torulopsis glabrata), Candida tropicalis, Candida parapsilosis, Candida guilliermondii, Candida krusei, Candida kefyr (also called Candida pseudotropicalis), Candida dubliniensis, Chlamydia pneumoniae, Chlamydia trachomatus, Clostridium botulinum, Clostridium difficile, Clostridium perfringens, Coccidiodes immitis, Corynebacterium diptheriae, Cryptococcus neoformans, Enterobacter cloacae, Enterococcus faecalis, Enterococcus faecium, Escherichia coli, Haemophilus influenzae, Helicobacter pylori, Histoplasma capsulatum, Klebsiella pneumoniae, Listeria monocytogenes, Mycobacterium leprae, Mycobacterium tuberculosis, Neisseria gonorrhoeae, Neisseria meningitidis, Nocardia asteroides, Pasteurella haemolytica, Pasteurella multocida, Pneumocystis carinii, Proteus vulgaris, Pseudomonas aeruginosa, Salmonella bongori, Salmonella cholerasuis, Salmonella enterica, Salmonella paratyphi, Salmonella typhi, Salmonella typhimurium, Staphylococcus aureus, Listeria monocytogenes, Moxarella catarrhalis, Shigella boydii, Shigella dysenteriae, Shigella flexneri, Shigella sonnei, Staphylococcus epidermidis, Streptococcus pneumoniae, Streptococcus mutans, Treponema pallidum, Yersinia enterocolitica, Yersinia pestis and any species falling within the genera of any of the above species.

[0080] 59. The method of Paragraph 57, wherein said target gene or RNA is from an organism other than E. coli.

[0081] 60. The method of Paragraph 57, wherein said gene product is from an organism other than E. coli.

[0082] 61. The method of Paragraph 57, wherein said target is a messenger RNA molecule and said activity is translation of said messenger RNA.

[0083] 62. The method of Paragraph 57, wherein said target is a messenger RNA molecule and said activity is transcription of a gene encoding said messenger RNA.

[0084] 63. The method of Paragraph 57, wherein said target is a gene and said activity is transcription of said gene.

[0085] 64. The method of Paragraph 57, wherein said target is a nontranslated RNA and said activity is processing or folding of said nontranslated RNA or assembly of said nontranslated RNA into a protein/RNA complex.

[0086] 65. The method of Paragraph 57, wherein said target is a messenger RNA molecule encoding a polypeptide comprising an amino acid sequence selected from the group consisting of SEQ ID NOs.: 3801-3805, 4861-5915, 10013-14110.

[0087] 66. The method of Paragraph 57, wherein said target comprises a nucleic acid selected from the group consisting of SEQ ID NOS.: 3796-3800, 3806-4860, 5916-10012.

[0088] 67. A compound or nucleic acid identified using the method of Paragraph 57.

[0089] 68. A method for identifying a compound which reduces the activity or level of a gene product required for proliferation of a cell, wherein the activity or expression of said gene product is inhibited by an antisense nucleic acid comprising a nucleotide sequence selected from the group consisting of SEQ ID NOs.: 8-3795, said method comprising the steps of:

[0090] (a) providing a sublethal level of an antisense nucleic acid comprising a nucleotide sequence complementary to a nucleic acid comprising a nucleotide sequence encoding said gene product in a cell to reduce the activity or amount of said gene product in said cell, thereby producing a sensitized cell;

[0091] (b) contacting said sensitized cell with a compound; and

[0092] (c) determining the degree to which said compound inhibits proliferation of said sensitized cell relative to a cell which does not contain said antisense nucleic acid.

[0093] 69. The method of Paragraph 68, wherein said determining step comprises determining whether said compound inhibits the growth of said sensitized cell to a greater extent than said compound inhibits the growth of a nonsensitized cell.

[0094] 70. The method of Paragraph 68, wherein said cell is a Gram positive bacterium.

[0095] 71. The method of Paragraph 68, wherein said Gram positive bacterium is selected from the group consisting of Staphylococcus species, Streptococcus species, Enterococcus species, Mycobacterium species, Clostridium species, and Bacillus species.

[0096] 72. The method of Paragraph 68, wherein said bacterium is Staphylococcus aureus.

[0097] 73. The method of Paragraph 72, wherein said Staphylococcus species is coagulase negative.

[0098] 74. The method of Paragraph 72, wherein said bacterium is selected from the group consisting of Staphylococcus aureus RN450 and Staphylococcus aureus RN4220.

[0099] 75. The method of Paragraph 68, wherein said cell is an organism selected from the group consisting of Anaplasma marginale, Aspergillus fumigatus, Bacillus anthracis, Bacterioides fragilis Bordetella pertussis, Burkholderia cepacia, Campylobacter jejuni, Candida albicans, Candida glabrata (also called Torulopsis glabrata), Candida tropicalis, Candida parapsilosis, Candida guilliermondii, Candida krusei, Candida kefyr (also called Candida pseudotropicalis), Candida dubliniensis, Chlamydia pneumoniae, Chlamydia trachomatus, Clostridium botulinum, Clostridium difficile, Clostridium perfringens, Coccidiodes immitis, Corynebacterium diptheriae, Cryptococcus neoformans, Enterobacter cloacae, Enterococcus faecalis, Enterococcus faecium, Escherichia coli, Haemophilus influenzae, Helicobacter pylori, Histoplasma capsulatum, Klebsiella pneumoniae, Listeria monocytogenes, Mycobacterium leprae, Mycobacterium tuberculosis, Neisseria gonorrhoeae, Neisseria meningitidis, Nocardia asteroides, Pasteurella haemolytica, Pasteurella multocida, Pneumocystis carinii, Proteus vulgaris, Pseudomonas aeruginosa, Salmonella bongori, Salmonella cholerasuis, Salmonella enterica, Salmonella paratyphi, Salmonella typhi, Salmonella typhimurium, Staphylococcus aureus, Listeria monocytogenes, Moxarella catarrhalis, Shigella boydii, Shigella dysenteriae, Shigella flexneri, Shigella sonnei, Staphylococcus epidermidis, Streptococcus pneumoniae, Streptococcus mutans, Treponema pallidum, Yersinia enterocolitica, Yersinia pestis and any species falling within the genera of any of the above species.

[0100] 76. The method of Paragraph 68, wherein said cell is not an E. coli cell.

[0101] 77. The method of Paragraph 68, wherein said gene product is from an organism other than E. coli.

[0102] 78. The method of Paragraph 68, wherein said antisense nucleic acid is transcribed from an inducible promoter.

[0103] 79. The method of Paragraph 68, further comprising the step of contacting said cell with a concentration of inducer which induces transcription of said antisense nucleic acid to a sublethal level.

[0104] 80. The method of Paragraph 68, wherein growth inhibition is measured by monitoring optical density of a culture growth solution.

[0105] 81. The method of Paragraph 68, wherein said gene product is a polypeptide.

[0106] 82. The method of Paragraph 81, wherein said polypeptide comprises an amino acid sequence selected from the group consisting of SEQ ID NOs.: 3801-3805, 4861-5915, 10013-14110.

[0107] 83. The method of Paragraph 68, wherein said gene product is an RNA.

[0108] 84. The method of Paragraph 68, wherein nucleic acid encoding said gene product comprises a nucleotide sequence selected from the group consisting of SEQ ID NOS.: 3796-3800, 3806-4860, 5916-10012.

[0109] 85. A compound identified using the method of Paragraph 68.

[0110] 86. A method for inhibiting cellular proliferation comprising introducing an effective amount of a compound with activity against a gene whose activity or expression is inhibited by an antisense nucleic acid comprising a nucleotide sequence selected from the group consisting of SEQ ID NOs.: 8-3795 or a compound with activity against the product of said gene into a population of cells expressing said gene.

[0111] 87. The method of Paragraph 86, wherein said compound is an antisense nucleic acid comprising a nucleotide sequence selected from the group consisting of SEQ ID NOs.: 8-3795, or a proliferation-inhibiting portion thereof.

[0112] 88. The method of Paragraph 86, wherein said proliferation inhibiting portion of one of SEQ ID NOs.: 8-3795 is a fragment comprising at least 10, at least 20, at least 25, at least 30, at least 50 or more than 51 consecutive nucleotides of one of SEQ ID NOs.: 8-3795.

[0113] 89. The method of Paragraph 86, wherein said population is a population of Gram positive bacteria.

[0114] 90. The method of Paragraph 89, wherein said population of Gram positive bacteria is selected from the group consisting of a population of Staphylococcus species, Streptococcus species, Enterococcus species, Mycobacterium species, Clostridium species, and Bacillus species.

[0115] 91. The method of Paragraph 86, wherein said population is a population of Staphylococcus aureus.

[0116] 92. The method of Paragraph 91, wherein said population is a population of a bacterium selected from the group consisting of Staphylococcus aureus RN450 and Staphylococcus aureus RN4220.

[0117] 93. The method of Paragraph 86, wherein said population is a population of a bacterium selected from the group consisting of Anaplasma marginale, Aspergillus fumigatus, Bacillus anthracis, Bacterioides fragilis Bordetella pertussis, Burkholderia cepacia, Campylobacter jejuni, Candida albicans, Candida glabrata (also called Torulopsis glabrata), Candida tropicalis, Candida parapsilosis, Candida guilliermondii, Candida krusei, Candida kefyr (also called Candida pseudotropicalis), Candida dubliniensis, Chlamydia pneumoniae, Chlamydia trachomatus, Clostridium botulinum, Clostridium difficile, Clostridium perfringens, Coccidiodes immitis, Corynebacterium diptheriae, Cryptococcus neoformans, Enterobacter cloacae, Enterococcus faecalis, Enterococcus faecium, Escherichia coli, Haemophilus influenzae, Helicobacter pylori, Histoplasma capsulatum, Klebsiella pneumoniae, Listeria monocytogenes, Mycobacterium leprae, Mycobacterium tuberculosis, Neisseria gonorrhoeae, Neisseria meningitidis, Nocardia asteroides, Pasteurella haemolytica, Pasteurella multocida, Pneumocystis carinii, Proteus vulgaris, Pseudomonas aeruginosa, Salmonella bongori, Salmonella cholerasuis, Salmonella enterica, Salmonella paratyphi, Salmonella typhi, Salmonella typhimurium, Staphylococcus aureus, Listeria monocytogenes, Moxarella catarrhalis, Shigella boydii, Shigella dysenteriae, Shigella flexneri, Shigella sonnei, Staphylococcus epidermidis, Streptococcus pneumoniae, Streptococcus mutans, Treponema pallidum, Yersinia enterocolitica, Yersinia pestis and any species falling within the genera of any of the above species.

[0118] 94. The method of Paragraph 86, wherein said population is a population of an organism other than E. coli.

[0119] 95. The method of Paragraph 86, wherein said product of said gene is from an organism other than E. coli.

[0120] 96. The method of Paragraph 86, wherein said gene encodes a polypeptide comprising an amino acid sequence selected from the group consisting of SEQ ID NOs.: 3801-3805,4861-5915, 10013-14110.

[0121] 97. The method of Paragraph 86, wherein said gene comprises a nucleotide sequence selected from the group consisting of SEQ ID NOS.: 3796-3800, 3806-4860, 5916-10012.

[0122] 98. A composition comprising an effective concentration of an antisense nucleic acid comprising a nucleotide sequence selected from the group consisting of SEQ ID NOs.: 8-3795, or a proliferation-inhibiting portion thereof in a pharmaceutically acceptable carrier.

[0123] 99. The composition of Paragraph 98, wherein said proliferation-inhibiting portion of one of SEQ ID NOs.: 8-3795 comprises at least 20, at least 25, at least 30, at least 50 or more than 50 consecutive nucleotides of one of SEQ ID NOs.: 8-3795.

[0124] 100. A method for inhibiting the activity or expression of a gene in an operon required for proliferation wherein the activity or expression of at least one gene in said operon is inhibited by an antisense nucleic acid comprising a sequence selected from the group consisting of SEQ ID NOs.: 8-3795, said method comprising contacting a cell in a cell population with an antisense nucleic acid complementary to at least a portion of said operon.

[0125] 101. The method of Paragraph 100, wherein said antisense nucleic acid comprises a nucleotide sequence selected from the group consisting of SEQ ID NOs.: 8-3795 or a proliferation-inhibiting portion thereof.

[0126] 102. The method of Paragraph 100, wherein said cell is selected from the group consisting of Anaplasma marginale, Aspergillus fumigatus, Bacillus anthracis, Bacterioides fragilis Bordetella pertussis, Burkholderia cepacia, Campylobacter jejuni, Candida albicans, Candida glabrata (also called Torulopsis glabrata), Candida tropicalis, Candida parapsilosis, Candida guilliermondii, Candida krusei, Candida kefyr (also called Candida pseudotropicalis), Candida dubliniensis, Chlamydia pneumoniae, Chlamydia trachomatus, Clostridium botulinum, Clostridium difficile, Clostridium perfringens, Coccidiodes immitis, Corynebacterium diptheriae, Cryptococcus neoformans, Enterobacter cloacae, Enterococcus faecalis, Enterococcus faecium, Escherichia coli, Haemophilus influenzae, Helicobacter pylori, Histoplasma capsulatum, Klebsiella pneumoniae, Listeria monocytogenes, Mycobacterium leprae, Mycobacterium tuberculosis, Neisseria gonorrhoeae, Neisseria meningitidis, Nocardia asteroides, Pasteurella haemolytica, Pasteurella multocida, Pneumocystis carinii, Proteus vulgaris, Pseudomonas aeruginosa, Salmonella bongori, Salmonella cholerasuis, Salmonella enterica, Salmonella paratyphi, Salmonella typhi, Salmonella typhimurium, Staphylococcus aureus, Listeria monocytogenes, Moxarella catarrhalis, Shigella boydii, Shigella dysenteriae, Shigella flexneri, Shigella sonnei, Staphylococcus epidermidis, Streptococcus pneumoniae, Streptococcus mutans, Treponema pallidum, Yersinia enterocolitica, Yersinia pestis and any species falling within the genera of any of the above species.

[0127] 103. The method of Paragraph 100, wherein said cell is not an E. coli cell.

[0128] 104. The method of Paragraph 100, wherein said gene is from an organism other than E. coli.

[0129] 105. The method of Paragraph 100, wherein said cell is contacted with said antisense nucleic acid by introducing a plasmid which expresses said antisense nucleic acid into said cell population.

[0130] 106. The method of Paragraph 100, wherein said cell is contacted with said antisense nucleic acid by introducing a phage which encodes said antisense nucleic acid into said cell population.

[0131] 107. The method of Paragraph 100, wherein said cell is contacted with said antisense nucleic acid by expressing said antisense nucleic acid from the chromosome of cells in said cell population.

[0132] 108. The method of Paragraph 100, wherein said cell is contacted with said antisense nucleic acid by introducing a promoter adjacent to a chromosomal copy of said antisense nucleic acid such that said promoter directs the transcription of said antisense nucleic acid.

[0133] 109. The method of Paragraph 100, wherein said cell is contacted with said antisense nucleic acid by introducing a retron which expresses said antisense nucleic acid into said cell population.

[0134] 110. The method of Paragraph 100, wherein said cell is contacted with said antisense nucleic acid by introducing a ribozyme into said cell-population, wherein a binding portion of said ribozyme comprises said antisense nucleic acid.

[0135] 111. The method of Paragraph 100, wherein said cell is contacted with said antisense nucleic acid by introducing a liposome comprising said antisense nucleic acid into said cell.

[0136] 112. The method of Paragraph 100, wherein said cell is contacted with said antisense nucleic acid by electroporation of said antisense nucleic acid into said cell.

[0137] 113. The method of Paragraph 100, wherein said antisense nucleic acid is a fragment comprising at least 10, at least 20, at least 25, at least 30, at least 50 or more than 50 consecutive nucleotides of one of SEQ ID NOs.: 8-3795.

[0138] 114. The method of Paragraph 100 wherein said antisense nucleic acid is a synthetic oligonucleotide.

[0139] 115. The method of Paragraph 100, wherein said gene comprises a nucleotide sequence selected from the group consisting of SEQ ID NOS.: 3796-3800, 3806-4860, 5916-10012.

[0140] 116. A method for identifying a gene which is required for proliferation of a cell comprising:

[0141] (a) contacting a cell with an antisense nucleic acid comprising a nucleotide sequence selected from the group consisting of SEQ ID NOs.: 8-3795, wherein said cell is a cell other than the organism from which said nucleic acid was obtained;

[0142] (b) determining whether said nucleic acid inhibits proliferation of said cell; and

[0143] (c) identifying the gene in said cell which encodes the mRNA which is complementary to said antisense nucleic acid or a portion thereof.

[0144] 117. The method of Paragraph 116, wherein said cell is selected from the group consisting of Staphylococcus species, Streptococcus species, Enterococcus species, Mycobacterium species, Clostridium species, and Bacillus species.

[0145] 118. The method of Paragraph 116 wherein said cell is selected from the group consisting of Anaplasma marginale, Aspergillus fumigatus, Bacillus anthracis, Bacterioides fragilis Bordetella pertussis, Burkholderia cepacia, Campylobacter jejuni, Candida albicans, Candida glabrata (also called Torulopsis glabrata), Candida tropicalis, Candida parapsilosis, Candida guilliermondii, Candida krusei, Candida kefyr (also called Candida pseudotropicalis), Candida dubliniensis, Chlamydia pneumoniae, Chlamydia trachomatus, Clostridium botulinum, Clostridium difficile, Clostridium perfringens, Coccidiodes immitis, Corynebacterium diptheriae, Cryptococcus neoformans, Enterobacter cloacae, Enterococcus faecalis, Enterococcus faecium, Escherichia coli, Haemophilus influenzae, Helicobacter pylori, Histoplasma capsulatum, Klebsiella pneumoniae, Listeria monocytogenes, Mycobacterium leprae, Mycobacterium tuberculosis, Neisseria gonorrhoeae, Neisseria meningitidis, Nocardia asteroides, Pasteurella haemolytica, Pasteurella multocida, Pneumocystis carinii, Proteus vulgaris, Pseudomonas aeruginosa, Salmonella bongori, Salmonella cholerasuis, Salmonella enterica, Salmonella paratyphi, Salmonella typhi, Salmonella typhimurium, Staphylococcus aureus, Listeria monocytogenes, Moxarella catarrhalis, Shigella boydii, Shigella dysenteriae, Shigella flexneri, Shigella sonnei, Staphylococcus epidermidis, Streptococcus pneumoniae, Streptococcus mutans, Treponema pallidum, Yersinia enterocolitica, Yersinia pestis and any species falling within the genera of any of the above species.

[0146] 119. The method of Paragraph 116, wherein said cell is not E. coli.

[0147] 120. The method of Paragraph 116, further comprising operably linking said antisense nucleic acid to a promoter which is functional in said cell, said promoter being included in a vector, and introducing said vector into said cell.

[0148] 121. A method for identifying a compound having the ability to inhibit proliferation of a cell comprising:

[0149] (a) identifying a homolog of a gene or gene product whose activity or level is inhibited by a nucleic acid comprising a nucleotide sequence selected from the group consisting of SEQ ID NOs. 8-3795 in a test cell, wherein said test cell is not the cell from which said nucleic acid was obtained;

[0150] (b) identifying an inhibitory nucleic acid sequence which inhibits the activity of said homolog in said test cell;

[0151] (c) contacting said test cell with a sublethal level of said inhibitory nucleic acid, thus sensitizing said cell;

[0152] (d) contacting the sensitized cell of step (c) with a compound; and

[0153] (e) determining the degree to which said compound inhibits proliferation of said sensitized cell relative to a cell which does not contain said inhibitory nucleic acid.

[0154] 122. The method of Paragraph 121, wherein said determining step comprises determining whether said compound inhibits proliferation of said sensitized test cell to a greater extent than said compound inhibits proliferation of a nonsensitized test cell.

[0155] 123. The method of Paragraph 121, wherein step (a) comprises identifying a nucleic acid homologous to a gene or gene product whose activity or level is inhibited by a nucleic acid selected from the group consisting of SEQ ID NOs. 8-3795 or a nucleic acid encoding a homologous polypeptide to a polypeptide whose activity or level is inhibited by a nucleic acid selected from the group consisting of SEQ ID NOs. 8-3795 by using an algorithm selected from the group consisting of BLASTN version 2.0 with the default parameters and FASTA version 3.0t78 algorithm with the default parameters to identify said homologous nucleic acid or said nucleic acid encoding a homologous polypeptide in a database.

[0156] 124. The method of Paragraph 121 wherein said step (a) comprises identifying a homologous nucleic acid or a nucleic acid comprising a sequence of nucleotides encoding a homologous polypeptide by identifying nucleic acids which hybridize to said nucleic acid selected from the group consisting of SEQ ID NOs. 8-3795 or the complement of said nucleic acid selected from the group consisting of SEQ ID NOs. 8-3795.

[0157] 125. The method of Paragraph 121 wherein step (a) comprises expressing a nucleic acid selected from the group consisting of SEQ ID NOs. 8-3795 in said test cell.

[0158] 126. The method of Paragraph 121, wherein step (a) comprises identifying a homologous nucleic acid or a nucleic acid encoding a homologous polypeptide in a test cell selected from the group consisting of Anaplasma marginale, Aspergillus fumigatus, Bacillus anthracis, Bacterioides fragilis Bordetella pertussis, Burkholderia cepacia, Campylobacter jejuni, Candida albicans, Candida glabrata (also called Torulopsis glabrata), Candida tropicalis, Candida parapsilosis, Candida guilliermondii, Candida krusei, Candida kefyr (also called Candida pseudotropicalis), Candida dubliniensis, Chlamydia pneumoniae, Chlamydia trachomatus, Clostridium botulinum, Clostridium difficile, Clostridium perfringens, Coccidiodes immitis, Corynebacterium diptheriae, Cryptococcus neoformans, Enterobacter cloacae, Enterococcus faecalis, Enterococcus faecium, Escherichia coli, Haemophilus influenzae, Helicobacter pylori, Histoplasma capsulatum, Klebsiella pneumoniae, Listeria monocytogenes, Mycobacterium leprae, Mycobacterium tuberculosis, Neisseria gonorrhoeae, Neisseria meningitidis, Nocardia asteroides, Pasteurella haemolytica, Pasteurella multocida, Pneumocystis carinii, Proteus vulgaris, Pseudomonas aeruginosa, Salmonella bongori, Salmonella cholerasuis, Salmonella enterica, Salmonella paratyphi, Salmonella typhi, Salmonella typhimurium, Staphylococcus aureus, Listeria monocytogenes, Moxarella catarrhalis, Shigella boydii, Shigella dysenteriae, Shigella flexneri, Shigella sonnei, Staphylococcus epidermidis, Streptococcus pneumoniae, Streptococcus mutans, Treponema pallidum, Yersinia enterocolitica, Yersinia pestis and any species falling within the genera of any of the above species.

[0159] 127. The method of Paragraph 121, wherein step (a) comprises identifying a homologous nucleic acid or a nucleic acid encoding a homologous polypeptide in a test cell other than E coli.

[0160] 128. The method of Paragraph 121, wherein said inhibitory nucleic acid is an antisense nucleic acid.

[0161] 129. The method of Paragraph 121, wherein said inhibitory nucleic acid comprises an antisense nucleic acid to a portion of said homolog.

[0162] 130. The method of Paragraph 121, wherein said inhibitory nucleic acid comprises an antisense nucleic acid to a portion of the operon encoding said homolog.

[0163] 131. The method of Paragraph 121, wherein the step of contacting the cell with a sublethal level of said inhibitory nucleic acid comprises directly contacting the surface of said cell with said inhibitory nucleic acid.

[0164] 132. The method of Paragraph 121, wherein the step of contacting the cell with a sublethal level of said inhibitory nucleic acid comprises transcribing an antisense nucleic acid complementary to at least a portion of the RNA transcribed from said homolog in said cell.

[0165] 133. The method of Paragraph 121, wherein said gene product comprises a polypeptide comprising an amino acid sequence selected from the group consisting of SEQ ID NOs.: 3801-3805, 4861-5915, 10013-14110.

[0166] 134. The method of Paragraph 121, wherein said gene comprises a nucleotide sequence selected from the group consisting of SEQ ID NOS.: 3796-3800, 3806-4860, 5916-10012.

[0167] 135. A compound identified using the method of Paragraph 121.

[0168] 136. A method of identifying a compound having the ability to inhibit proliferation comprising:

[0169] (a) contacting a test cell with a sublethal level of a nucleic acid comprising a nucleotide sequence selected from the group consisting of SEQ ID NOs. 8-3795 or a portion thereof which inhibits the proliferation of the cell from which said nucleic acid was obtained, thus sensitizing said test cell;

[0170] (b) contacting the sensitized test cell of step (a) with a compound; and

[0171] (c) determining the degree to which said compound inhibits proliferation of said sensitized test cell relative to a cell which does not contain said nucleic acid.

[0172] 137. The method of Paragraph 136, wherein said determining step comprises determining whether said compound inhibits proliferation of said sensitized test cell to a greater extent than said compound inhibits proliferation of a nonsensitized test cell.

[0173] 138. A compound identified using the method of Paragraph 136.

[0174] 139. The method of Paragraph 136, wherein said test cell is selected from the group consisting of Anaplasma marginale, Aspergillus fumigatus, Bacillus anthracis, Bacterioides fragilis Bordetella pertussis, Burkholderia cepacia, Campylobacter jejuni, Candida albicans, Candida glabrata (also called Torulopsis glabrata), Candida tropicalis, Candida parapsilosis, Candida guilliermondii, Candida krusei, Candida kefyr (also called Candida pseudotropicalis), Candida dubliniensis, Chlamydia pneumoniae, Chlamydia trachomatus, Clostridium botulinum, Clostridium difficile, Clostridium perfringens, Coccidiodes immitis, Corynebacterium diptheriae, Cryptococcus neoformans, Enterobacter cloacae, Enterococcus faecalis, Enterococcus faecium, Escherichia coli, Haemophilus influenzae, Helicobacter pylori, Histoplasma capsulatum, Klebsiella pneumoniae, Listeria monocytogenes, Mycobacterium leprae, Mycobacterium tuberculosis, Neisseria gonorrhoeae, Neisseria meningitidis, Nocardia asteroides, Pasteurella haemolytica, Pasteurella multocida, Pneumocystis carinii, Proteus vulgaris, Pseudomonas aeruginosa, Salmonella bongori, Salmonella cholerasuis, Salmonella enterica, Salmonella paratyphi, Salmonella typhi, Salmonella typhimurium, Staphylococcus aureus, Listeria monocytogenes, Moxarella catarrhalis, Shigella boydii, Shigella dysenteriae, Shigella flexneri, Shigella sonnei, Staphylococcus epidermidis, Streptococcus pneumoniae, Streptococcus mutans, Treponema pallidum, Yersinia enterocolitica, Yersinia pestis and any species falling within the genera of any of the above species.

[0175] 140. The method of Paragraph 136, wherein the test cell is not E. coli.

[0176] 141. A method for identifying a compound having activity against a biological pathway required for proliferation comprising:

[0177] (a) sensitizing a cell by providing a sublethal level of an antisense nucleic acid complementary to a nucleic acid encoding a gene product required for proliferation, wherein the activity or expression of said gene product is inhibited by an antisense nucleic acid comprising a nucleotide sequence selected from the group consisting of SEQ ID NOs.: 8-3795, in said cell to reduce the activity or amount of said gene product;

[0178] (b) contacting the sensitized cell with a compound; and

[0179] (c) determining the degree to which said compound inhibits the growth of said sensitized cell relative to a cell which does not contain said antisense nucleic acid.

[0180] 142. The method of Paragraph 141, wherein said determining step comprises determining whether said compound inhibits the growth of said sensitized cell to a greater extent than said compound inhibits the growth of a nonsensitized cell.

[0181] 143. The method of Paragraph 141, wherein said cell is selected from the group consisting of bacterial cells, fungal cells, plant cells, and animal cells.

[0182] 144. The method of Paragraph 141, wherein said cell is a Gram positive bacterium.

[0183] 145. The method of Paragraph 144, wherein said Gram positive bacterium is selected from the group consisting of Staphylococcus species, Streptococcus species, Enterococcus species, Mycobacterium species, Clostridium species, and Bacillus species.

[0184] 146. The method of Paragraph 145, wherein said Gram positive bacterium is Staphylococcus aureus.

[0185] 147. The method of Paragraph 146, wherein said Gram positive bacterium is selected from the group consisting of Staphylococcus aureus RN450 and Staphylococcus aureus RN4220.

[0186] 148. The method of Paragraph 141, wherein said cell is selected from the group consisting of Anaplasma marginale, Aspergillus fumigatus, Bacillus anthracis, Bacterioides fragilis Bordetella pertussis, Burkholderia cepacia, Campylobacter jejuni, Candida albicans, Candida glabrata (also called Torulopsis glabrata), Candida tropicalis, Candida parapsilosis, Candida guilliermondii, Candida krusei, Candida kefyr (also called Candida pseudotropicalis), Candida dubliniensis, Chlamydia pneumoniae, Chlamydia trachomatus, Clostridium botulinum, Clostridium difficile, Clostridium perfringens, Coccidiodes immitis, Corynebacterium diptheriae, Cryptococcus neoformans, Enterobacter cloacae, Enterococcus faecalis, Enterococcus faecium, Escherichia coli, Haemophilus influenzae, Helicobacter pylori, Histoplasma capsulatum, Klebsiella pneumoniae, Listeria monocytogenes, Mycobacterium leprae, Mycobacterium tuberculosis, Neisseria gonorrhoeae, Neisseria meningitidis, Nocardia asteroides, Pasteurella haemolytica, Pasteurella multocida, Pneumocystis carinii, Proteus vulgaris, Pseudomonas aeruginosa, Salmonella bongori, Salmonella cholerasuis, Salmonella enterica, Salmonella paratyphi, Salmonella typhi, Salmonella typhimurium, Staphylococcus aureus, Listeria monocytogenes, Moxarella catarrhalis, Shigella boydii, Shigella dysenteriae, Shigella flexneri, Shigella sonnet, Staphylococcus epidermidis, Streptococcus pneumoniae, Streptococcus mutans, Treponema pallidum, Yersinia enterocolitica, Yersinia pestis and any species falling within the genera of any of the above species.

[0187] 149. The method of Paragraph 141, wherein said cell is not an E. coli cell.

[0188] 150. The method of Paragraph 141, wherein said gene product is from an organism other than E. coli.

[0189] 151. The method of Paragraph 141, wherein said antisense nucleic acid is transcribed from an inducible promoter.

[0190] 152. The method of Paragraph 141, further comprising contacting the cell with an agent which induces transcription of said antisense nucleic acid from said inducible promoter, wherein said antisense nucleic acid is transcribed at a sublethal level.

[0191] 153. The method of Paragraph 141, wherein inhibition of proliferation is measured by monitoring the optical density of a liquid culture.

[0192] 154. The method of Paragraph 141, wherein said gene product comprises a polypeptide comprising an amino acid sequence selected from the group consisting of SEQ ID NOs.: 3801-3805, 4861-5915, 10013-14110.

[0193] 155. The method of Paragraph 141, wherein said nucleic acid encoding said gene product comprises a nucleotide sequence selected from the group consisting of SEQ ID NOS.: 3796-3800, 3806-4860, 5916-10012.

[0194] 156. A compound identified using the method of Paragraph 141.

[0195] 157. A method for identifying a compound having the ability to inhibit cellular proliferation comprising:

[0196] (a) contacting a cell with an agent which reduces the activity or level of a gene product required for proliferation of said cell, wherein said gene product is a gene product whose activity or expression is inhibited by an antisense nucleic acid comprising a nucleotide sequence selected from the group consisting of SEQ ID NOs.: 8-3795;

[0197] (b) contacting said cell with a compound; and

[0198] (c) determining whether said compound reduces proliferation of said contacted cell by acting on said gene product.

[0199] 158. The method of Paragraph 157, wherein said determining step comprises determining whether said compound reduces proliferation of said contacted cell to a greater extent than said compound reduces proliferation of cells which have not been contacted with said agent.

[0200] 159. The method of Paragraph 157, wherein said cell is selected from the group consisting of Anaplasma marginale, Aspergillus fumigatus, Bacillus anthracis, Bacterioides fragilis Bordetella pertussis, Burkholderia cepacia, Campylobacter jejuni, Candida albicans, Candida glabrata (also called Torulopsis glabrata), Candida tropicalis, Candida parapsilosis, Candida guilliermondii, Candida krusei, Candida kefyr (also called Candida pseudotropicalis), Candida dubliniensis, Chlamydia pneumoniae, Chlamydia trachomatus, Clostridium botulinum, Clostridium difficile, Clostridium perfringens, Coccidiodes immitis, Corynebacterium diptheriae, Cryptococcus neoformans, Enterobacter cloacae, Enterococcus faecalis, Enterococcus faecium, Escherichia coli, Haemophilus influenzae, Helicobacter pylori, Histoplasma capsulatum, Klebsiella pneumoniae, Listeria monocytogenes, Mycobacterium leprae, Mycobacterium tuberculosis, Neisseria gonorrhoeae, Neisseria meningitidis, Nocardia asteroides, Pasteurella haemolytica, Pasteurella multocida, Pneumocystis carinii, Proteus vulgaris, Pseudomonas aeruginosa, Salmonella bongori, Salmonella cholerasuis, Salmonella enterica, Salmonella paratyphi, Salmonella typhi, Salmonella typhimurium, Staphylococcus aureus, Listeria monocytogenes, Moxarella catarrhalis, Shigella boydii, Shigella dysenteriae, Shigella flexneri, Shigella sonnei, Staphylococcus epidermidis, Streptococcus pneumoniae, Streptococcus mutans, Treponema pallidum, Yersinia enterocolitica, Yersinia pestis and any species falling within the genera of any of the above species.

[0201] 160. The method of Paragraph 157, wherein said cell is not an E. coli cell.

[0202] 161. The method of Paragraph 157, wherein said gene product is from an organism other than E. coli.

[0203] 162. The method of Paragraph 157, wherein said agent which reduces the activity or level of a gene product required for proliferation of said cell comprises an antisense nucleic acid to a gene or operon required for proliferation.

[0204] 163. The method of Paragraph 157, wherein said agent which reduces the activity or level of a gene product required for proliferation of said cell comprises a compound known to inhibit growth or proliferation of a cell.

[0205] 164. The method of Paragraph 157, wherein said cell contains a mutation which reduces the activity or level of said gene product required for proliferation of said cell.

[0206] 165. The method of Paragraph 157, wherein said mutation is a temperature sensitive mutation.

[0207] 166. The method of Paragraph 157, wherein said gene product comprises a polypeptide comprising an amino acid sequence selected from the group consisting of SEQ ID NOs.: 3801-3805, 4861-5915, 10013-14110.

[0208] 167. A compound identified using the method of Paragraph 157.

[0209] 168. A method for identifying the biological pathway in which a proliferation-required gene or its gene product lies, wherein said gene or gene product comprises a gene or gene product whose activity or expression is inhibited by an antisense nucleic acid comprising a sequence selected from the group consisting of SEQ ID NOs.: 8-3795, said method comprising:

[0210] (a) providing a sublethal level of an antisense nucleic acid which inhibits the activity of said proliferation-required gene or gene product in a test cell;

[0211] (b) contacting said test cell with a compound known to inhibit growth or proliferation of a cell, wherein the biological pathway on which said compound acts is known; and

[0212] (c) determining the degree to which said proliferation of said test cell is inhibited relative to a cell which was not contacted with said compound.

[0213] 169. The method of Paragraph 168, wherein said determining step comprises determining whether said test cell has a substantially greater sensitivity to said compound than a cell which does not express said sublethal level of said antisense nucleic acid.

[0214] 170. The method of Paragraph 168, wherein said gene product comprises a polypeptide comprising an amino acid sequence selected from the group consisting of SEQ ID NOs.: 3801-3805, 4861-5915, 10013-14110.

[0215] 171. The method of Paragraph 168, wherein said test cell is selected from the group consisting of Anaplasma marginale, Aspergillus fumigatus, Bacillus anthracis, Bacterioides fragilis Bordetella pertussis, Burkholderia cepacia, Campylobacter jejuni, Candida albicans, Candida glabrata (also called Torulopsis glabrata), Candida tropicalis, Candida parapsilosis, Candida guilliermondii, Candida krusei, Candida kefyr (also called Candida pseudotropicalis), Candida dubliniensis, Chlamydia pneumoniae, Chlamydia trachomatus, Clostridium botulinum, Clostridium difficile, Clostridium perfringens, Coccidiodes immitis, Corynebacterium diptheriae, Cryptococcus neoformans, Enterobacter cloacae, Enterococcus faecalis, Enterococcus faecium, Escherichia coli, Haemophilus influenzae, Helicobacter pylori, Histoplasma capsulatum, Klebsiella pneumoniae, Listeria monocytogenes, Mycobacterium leprae, Mycobacterium tuberculosis, Neisseria gonorrhoeae, Neisseria meningitidis, Nocardia asteroides, Pasteurella haemolytica, Pasteurella multocida, Pneumocystis carinii, Proteus vulgaris, Pseudomonas aeruginosa, Salmonella bongori, Salmonella cholerasuis, Salmonella enterica, Salmonella paratyphi, Salmonella typhi, Salmonella typhimurium, Staphylococcus aureus, Listeria monocytogenes, Moxarella catarrhalis, Shigella boydii, Shigella dysenteriae, Shigella flexneri, Shigella sonnei, Staphylococcus epidermidis, Streptococcus pneumoniae, Streptococcus mutans, Treponema pallidum, Yersinia enterocolitica, Yersinia pestis and any species falling within the genera of any of the above species.

[0216] 172. The method of Paragraph 168, wherein said test cell is not an E. coli cell.

[0217] 173. The method of Paragraph 168, wherein said gene product is from an organism other than E. coli.

[0218] 174. A method for determining the biological pathway on which a test compound acts comprising:

[0219] (a) providing a sublethal level of an antisense nucleic acid complementary to a proliferation-required nucleic acid in a first cell, wherein the activity or expression of said proliferation-required nucleic acid is inhibited by an antisense nucleic acid comprising a sequence selected from the group consisting of SEQ ID NOs.: 8-3795 and wherein the biological pathway in which said proliferation-required nucleic acid or a protein encoded by said proliferation-required nucleic acid lies is known,

[0220] (b) contacting said first cell with said test compound; and

[0221] (c) determining the degree to which said test compound inhibits proliferation of said first cell relative to a cell which does not contain said antisense nucleic acid.

[0222] 175. The method of Paragraph 174, wherein said determining step comprises determining whether said first cell has a substantially greater sensitivity to said test compound than a cell which does not express said sublethal level of said antisense nucleic acid.

[0223] 176. The method of Paragraph 174, further comprising:

[0224] (d) providing a sublethal level of a second antisense nucleic acid complementary to a second proliferation-required nucleic acid in a second cell, wherein said second proliferation-required nucleic acid is in a different biological pathway than said proliferation-required nucleic acid in step (a); and

[0225] (e) determining whether said second cell does not have a substantially greater sensitivity to said test compound than a cell which does not express said sublethal level of said second antisense nucleic acid, wherein said test compound is specific for the biological pathway against which the antisense nucleic acid of step (a) acts if said first cell has a substantially greater sensitivity to said test compound than said second cell.

[0226] 177. The method of Paragraph 174, wherein said first cell is selected from the group consisting of Anaplasma marginale, Aspergillus fumigatus, Bacillus anthracis, Bacterioides fragilis Bordetella pertussis, Burkholderia cepacia, Campylobacter jejuni, Candida albicans, Candida glabrata (also called Torulopsis glabrata), Candida tropicalis, Candida parapsilosis, Candida guilliermondii, Candida krusei, Candida kefyr (also called Candida pseudotropicalis), Candida dubliniensis, Chlamydia pneumoniae, Chlamydia trachomatus, Clostridium botulinum, Clostridium difficile, Clostridium perfringens, Coccidiodes immitis, Corynebacterium diptheriae, Cryptococcus neoformans, Enterobacter cloacae, Enterococcus faecalis, Enterococcus faecium, Escherichia coli, Haemophilus influenzae, Helicobacter pylori, Histoplasma capsulatum, Klebsiella pneumoniae, Listeria monocytogenes, Mycobacterium leprae, Mycobacterium tuberculosis, Neisseria gonorrhoeae, Neisseria meningitidis, Nocardia asteroides, Pasteurella haemolytica, Pasteurella multocida, Pneumocystis carinii, Proteus vulgaris, Pseudomonas aeruginosa, Salmonella bongori, Salmonella cholerasuis, Salmonella enterica, Salmonella paratyphi, Salmonella typhi, Salmonella typhimurium, Staphylococcus aureus, Listeria monocytogenes, Moxarella catarrhalis, Shigella boydii, Shigella dysenteriae, Shigella flexneri, Shigella sonnei, Staphylococcus epidermidis, Streptococcus pneumoniae, Streptococcus mutans, Treponema pallidum, Yersinia enterocolitica, Yersinia pestis and any species falling within the genera of any of the above species.

[0227] 178. The method of Paragraph 174, wherein said first cell is not an E. coli cell.

[0228] 179. The method of Paragraph 174, wherein said proliferation-required nucleic acid is from an organism other than E. coli.

[0229] 180. A purified or isolated nucleic acid comprising a sequence selected from the group consisting of SEQ ID NOs.: 8-3795.

[0230] 181. A compound which interacts with a gene eorgene product whose activity or expression is inhibited by an antisense nucleic acid comprising a nucleotide sequence of one of SEQ ID NOs.: 8-3795 to inhibit proliferation.

[0231] 182. The compound of Paragraph 181, wherein said gene product is a polypeptide comprising one of SEQ ID NOs.: 3801-3805, 4861-5915, 10013-14110.

[0232] 183. The compound of Paragraph 181, wherein said gene comprises a nucleotide sequence selected from the group consisting of SEQ ID NOS.: 3796-3800, 3806-4860, 5916-10012.

[0233] 184. A compound which interacts with a gene product whose expression is inhibited by an antisense nucleic acid comprising a nucleotide sequence of one of SEQ ID NOs.: 8-3795 to inhibit proliferation.

[0234] 185. A method for manufacturing an antibiotic comprising the steps of:

[0235] screening one or more candidate compounds to identify a compound that reduces the activity or level of a gene product required for proliferation, said gene product comprising a gene product whose activity or expression is inhibited by an antisense nucleic acid comprising a nucleotide sequence selected from the group consisting of SEQ ID NOs.: 8-3795; and

[0236] manufacturing the compound so identified.

[0237] 186. The method of Paragraph 185, wherein said screening step comprises performing any one of the methods of Paragraphs 44, 68, 121, 136, 141, and 157.

[0238] 187. The method of Paragraph 185, wherein said gene product is a polypeptide comprising one of SEQ ID NOs:3801-3805, 4861-5915, 10013-14110.

[0239] 188. A method for inhibiting proliferation of a cell in a subject comprising administering an effective amount of a compound that reduces the activity or level of a gene product required for proliferation of said cell, said gene product comprising a gene product whose activity or expression is inhibited by an antisense nucleic acid comprising a nucleotide sequence selected from the group consisting of SEQ ID NOs.: 8-3795 to said subject.

[0240] 189. The method of Paragraph 188 wherein said subject is selected from the group consisting of vertebrates, mammals, avians, and human beings.

[0241] 190. The method of Paragraph 188, wherein said gene product comprises a polypeptide comprising an amino acid sequence selected from the group consisting of SEQ ID NOs.: 3801-3805, 4861-5915, 10013-14110.

[0242] 191. The method of Paragraph 188, wherein said cell is selected from the group consisting of Anaplasma marginale, Aspergillus fumigatus, Bacillus anthracis, Bacterioides fragilis Bordetella pertussis, Burkholderia cepacia, Campylobacter jejuni, Candida albicans, Candida glabrata (also called Torulopsis glabrata), Candida tropicalis, Candida parapsilosis, Candida guilliermondii, Candida krusei, Candida kefyr (also called Candida pseudotropicalis), Candida dubliniensis, Chlamydia pneumoniae, Chlamydia trachomatus, Clostridium botulinum, Clostridium difficile, Clostridium perfringens, Coccidiodes immitis, Corynebacterium diptheriae, Cryptococcus neoformans, Enterobacter cloacae, Enterococcus faecalis, Enterococcus faecium, Escherichia coli, Haemophilus influenzae, Helicobacter pylori, Histoplasma capsulatum, Klebsiella pneumoniae, Listeria monocytogenes, Mycobacterium leprae, Mycobacterium tuberculosis, Neisseria gonorrhoeae, Neisseria meningitidis, Nocardia asteroides, Pasteurella haemolytica, Pasteurella multocida, Pneumocystis carinii, Proteus vulgaris, Pseudomonas aeruginosa, Salmonella bongori, Salmonella cholerasuis, Salmonella enterica, Salmonella paratyphi, Salmonella typhi, Salmonella typhimurium, Staphylococcus aureus, Listeria monocytogenes, Moxarella catarrhalis, Shigella boydii, Shigella dysenteriae, Shigella flexneri, Shigella sonnei, Staphylococcus epidermidis, Streptococcus pneumoniae, Streptococcus mutans, Treponema pallidum, Yersinia enterocolitica, Yersinia pestis and any species falling within the genera of any of the above species.

[0243] 192. The method of Paragraph 188, wherein said cell is not E. coli.

[0244] 193. The method of Paragraph 188, wherein said gene product is from an organism other than E. coli.

[0245] 194. A purified or isolated nucleic acid consisting essentially of the coding sequence of one of SEQ ID NOs: 3796-3800, 3806-4860, 5916-10012.

[0246] 195. A fragment of the nucleic acid of Paragraph 8, said fragment comprising at least 10, at least 20, at least 25, at least 30, at least 50 or more than 50 consecutive nucleotides of one of SEQ ID NOs: 3796-3800, 3806-4860, 5916-10012.

[0247] 196. A purified or isolated nucleic acid comprising a nucleic acid having at least 70% nucleotide sequence identity to a nucleotide sequence selected from the group consisting of SEQ ID NOs.: 3796-3800, 3806-4860, 5916-10012, fragments comprising at least 25 consecutive nucleotides of SEQ ID NOs.: 3796-3800, 3806-4860, 5916-10012, the nucleotide sequences complementary to SEQ ID NOs.:3796-3800, 3806-4860, 5916-10012, and the nucleotide sequences complementary to fragments comprising at least 25 consecutive nucleotides of SEQ ID NOs.: 3796-3800, 3806-4860, 5916-10012 as determined using BLASTN version 2.0 with the default parameters.

[0248] 197. The nucleic acid of Paragraph 196, wherein said nucleic acid is from an organism selected from the group consisting of Anaplasma marginale, Aspergillus fumigatus, Bacillus anthracis, Bacterioides fragilis Bordetella pertussis, Burkholderia cepacia, Campylobacter jejuni, Candida albicans, Candida glabrata (also called Torulopsis glabrata), Candida tropicalis, Candida parapsilosis, Candida guilliermondii, Candida krusei, Candida kefyr (also called Candida pseudotropicalis), Candida dubliniensis, Chlamydia pneumoniae, Chlamydia trachomatus, Clostridium botulinum, Clostridium difficile, Clostridium perfringens, Coccidiodes immitis, Corynebacterium diptheriae, Cryptococcus neoformans, Enterobacter cloacae, Enterococcus faecalis, Enterococcus faecium, Escherichia coli, Haemophilus influenzae, Helicobacter pylori, Histoplasma capsulatum, Klebsiella pneumoniae, Listeria monocytogenes, Mycobacterium leprae, Mycobacterium tuberculosis, Neisseria gonorrhoeae, Neisseria meningitidis, Nocardia asteroides, Pasteurella haemolytica, Pasteurella multocida, Pneumocystis carinii, Proteus vulgaris, Pseudomonas aeruginosa, Salmonella bongori, Salmonella cholerasuis, Salmonella enterica, Salmonella paratyphi, Salmonella typhi, Salmonella typhimurium, Staphylococcus aureus, Listeria monocytogenes, Moxarella catarrhalis, Shigella boydii, Shigella dysenteriae, Shigella flexneri, Shigella sonnei Staphylococcus epidermidis, Streptococcus pneumoniae, Streptococcus mutans, Treponema pallidum, Yersinia enterocolitica, Yersinia pestis and any species falling within the genera of any of the above species.

[0249] 198. The nucleic acid of Paragraph 196, wherein said nucleic acid is from an organism other than E. coli.

[0250] 199. A method of inhibiting proliferation of a cell comprising inhibiting the activity or reducing the amount of a gene product in said cell or inhibiting the activity or reducing the amount of a nucleic acid encoding said gene product in said cell, wherein said gene product is selected from the group consisting of a gene product having having at least 70% nucleotide sequence identity as determined using BLASTN version 2.0 with the default parameters to a gene product whose expression is inhibited by an antisense nucleic acid comprising a nucleotide sequence selected from the group consisting of SEQ ID NOs.: 8-3795, a gene product encoded by a nucleic acid having at least 70% nucleotide sequence identity as determined using BLASTN version 2.0 with the default parameters to a nucleic acid encoding a gene product whose expression is inhibited by an antisense nucleic acid comprising a nucleotide sequence selected from the group consisting of SEQ ID NOs:8-3795, a gene product having at least 25% amino acid identity as determined using FASTA version 3.0t78 with the default parameters to a gene product whose expression is inhibited by an antisense nucleic acid comprising a nucleotide sequence selected from the group consisting of SEQ ID NOs.: 8-3795, a gene product encoded by a nucleic acid which hybridizes to a nucleic acid comprising a nucleotide sequence selected from the croup consisting of SEQ ID NOs.: 8-3795 under stringent conditions, a gene product encoded by a nucleic acid which hybridizes to a nucleic acid comprising a nucleotide sequence selected from the group consisting of SEQ ID NOs.: 8-3795 under moderate conditions, and a gene product whose activity may be complemented by the gene product whose activity is inhibited by a nucleic acid comprising a nucleotide sequence selected from the group consisting of SEQ ID NOs: 8-3795.

[0251] 200. The method of Paragraph 199, wherein said method comprises inhibiting said activity or reducing said amount of said gene product or inhibiting the activity or reducing the amount of a nucleic acid encoding said gene product in an organism selected from the group consisting of Anaplasma marginale, Aspergillus fumigatus, Bacillus anthracis, Bacterioides fragilis Bordetella pertussis, Burkholderia cepacia, Campylobacter jejuni, Candida albicans, Candida glabrata (also called Torulopsis glabrata), Candida tropicalis, Candida parapsilosis, Candida guilliermondii, Candida krusei, Candida kefyr (also called Candida pseudotropicalis), Candida dubliniensis, Chlamydia pneumoniae, Chlamydia trachomatus, Clostridium botulinum, Clostridium difficile, Clostridium perfringens, Coccidiodes immitis, Corynebacterium diptheriae, Cryptococcus neoformans, Enterobacter cloacae, Enterococcus faecalis, Enterococcus faecium, Escherichia coli, Haemophilus influenzae, Helicobacter pylori, Histoplasma capsulatum, Klebsiella pneumoniae, Listeria monocytogenes, Mycobacterium leprae, Mycobacterium tuberculosis, Neisseria gonorrhoeae, Neisseria meningitidis, Nocardia asteroides, Pasteurella haemolytica, Pasteurella multocida, Pneumocystis carinii, Proteus vulgaris, Pseudomonas aeruginosa, Salmonella bongori, Salmonella cholerasuis, Salmonella enterica, Salmonella paratyphi, Salmonella typhi, Salmonella typhimurium, Staphylococcus aureus, Listeria monocytogenes, Moxarella catarrhalis, Shigella boydii, Shigella dysenteriae, Shigella flexneri, Shigella sonnei, Staphylococcus epidermidis, Streptococcus pneumoniae, Streptococcus mutans, Treponema pallidum, Yersinia enterocolitica, Yersinia pestis and any species falling within the genera of any of the above species.

[0252] 201. The method of Paragraph 199, wherein said method comprises inhibiting said activity or reducing said amount of said gene product or inhibiting the activity or reducing the amount of a nucleic acid encoding said gene product in an organism other than E. coli.

[0253] 202. The method of Paragraph 199, wherein said gene product is from an organism other than E. coli.

[0254] 203. The method of Paragraph 199, wherein said gene product comprises a polypeptide selected from the group consisting of a polypeptide having at least 25% amino acid identity as determined using FASTA version 3.0t78 to a polypeptide selected from the group consisting of SEQ ID NOs.: 3801-3805, 4861-5915, 10013-14110 and a polypeptide whose activity may be complemented by a polypeptide selected from the group consisting of SEQ ID NOs: 3801-3805, 4861-5915, 10013-14110.

[0255] 204. The method of Paragraph 199, wherein said gene product is encoded by a nucleic acid selected from the group consisting of a nucleic acid comprising a nucleic acid having at least 70% nucleotide sequence identity as determined using BLASTN version 2.0 with the default parameters to a nucleotide sequence selected from the group consisting of SEQ ID NOS.: 3796-3800, 3806-4860, 5916-10012, a nucleic acid comprising a nucleotide sequence which hybridizes to a sequence selected from the group consisting of SEQ ID NOS.: 3796-3800, 3806-4860, 5916-10012 under stringent conditions, and a nucleic acid comprising a nucloetide sequence which hybridizes to a nucleotide sequence selected from the group consisting of SEQ ID NOS.: 3796-3800, 3806-4860, 5916-10012 under moderate condtions.

[0256] 205. A method for identifying a compound which influences the activity of a gene product required for proliferation comprising:

[0257] contacting a candidate compound with a gene product selected from the group consisting of a gene product having at least 70% nucleotide sequence identity as determined using BLASTN version 2.0 with the default parameters to a gene product whose expression is inhibited by an antisense nucleic acid comprising a nucleotide sequence selected from the group consisting of SEQ ID NOs.: 8-3795, a gene product encoded by a nucleic acid having at least 70% nucleotide sequence identity as determined using BLASTN version 2.0 with the default parameters to a nucleic acid encoding a gene product whose expression is inhibited by an antisense nucleic acid comprising a nucleotide sequence selected from the group consisting of SEQ ID NOs:8-3795, a gene product having at least 25% amino acid identity as determined using FASTA version 3.0t78 with the default parameters to a gene product whose expression is inhibited by an antisense nucleic acid comprising a nucleotide sequence selected from the group consisting of SEQ ID NOs.: 8-3795, a gene product encoded by a nucleic acid comprising a nucleotide sequence which hybridizes to a nucleic acid selected from the group consisting of SEQ ID NOs.: 8-3795 under stringent ,conditions, a gene product encoded by a nucleic acid comprising a nucleotide sequence which hybridizes to a nucleic acid selected from the group consisting of SEQ ID NOs.: 8-3795 under moderate conditions, and a gene product whose activity may be complemented by the gene product whose activity is inhibited by a nucleic acid selected from the group consisting of SEQ ID NOs: 8-3795; and

[0258] determining whether said candidate compound influences the activity of said gene product.

[0259] 206. The method of Paragraph 205, wherein said gene product is from an organism selected from the group consisting of Anaplasma marginale, Aspergillus fumigatus, Bacillus anthracis, Bacterioides fragilis Bordetella pertussis, Burkholderia cepacia, Campylobacter jejuni, Candida albicans, Candida glabrata (also called Torulopsis glabrata), Candida tropicalis, Candida parapsilosis, Candida guilliermondii, Candida krusei, Candida kefyr (also called Candida pseudotropicalis), Candida dubliniensis, Chlamydia pneumoniae, Chlamydia trachomatus, Clostridium botulinum, Clostridium difficile, Clostridium perfringens, Coccidiodes immitis, Corynebacterium diptheriae, Cryptococcus neoformans, Enterobacter cloacae, Enterococcus faecalis, Enterococcus faecium, Escherichia coli, Haemophilus influenzae, Helicobacter pylori, Histoplasma capsulatum, Klebsiella pneumoniae, Listeria monocytogenes, Mycobacterium leprae, Mycobacterium tuberculosis, Neisseria gonorrhoeae, Neisseria meningitidis, Nocardia asteroides, Pasteurella haemolytica, Pasteurella multocida, Pneumocystis carinii, Proteus vulgaris, Pseudomonas aeruginosa, Salmonella bongori, Salmonella cholerasuis, Salmonella enterica, Salmonella paratyphi, Salmonella typhi, Salmonella typhimurium, Staphylococcus aureus, Listeria monocytogenes, Moxarella catarrhalis, Shigella boydii, Shigella dysenteriae, Shigella flexneri, Shigella sonnei, Staphylococcus epidermidis, Streptococcus pneumoniae, Streptococcus mutans, Treponema pallidum, Yersinia enterocolitica, Yersinia pestis and any species falling within the genera of any of the above species.

[0260] 207. The method of Paragraph 205, wherein said gene product is from an organism other than E. coli.

[0261] 208. The method of Paragraph 205, wherein said gene product is a polypeptide selected from the group consisting of a polypeptide having at least 25% amino acid identity as determined using FASTA version 3.0t78 to a polypeptide selected from the group consisting of SEQ ID NOs.: 3801-3805, 4861-5915, 10013-14110 and a polypeptide whose activity may be complemented by a polypeptide selected from the group consisting of SEQ ID NOs: 3801-3805, 4861-5915, 10013-14110.

[0262] 209. The method of Paragraph 205, wherein said gene product is encoded by a nucleic acid selected from the group consisting of a nucleic acid comprising a nucleic acid having at least 70% nucleotide sequence identity as determined using BLASTN version 2.0 with the default parameters to a nucleotide sequence selected from the group consisting of SEQ ID NOS.: 3796-3800, 3806-4860, 5916-10012, a nucleic acid which hybridizes to a sequence selected from the group consisting of SEQ ID NOS.: 3796-3800, 3806-4860, 5916-10012 under stringent conditions, and a nucleic acid which hybridizes to a sequence selected from the group consisting of SEQ ID NOS.: 3796-3800, 3806-4860, 5916-10012 under moderate condtions.

[0263] 210. A compound identified using the method of Paragraph 205.

[0264] 211. A method for identifying a compound or nucleic acid having the ability to reduce the activity or level of a gene product required for proliferation comprising:

[0265] (a) providing a target that is a gene or RNA, wherein said target comprises a nucleic acid that encodes a gene product selected from the group consisting of a gene product having having at least 70% nucleotide sequence identity as determined using BLASTN version 2.0 with the default parameters to a gene product whose expression is inhibited by an antisense nucleic acid comprising a nucleotide sequence selected from the group consisting of SEQ ID NOs.: 8-3795, a gene product encoded by a nucleic acid having at least 70% nucleic acid identity as determined using BLASTN version 2.0 with the default parameters to a nucleic acid encoding a gene product whose expression is inhibited by an antisense nucleic acid comprising a nucleotide sequence selected from the group consisting of SEQ ID NOs:8-3795, a gene product having at least 25% amino acid identity as determined using FASTA version 3.0t78 with the default parameters to a gene product whose expression is inhibited by an antisense nucleic acid comprising a sequence selected from the group consisting of SEQ ID NOs.: 8-3795, a gene product encoded by a nucleic acid comprising a nucleotide sequence which hybridizes to a nucleic acid selected from the group consisting of SEQ ID NOs.: 8-3795 under stringent conditions, a gene product encoded by a nucleic acid comprising a nucleotide sequence which hybridizes to a nucleic acid selected from the group consisting of SEQ ID NOs.: 8-3795 under moderate conditions, and a gene product whose activity may be complemented by the gene product whose activity is inhibited by a nucleic acid selected from the group consisting of SEQ ID NOs: 8-3795;

[0266] (b) contacting said target with a candidate compound or nucleic acid; and

[0267] (c) measuring an activity of said target.

[0268] 212. The method of Paragraph 211, wherein said target gene or RNA is from an organism selected from the group consisting of Anaplasma marginale, Aspergillus fumigatus, Bacillus anthracis, Bacterioides fragilis Bordetella pertussis, Burkholderia cepacia, Campylobacter jejuni, Candida albicans, Candida glabrata (also called Torulopsis glabrata), Candida tropicalis, Candida parapsilosis, Candida guilliermondii, Candida krusei, Candida kefyr (also called Candida pseudotropicalis), Candida dubliniensis, Chlamydia pneumoniae, Chlamydia trachomatus, Clostridium botulinum, Clostridium difficile, Clostridium perfringens, Coccidiodes immitis, Corynebacterium diptheriae, Cryptococcus neoformans, Enterobacter cloacae, Enterococcus faecalis, Enterococcus faecium, Escherichia coli, Haemophilus influenzae, Helicobacter pylori, Histoplasma capsulatum, Klebsiella pneumoniae, Listeria monocytogenes, Mycobacterium leprae, Mycobacterium tuberculosis, Neisseria gonorrhoeae, Neisseria meningitidis, Nocardia asteroides, Pasteurella haemolytica, Pasteurella multocida, Pneumocystis carinii, Proteus vulgaris, Pseudomonas aeruginosa, Salmonella bongori, Salmonella cholerasuis, Salmonella enterica, Salmonella paratyphi, Salmonella typhi, Salmonella typhimurium, Staphylococcus aureus, Listeria monocytogenes, Moxarella catarrhalis, Shigella boydii, Shigella dysenteriae, Shigella flexneri, Shigella sonnei, Staphylococcus epidermidis, Streptococcus pneumoniae, Streptococcus mutans, Treponema pallidum, Yersinia enterocolitica, Yersinia pestis and any species falling within the genera of any of the above species.

[0269] 213. The method of Paragraph 211, wherein said target gene or RNA is from an organism other than E. coli.

[0270] 214. The method of Paragraph 211, wherein said gene product is from an organism other than E. coli.

[0271] 215. The method of Paragraph 211, wherein said target is a messenger RNA molecule and said activity is translation of said messenger RNA.

[0272] 216. The method of Paragraph 211, wherein said compound is a nucleic acid and said activity is translation of said gene product.

[0273] 217. The method of Paragraph 211, wherein said target is a gene and said activity is transcription of said gene.

[0274] 218. The method of Paragraph 211, wherein said target is a nontranslated RNA and said activity is processing or folding of said nontranslated RNA or assembly of said nontranslated RNA into a protein/RNA complex.

[0275] 219. The method of Paragraph 211, wherein said target gene is a messenger RNA molecule encoding a polypeptide selected from the group consisting of a polypeptide having at least 25% amino acid identity as determined using FASTA version 3.0t78 to a polypeptide selected from the group consisting of SEQ ID NOs.: 3801-3805, 4861-5915, 10013-14110 and a polypeptide whose activity may be complemented by a polypeptide selected from the group consisting of SEQ ID NOs: 3801-3805, 4861-5915, 10013-14110.

[0276] 220. The method of Paragraph 11, wherein said target gene comprises a nucleic acid selected from the group consisting of a nucleic acid comprising a nucleic acid having at least 70% nucleotide sequence identity as determined using BLASTN version 2.0 with the default parameters to a nucleotide sequence selected from the group consisting of SEQ ID NOS.: 3796-3800, 3806-4860, 5916-10012, a nucleic acid which hybridizes to a sequence selected from the group consisting of SEQ ID NOS.: 3796-3800, 3806-4860, 5916-10012 under stringent conditions, and a nucleic acid which hybridizes to a sequence selected from the group consisting of SEQ ID NOS.: 3796-3800, 3806-4860, 5916-10012 under moderate condtions.

[0277] 221. A compound or nucleic acid identified using the method of Paragraph 211.

[0278] 222. A method for identifying a compound which reduces the activity or level of a gene product required for proliferation of a cell comprising:

[0279] (a) providing a sublethal level of an antisense nucleic acid complementary to a nucleic acid encoding said gene product in a cell to reduce the activity or amount of said gene product in said cell, thereby producing a sensitized cell, wherein said gene product is selected from the group consisting of a gene product having having at least 70% nucleic acid identity as determined using BLASTN version 2.0 with the default parameters to a gene product whose expression is inhibited by an antisense nucleic acid comprising a nucleotide sequence selected from the group consisting of SEQ ID NOs.: 8-3795, a gene product encoded by a nucleic acid having at least 70% nucleotide sequence identity as determined using BLASTN version 2.0 with the default parameters to a nucleic acid encoding a gene product whose expression is inhibited by an antisense nucleic acid comprising a nucleotide sequence selected from the group consisting of SEQ ID NOs:8-3795, a gene product having at least 25% amino acid identity as determined using FASTA version 3.0t78 with the default parameters to a gene product whose expression is inhibited by an antisense nucleic acid comprising a nucleotide sequence selected from the group consisting of SEQ ID NOs.: 8-3795, a gene product encoded by a nucleic acid comprising a nucleotide sequence which hybridizes to a nucleic acid selected from the group consisting of SEQ ID NOs.: 8-3795 under stringent conditions, a gene product encoded by a nucleic acid comprising a nucleotide sequence which hybridizes to a nucleic acid comprising a nucleotide sequence selected from the group consisting of SEQ ID NOs.: 8-3795 under moderate conditions, and a gene product whose activity may be complemented by the gene product whose activity is inhibited by a nucleic acid selected from the group consisting of SEQ ID NOs: 8-3795;

[0280] (b) contacting said sensitized cell with a compound; and

[0281] (c) determining the degree to which said compound inhibits the growth of said sensitized cell relative to a cell which does not contain said antisense nucleic acid.

[0282] 223. The method of Paragraph 222, wherein said determining step comprises determining whether said compound inhibits the growth of said sensitized cell to a greater extent than said compound inhibits the growth of a nonsensitized cell.

[0283] 224. The method of Paragraph 222, wherein said sensitized cell is a Gram positive bacterium.

[0284] 225. The method of Paragraph 224, wherein said Gram positive bacterium is selected from the group consisting of Staphylococcus species, Streptococcus species, Enterococcus species, Mycobacterium species, Clostridium species, and Bacillus species.

[0285] 226. The method of Paragraph 225, wherein said bacterium is Staphylococcus aureus.

[0286] 227. The method of Paragraph 224, wherein said Staphylococcus species is coagulase negative.

[0287] 228. The method of Paragraph 226, wherein said bacterium is selected from the group consisting of Staphylococcus aureus RN450 and Staphylococcus aureus RN4220.

[0288] 229. The method of Paragraph 222, wherein said sensitized cell is an organism selected from the group consisting of Anaplasma marginale, Aspergillus fumigatus, Bacillus anthracis, Bacterioides fragilis Bordetella pertussis, Burkholderia cepacia, Campylobacter jejuni, Candida albicans, Candida glabrata (also called Torulopsis glabrata), Candida tropicalis, Candida parapsilosis, Candida guilliermondii, Candida krusei, Candida kefyr (also called Candida pseudotropicalis), Candida dubliniensis, Chlamydia pneumoniae, Chlamydia trachomatus, Clostridium botulinum, Clostridium difficile, Clostridium perfringens, Coccidiodes immitis, Corynebacterium diptheriae, Cryptococcus neoformans, Enterobacter cloacae, Enterococcus faecalis, Enterococcus faecium, Escherichia coli, Haemophilus influenzae, Helicobacter pylori, Histoplasma capsulatum, Klebsiella pneumoniae, Listeria monocytogenes, Mycobacterium leprae, Mycobacterium tuberculosis, Neisseria gonorrhoeae, Neisseria meningitidis, Nocardia asteroides, Pasteurella haemolytica, Pasteurella multocida, Pneumocystis carinii, Proteus vulgaris, Pseudomonas aeruginosa, Salmonella bongori, Salmonella cholerasuis, Salmonella enterica, Salmonella paratyphi, Salmonella typhi, Salmonella typhimurium, Staphylococcus aureus, Listeria monocytogenes, Moxarella catarrhalis, Shigella boydii, Shigella dysenteriae, Shigella flexneri, Shigella sonnei, Staphylococcus epidermidis, Streptococcus pneumoniae, Streptococcus mutans, Treponema pallidum, Yersinia enterocolitica, Yersinia pestis and any species falling within the genera of any of the above species.

[0289] 230. The method of Paragraph 222, wherein said cell is an organism other than E. coli.

[0290] 231. The method of Paragraph 222, wherein said gene product is from an organism other than E. coli.

[0291] 232. The method of Paragraph 222, wherein said antisense nucleic acid is transcribed from an inducible promoter.

[0292] 233. The method of Paragraph 222, further comprising the step of contacting said cell with a concentration of inducer which induces transcription of said antisense nucleic acid to a sublethal level.

[0293] 234. The method of Paragraph 222, wherein growth inhibition is measured by monitoring optical density of a culture medium.

[0294] 235. The method of Paragraph 222, wherein said gene product is a polypeptide.

[0295] 236. The method of Paragraph 235, wherein said polypeptide comprises a polypeptide selected from the group consisting of a polypeptide having at least 25% amino acid identity as determined using FASTA version 3.0t78 to a polypeptide selected from the group consisting of SEQ ID NOs.: 3801-3805, 4861-5915, 10013-14110 and a polypeptide whose activity may be complemented by a polypeptide selected from the group consisting of SEQ ID NOs: 3801-3805, 4861-5915, 10013-14110.

[0296] 237. The method of Paragraph 222, wherein said gene product is an RNA.

[0297] 238. The method of Paragraph 222, wherein said nucleic acid encoding said gene product comprises a nucleic acid selected from the group consisting of a nucleic acid comprising a nucleic acid having at least 70% nucleic acid identity as determined using BLASTN version 2.0 with the default parameters to a sequence selected from the group consisting of SEQ ID NOS.: 3796-3800, 3806-4860, 5916-10012, a nucleic acid which hybridizes to a sequence selected from the group consisting of SEQ ID NOS.: 3796-3800, 3806-4860, 5916-10012 under stringent conditions, and a nucleic acid which hybridizes to a sequence selected from the group consisting of SEQ ID NOS.: 3796-3800, 3806-4860, 5916-10012 under moderate condtions.

[0298] 239. A compound identified using the method of Paragraph 222.

[0299] 240. A method for inhibiting cellular proliferation comprising introducing a compound with activity against a gene product or a compound with activity against a gene encoding said gene product into a population of cells expressing said gene product, wherein said gene product is selected from the group consisting of a gene product having at least 70% nucleotide sequence identity as determined using BLASTN version 2.0 with the default parameters to a gene product whose expression is inhibited by an antisense nucleic acid comprising a nucleotide sequence selected from the group consisting of SEQ ID NOs.: 8-3795, a gene product encoded by a nucleic acid having at least 70% nucleotide sequence identity as determined using BLASTN version 2.0 with the default parameters to a nucleic acid encoding a gene product whose expression is inhibited by an antisense nucleic acid comprising a nucleotide sequence selected from the group consisting of SEQ ID NOs:8-3795, a gene product having at least 25% amino acid identity as determined using FASTA version 3.0t78 with the default parameters to a gene product whose expression is inhibited by an antisense nucleic acid comprising a nucleotide sequence selected from the group consisting of SEQ ID NOs.: 8-3795, a gene product encoded by a nucleic acid comprising a nucleotide sequence which hybridizes to a nucleic acid selected from the group consisting of SEQ ID NOs.: 8-3795 under stringent conditions, a gene product encoded by a nucleic acid comprising a nucleotide sequence which hybridizes to a nucleic acid selected from the group consisting of SEQ ID NOs.: 8-3795 under moderate conditions, and a gene product whose activity may be complemented by the gene product whose activity is inhibited by a nucleic acid selected from the group consisting of SEQ ID NOs: 8-3795.

[0300] 241. The method of Paragraph 240, wherein said compound is an antisense nucleic acid comprising a nucleotide sequence selected from the group consisting of SEQ ID NOs.: 8-3795, or a proliferation-inhibiting portion thereof.

[0301] 242. The method of Paragraph 240, wherein said proliferation inhibiting portion of one of SEQ ID NOs.: 8-3795 is a fragment comprising at least 10, at least 20, at least 25, at least 30, at least 50 or more than 51 consecutive nucleotides of one of SEQ ID NOs.: 8-3795.

[0302] 243. The method of Paragraph 240, wherein said population is a population of Gram positive bacteria.

[0303] 244. The method of Paragraph 243, wherein said population of Gram positive bacteria is selected from the group consisting of a population of Staphylococcus species, Streptococcus species, Enterococcus species, Mycobacterium species, Clostridium species, and Bacillus species.

[0304] 245. The method of Paragraph 243, wherein said population is a population of Staphylococcus aureus.

[0305] 246. The method of Paragraph 245, wherein said population is a population of a bacterium selected from the group consisting of Staphylococcus aureus RN450 and Staphylococcus aureus RN4220.

[0306] 247. The method of Paragraph 240, wherein said population is a population of a bacterium selected from the group consisting of Anaplasma marginale, Aspergillus fumigatus, Bacillus anthracis, Bacterioides fragilis Bordetella pertussis, Burkholderia cepacia, Campylobacter jejuni, Candida albicans, Candida glabrata (also called Torulopsis glabrata), Candida tropicalis, Candida parapsilosis, Candida guilliermondii, Candida krusei, Candida kefyr (also called Candida pseudotropicalis), Candida dubliniensis, Chlamydia pneumoniae, Chlamydia trachomatus, Clostridium botulinum, Clostridium difficile, Clostridium perfringens, Coccidiodes immitis, Corynebacterium diptheriae, Cryptococcus neoformans, Enterobacter cloacae, Enterococcus faecalis, Enterococcus faecium, Escherichia coli, Haemophilus influenzae, Helicobacter pylori, Histoplasma capsulatum, Klebsiella pneumoniae, Listeria monocytogenes, Mycobacterium leprae, Mycobacterium tuberculosis, Neisseria gonorrhoeae, Neisseria meningitidis, Nocardia asteroides, Pasteurella haemolytica, Pasteurella multocida, Pneumocystis carinii, Proteus vulgaris, Pseudomonas aeruginosa, Salmonella bongori, Salmonella cholerasuis, Salmonella enterica, Salmonella paratyphi, Salmonella typhi, Salmonella typhimurium, Staphylococcus aureus, Listeria monocytogenes, Moxarella catarrhalis, Shigella boydii, Shigella dysenteriae, Shigella flexneri, Shigella sonnet, Staphylococcus epidermidis, Streptococcus pneumoniae, Streptococcus mutans, Treponema pallidum, Yersinia enterocolitica, Yersinia pestis and any species falling within the genera of any of the above species.

[0307] 248. The method of Paragraph 240, wherein said population is a population of an organism other than E. coli.

[0308] 249. The method of Paragraph 240, wherein said product of said gene is from an organism other than E. coli.

[0309] 250. The method of Paragraph 240, wherein said gene product is selected from the group consisting of a polypeptide having at least 25% amino acid identity as determined using FASTA version 3.0t78 to a polypeptide selected from the group consisting of SEQ ID NOs.: 3801-3805, 4861-5915, 10013-14110 and a polypeptide whose activity may be complemented by a polypeptide selected from the group consisting of SEQ ID NOs: 3801-3805, 4861-5915, 10013-14110.

[0310] 251. The method of Paragraph 240, wherein said gene comprises a nucleic acid selected from the group consisting of a nucleic acid comprising a nucleic acid having at least 70% nucleotide sequence identity as determined using BLASTN version 2.0 with the default parameters to a nucleotide sequence selected from the group consisting of SEQ ID NOS.: 3796-3800, 3806-4860, 5916-10012, a nucleic acid comprising a nucleotide sequence which hybridizes to a nucleotide sequence selected from the group consisting of SEQ ID NOS.: 3796-3800, 3806-4860, 5916-10012 under stringent conditions, and a nucleic acid comprising a nucleotide sequence which hybridizes to a nucleotide sequence selected from the group consisting of SEQ ID NOS.: 3796-3800, 3806-4860, 5916-10012 under moderate condtions.

[0311] 252. A preparation comprising an effective concentration of an antisense nucleic acid in a pharmaceutically acceptable carrier wherein said antisense nucleic acid is selected from the group consisting of a nucleic acid comprising a sequence having at least 70% nucleotide sequence identity as determined using BLASTN version 2.0 with the default parameters to a nucleotide sequence selected from the group consisting of SEQ ID NOs.: 8-3795 or a proliferation-inhibiting portion thereof, a nucleic acid comprising a nucleotide sequence which hybridizes to a nucleic acid selected from the group consisting of SEQ ID NOs.: 8-3795 under stringent conditions, and a nucleic acid comprising a nucleotide sequence which hybridizes to a nucleic acid selected from the group consisting of SEQ ID NOs.: 8-3795 under moderate conditions.

[0312] 253. The preparation of Paragraph 252, wherein said proliferation-inhibiting portion of one of SEQ ID NOs.: 8-3795 comprises at least 10, at least 20, at least 25, at least 30, at least 50 or more than 50 consecutive nucleotides of one of SEQ ID NOs.: 8-3795.

[0313] 254. A method for inhibiting the activity or expression of a gene in an operon which encodes a gene product required for proliferation comprising contacting a cell in a cell population with an antisense nucleic acid comprising at least a proliferation-inhibiting portion of said operon in an antisense orientation, wherein said gene product is selected from the group consisting of a gene product having at least 70% nucleotide sequence identity as determined using BLASTN version 2.0 with the default parameters to a gene product whose expression is inhibited by an antisense nucleic acid comprising a nucleotide sequence selected from the group consisting of SEQ ID NOs.: 8-3795, a gene product encoded by a nucleic acid having at least 70% nucleotide sequence identity as determined using BLASTN version 2.0 with the default parameters to a nucleic acid encoding a gene product whose expression is inhibited by an antisense nucleic acid comprising a nucleotide sequence selected from the group consisting of SEQ ID NOs:8-3795, a gene product having at least 25% amino acid identity as determined using FASTA version 3.0t78 with the default parameters to a gene product whose expression is inhibited by an antisense nucleic acid comprising a nucleotide sequence selected from the group consisting of SEQ ID NOs.: 8-3795, a gene product encoded by a nucleic acid comprising a nucleotide sequence which hybridizes to a nucleic acid selected from the group consisting of SEQ ID NOs.: 8-3795 under stringent conditions, a gene product encoded by a nucleic acid comprising a nucleotide sequence which hybridizes to a nucleic acid selected from the group consisting of SEQ ID NOs.: 8-3795 under moderate conditions, and a gene product whose activity may be complemented by the gene product whose activity is inhibited by a nucleic acid selected from the group consisting of SEQ ID NOs: 8-3795.

[0314] 255. The method of Paragraph 254, wherein said antisense nucleic acid comprises a nucleotide sequence having at least 70% nucleotide sequence identity as determined using BLASTN version 2.0 with the default parameters to a nucleotide seqence selected from the group consisting of SEQ ID NOs.: 8-3795, a proliferation inhibiting portion thereof, a nucleic acid comprising a nucleotide sequence which hybridizes to a nucleic acid selected from the group consisting of SEQ ID NOs.: 8-3795 under stringent conditions, and a nucleic acid which comprising a nucleotide sequence which hybridizes to a nucleic acid selected from the group consisting of SEQ ID NOs.: 8-3795 under moderate conditions.

[0315] 256. The method of Paragraph 254, wherein said cell is selected from the group consisting of Anaplasma marginale, Aspergillus fumigatus, Bacillus anthracis, Bacterioides fragilis Bordetella pertussis, Burkholderia cepacia, Campylobacter jejuni, Candida albicans, Candida glabrata (also called Torulopsis glabrata), Candida tropicalis, Candida parapsilosis, Candida guilliermondii, Candida krusei, Candida kefyr (also called Candida pseudotropicalis), Candida dubliniensis, Chlamydia pneumoniae, Chlamydia trachomatus, Clostridium botulinum, Clostridium difficile, Clostridium perfringens, Coccidiodes immitis, Corynebacterium diptheriae, Cryptococcus neoformans, Enterobacter cloacae, Enterococcus faecalis, Enterococcus faecium, Escherichia coli, Haemophilus influenzae, Helicobacter pylori, Histoplasma capsulatum, Klebsiella pneumoniae, Listeria monocytogenes, Mycobacterium leprae, Mycobacterium tuberculosis, Neisseria gonorrhoeae, Neisseria meningitidis, Nocardia asteroides, Pasteurella haemolytica, Pasteurella multocida, Pneumocystis carinii, Proteus vulgaris, Pseudomonas aeruginosa, Salmonella bongori, Salmonella cholerasuis, Salmonella enterica, Salmonella paratyphi, Salmonella typhi, Salmonella typhimurium, Staphylococcus aureus, Listeria monocytogenes, Moxarella catarrhalis, Shigella boydii, Shigella dysenteriae, Shigella flexneri, Shigella sonnet, Staphylococcus epidermidis, Streptococcus pneumoniae, Streptococcus mutans, Treponema pallidum, Yersinia enterocolitica, Yersinia pestis and any species falling within the genera of any of the above species.

[0316] 257. The method of Paragraph 254, wherein said cell is not an E. coli cell.

[0317] 258. The method of Paragraph 254, wherein said gene is from an organism other than E. coli.

[0318] 259. The method of Paragraph 254, wherein said cell is contacted with said antisense nucleic acid by introducing a plasmid which transcribes said antisense nucleic acid into said cell population.

[0319] 260. The method of Paragraph 254, wherein said cell is contacted with said antisense nucleic acid by introducing a phage which transcribes said antisense nucleic acid into said cell population.

[0320] 261. The method of Paragraph 254, wherein said cell is contacted with said antisense nucleic acid by transcribing said antisense nucleic acid from the chromosome of cells in said cell population.

[0321] 262. The method of Paragraph 254, wherein said cell is contacted with said antisense nucleic acid by introducing a promoter adjacent to a chromosomal copy of said antisense nucleic acid such that said promoter directs the synthesis of said antisense nucleic acid.

[0322] 263. The method of Paragraph 254, wherein said cell is contacted with said antisense nucleic acid by introducing a retron which expresses said antisense nucleic acid into said cell population.

[0323] 264. The method of Paragraph 254, wherein said cell is contacted with said antisense nucleic acid by introducing a ribozyme into said cell-population, wherein a binding portion of said ribozyme is complementary to said antisense oligonucleotide.

[0324] 265. The method of Paragraph 254, wherein said cell is contacted with said antisense nucleic acid by introducing a liposome comprising said antisense oligonucleotide into said cell.

[0325] 266. The method of Paragraph 254, wherein said cell is contacted with said antisense nucleic acid by electroporation of said antisense nucleic acid into said cell.

[0326] 267. The method of Paragraph 254, wherein said antisense nucleic acid has at least 70% nucleotide sequence identity as determined using BLASTN version 2.0 with the default parameters to a nucleotide sequence comprising at least 10, at least 20, at least 25, at least 30, at least 50 or more than 50 consecutive nucleotides of one of SEQ ID NOs.: 8-3795.

[0327] 268. The method of Paragraph 254 wherein said antisense nucleic acid is a synthetic oligonucleotide.

[0328] 269. The method of Paragraph 254, wherein said gene comprises a nucleic acid selected from the group consisting of a nucleic acid comprising a nucleic acid having at least 70% nucleotide sequence identity as determined using BLASTN version 2.0 with the default parameters to a nucleotide sequence selected from the group consisting of SEQ ID NOS.: 3796-3800, 3806-4860, 5916-10012, a nucleic acid -comprising a nucleotide sequence which hybridizes to a sequence selected from the group consisting of SEQ ID NOS.: 3796-3800, 3806-4860, 5916-10012 under stringent conditions, and a nucleic acid comprising a nucleotide sequence which hybridizes to a nucleotide sequence selected from the group consisting of SEQ ID NOS.: 3796-3800, 3806-4860, 5916-10012 under moderate condtions.

[0329] 270. A method for identifying a gene which is required for proliferation of a cell comprising:

[0330] (a) contacting a cell with an antisense nucleic acid selected from the group consisting of a nucleic acid at least 70% nucleotide sequence identity as determined using BLASTN version 2.0 with the default parameters to a nucleotide sequence selected from the group consisting of SEQ ID NOs.: 8-3795 or a proliferation-inhibiting portion thereof, a nucleic acid comprising a nucleotide sequence which hybridizes to a nucleic acid selected from the group consisting of SEQ ID NOs.: 8-3795 under stringent conditions, and a nucleic acid comprising a nucleotide sequence which hybridizes to a nucleic acid selected from the group consisting of SEQ ID NOs.: 8-3795 under moderate conditions, wherein said cell is a cell other than the organism from which said nucleic acid was obtained;

[0331] (b) determining whether said nucleic acid inhibits proliferation of said cell; and

[0332] (c) identifying the gene in said cell which encodes the mRNA which is complementary to said antisense nucleic acid or a portion thereof.

[0333] 271. The method of Paragraph 270, wherein said cell is selected from the group consisting of Staphylococcus species, Streptococcus species, Enterococcus species, Mycobacterium species, Clostridium species, and Bacillus species.

[0334] 272. The method of Paragraph 270 wherein said cell is selected from the group consisting of Anaplasma marginale, Aspergillus fumigatus, Bacillus anthracis, Bacterioides fragilis Bordetella pertussis, Burkholderia cepacia, Campylobacter jejuni, Candida albicans, Candida glabrata (also called Torulopsis glabrata), Candida tropicalis, Candida parapsilosis, Candida guilliermondii, Candida krusei, Candida kefyr (also called Candida pseudotropicalis), Candida dubliniensis, Chlamydia pneumoniae, Chlamydia trachomatus, Clostridium botulinum, Clostridium difficile, Clostridium perfringens, Coccidiodes immitis, Corynebacterium diptheriae, Cryptococcus neoformans, Enterobacter cloacae, Enterococcus faecalis, Enterococcus faecium, Escherichia coli, Haemophilus influenzae, Helicobacter pylori, Histoplasma capsulatum, Klebsiella pneumoniae, Listeria monocytogenes, Mycobacterium leprae, Mycobacterium tuberculosis, Neisseria gonorrhoeae, Neisseria meningitidis, Nocardia asteroides, Pasteurella haemolytica, Pasteurella multocida, Pneumocystis carinii, Proteus vulgaris, Pseudomonas aeruginosa, Salmonella bongori, Salmonella cholerasuis, Salmonella enterica, Salmonella paratyphi, Salmonella typhi, Salmonella typhimurium, Staphylococcus aureus, Listeria monocytogenes, Moxarella catarrhalis, Shigella boydii, Shigella dysenteriae, Shigella flexneri, Shigella sonnei, Staphylococcus epidermidis, Streptococcus pneumoniae, Streptococcus mutans, Treponema pallidum, Yersinia enterocolitica, Yersinia pestis and any species falling within the genera of any of the above species.

[0335] 273. The method of Paragraph 270, wherein said cell is not E. coli.

[0336] 274. The method of Paragraph 270, further comprising operably linking said antisense nucleic acid to a promoter which is functional in said cell, said promoter being included in a vector, and introducing said vector into said cell.

[0337] 275. A method for identifying a compound having the ability to inhibit proliferation of a cell comprising:

[0338] (a) identifying a homolog of a gene or gene product whose activity or level is inhibited by an antisense nucleic acid in a test cell, wherein said test cell is not the microorgaism from which the antisense nucleic acid was obtained, wherein said antisense nucleic acid is selected from the group consisting of a nucleic acid having at least 70% nucleotide sequence identity as determined using BLASTN version 2.0 with the default parameters to a nucleotide sequence selected from the group consisting of SEQ ID NOs. 8-3795, a nucleic acid comprising a nucleotide sequence which hybridizes to a nucleic acid selected from the group consisting of SEQ ID NOs.: 8-3795 under stringent conditions, and a nucleic acid comprising a nucleotide sequence which hybridizes to a nucleic acid selected from the group consisting of SEQ ID NOs.: 8-3795 under moderate conditions;

[0339] (b) identifying an inhibitory nucleic acid sequence which inhibits the activity of said homolog in said test cell;

[0340] (c) contacting said test cell with a sublethal level of said inhibitory nucleic acid, thus sensitizing said cell;

[0341] (d) contacting the sensitized cell of step (c) with a compound; and

[0342] (e) determining the degree to which said compound inhibits proliferation of said sensitized cell relative to a cell which does not express said inhibitory nucleic acid.

[0343] 276. The method of Paragraph 275, wherein said determining step comprises determining whether said compound inhibits proliferation of said sensitized test cell to a greater extent than said compound inhibits proliferation of a nonsensitized test cell.

[0344] 277. The method of Paragraph 275, wherein step (a) comprises identifying a homologous nucleic acid to a gene or gene product whose activity or level is inhibited by a nucleic acid having at least 70% nucleotide sequence identity as determined using BLASTN version 2.0 with the default parameters to a nucleotide sequence selected from the group consisting of SEQ ID NOs. 8-3795 or a nucleic acid encoding a homologous polypeptide to a polypeptide whose activity or level is inhibited by a nucleic acid having at least 70% nucleotide sequence identity as determined using BLASTN version 2.0 with the default parameters to a nucleotide sequence selected from the group consisting of SEQ ID NOs. 8-3795 by using an algorithm selected from the group consisting of BLASTN version 2.0 with the default parameters and FASTA version 3.0t78 algorithm with the default parameters to identify said homologous nucleic acid or said nucleic acid encoding a homologous polypeptide in a database.

[0345] 278. The method of Paragraph 275 wherein said step (a) comprises identifying a homologous nucleic acid or a nucleic acid encoding a homologous polypeptide by identifying nucleic acids comprising nucleotide sequences which hybridize to said nucleic acid having at least 70% nucleotide sequence identity as determined using BLASTN version 2.0 with the default parameters to a nucleotide sequence selected from the group consisting of SEQ ID NOs. 8-3795 or the complement of the nucleotide sequence of said nucleic acid selected from the group consisting of SEQ ID NOs. 8-3795.

[0346] 279. The method of Paragraph 275 wherein step (a) comprises expressing a nucleic acid having at least 70% nucleic acid identity as determined using BLASTN version 2.0 with the default parameters to a sequence selected from the group consisting of SEQ ID NOs. 8-3795 in said test cell.

[0347] 280. The method of Paragraph 275, wherein step (a) comprises identifying a homologous nucleic acid or a nucleic acid encoding a homologous polypeptide in an test cell selected from the group consisting of Anaplasma marginale, Aspergillus fumigatus, Bacillus anthracis, Bacterioides fragilis Bordetella pertussis, Burkholderia cepacia, Campylobacter jejuni, Candida albicans, Candida glabrata (also called Torulopsis glabrata), Candida tropicalis, Candida parapsilosis, Candida guilliermondii, Candida krusei, Candida kefyr (also called Candida pseudotropicalis), Candida dubliniensis, Chlamydia pneumoniae, Chlamydia trachomatus, Clostridium botulinum, Clostridium difficile, Clostridium perfringens, Coccidiodes immitis, Corynebacterium diptheriae, Cryptococcus neoformans, Enterobacter cloacae, Enterococcus faecalis, Enterococcus faecium, Escherichia coli, Haemophilus influenzae, Helicobacter pylori, Histoplasma capsulatum, Klebsiella pneumoniae, Listeria monocytogenes, Mycobacterium leprae, Mycobacterium tuberculosis, Neisseria gonorrhoeae, Neisseria meningitidis, Nocardia asteroides, Pasteurella haemolytica, Pasteurella multocida, Pneumocystis carinii, Proteus vulgaris, Pseudomonas aeruginosa, Salmonella bongori, Salmonella cholerasuis, Salmonella enterica, Salmonella paratyphi, Salmonella typhi, Salmonella typhimurium, Staphylococcus aureus, Listeria monocytogenes, Moxarella catarrhalis, Shigella boydii, Shigella dysenteriae, Shigella flexneri, Shigella sonnei, Staphylococcus epidermidis, Streptococcus pneumoniae, Streptococcus mutans, Treponema pallidum, Yersinia enterocolitica, Yersinia pestis and any species falling within the genera of any of the above species.

[0348] 281. The method of Paragraph 275, wherein step (a) comprises identifying a homologous nucleic acid or a nucleic acid encoding a homologous polypeptide in a test cell other than E. coli.

[0349] 282. The method of Paragraph 275, wherein said inhibitory nucleic acid is an antisense nucleic acid.

[0350] 283. The method of Paragraph 275, wherein said inhibitory nucleic acid comprises an antisense nucleic acid to a portion of said homolog.

[0351] 284. The method of Paragraph 275, wherein said inhibitory nucleic acid comprises an antisense nucleic acid to a portion of the operon encoding said homolog.

[0352] 285. The method of Paragraph 275, wherein the step of contacting the cell with a sublethal level of said inhibitory nucleic acid comprises directly contacting said cell with said inhibitory nucleic acid.

[0353] 286. The method of Paragraph 275, wherein the step of contacting the cell with a sublethal level of said inhibitory nucleic acid comprises expressing an antisense nucleic acid to said homolog in said cell.

[0354] 287. The method of Paragraph 275, wherein said gene product comprises a polypeptide comprising an amino acid sequence selected from the group consisting of SEQ ID NOs.: 3801-3805, 4861-5915, 10013-14110.

[0355] 288. The method of Paragraph 275, wherein said gene comprises a nucleic acid selected from the group consisting of a nucleic acid comprising a nucleic acid having at least 70% nucleotide sequence identity as determined using BLASTN version 2.0 with the default parameters to a sequence selected from the group consisting of SEQ ID NOS.: 3796-3800, 3806-4860, 5916-10012, a nucleic acid comprising a nucleotide sequence which hybridizes to a nucleotide sequence selected from the group consisting of SEQ ID NOS.: 3796-3800, 3806-4860, 5916-10012 under stringent conditions, and a nucleic acid comprising a nucleotide sequence which hybridizes to a nucleotide sequence selected from the group consisting of SEQ ID NOS.: 3796-3800, 3806-4860, 5916-10012 under moderate condtions.

[0356] 289. A compound identified using the method of Paragraph 275.

[0357] 290. A method of identifying a compound having the ability to inhibit proliferation comprising:

[0358] (a) sensitizing a test cell by contacting said test cell with a sublethal level of an antisense nucleic acid, wherein said antisense nucleic acid is selected from the group consisting of a nucleic acid having at least 70% nucleotide sequence identity as determined using BLASTN version 2.0 with the default parameters to a nucleotide sequence selected from the group consisting of SEQ ID NOs. 8-3795 or a portion thereof which inhibits the proliferation of the cell from which said nucleic acid was obtained, a nucleic acid comprising a nucleotide sequence which hybridizes to a nucleic acid selected from the group consisting of SEQ ID NOs.: 8-3795 under stringent conditions, and a nucleic acid comprising a nucleotide sequence which hybridizes to a nucleic acid selected from the group consisting of SEQ ID NOs.: 8-3795 under moderate conditionst;

[0359] (b) contacting the sensitized test cell of step (a) with a compound; and

[0360] (c) determining the degree to which said compound inhibits proliferation of said sensitized test cell relative to a cell which does not contain said antisense nucleic acid.

[0361] 291. The method of Paragraph 290, wherein said determining step comprises determining whether said compound inhibits proliferation of said sensitized test cell to a greater extent than said compound inhibits proliferation of a nonsensitized test cell.

[0362] 292. A compound identified using the method of Paragraph 290.

[0363] 293. The method of Paragraph 290, wherein said test cell is selected from the group consisting of Anaplasma marginale, Aspergillus fumigatus, Bacillus anthracis, Bacterioides fragilis Bordetella pertussis, Burkholderia cepacia, Campylobacter jejuni, Candida albicans, Candida glabrata (also called Torulopsis glabrata), Candida tropicalis, Candida parapsilosis, Candida guilliermondii, Candida krusei, Candida kefyr (also called Candida pseudotropicalis), Candida dubliniensis, Chlamydia pneumoniae, Chlamydia trachomatus, Clostridium botulinum, Clostridium difficile, Clostridium perfringens, Coccidiodes immitis, Corynebacterium diptheriae, Cryptococcus neoformans, Enterobacter cloacae, Enterococcus faecalis, Enterococcus faecium, Escherichia coli, Haemophilus influenzae, Helicobacter pylori, Histoplasma capsulatum, Klebsiella pneumoniae, Listeria monocytogenes, Mycobacterium leprae, Mycobacterium tuberculosis, Neisseria gonorrhoeae, Neisseria meningitidis, Nocardia asteroides, Pasteurella haemolytica, Pasteurella multocida, Pneumocystis carinii, Proteus vulgaris, Pseudomonas aeruginosa, Salmonella bongori, Salmonella cholerasuis, Salmonella enterica, Salmonella paratyphi, Salmonella typhi, Salmonella typhimurium, Staphylococcus aureus, Listeria monocytogenes, Moxarella catarrhalis, Shigella boydii, Shigella dysenteriae, Shigella flexneri, Shigella sonnei, Staphylococcus epidermidis, Streptococcus pneumoniae, Streptococcus mutans, Treponema pallidum, Yersinia enterocolitica, Yersinia pestis and any species falling within the genera of any of the above species.

[0364] 294. The method of Paragraph 290, wherein the test cell is not E. coli.

[0365] 295. A method for identifying a compound having activity against a biological pathway required for proliferation comprising:

[0366] (a) sensitizing a cell by providing a sublethal level of an antisense nucleic acid complementary to a nucleic acid encoding a gene product required for proliferation, wherein said gene product is selected from the group consisting of a gene product having at least 70% nucleotide sequence identity as determined using BLASTN version 2.0 with the default parameters to a gene product whose expression is inhibited by an antisense nucleic acid comprising a nucleotide sequence selected from the group consisting of SEQ ID NOs.: 8-3795, a gene product encoded by a nucleic acid having at least 70% nucleotide sequence identity as determined using BLASTN version 2.0 with the default parameters to a nucleic acid encoding a gene product whose expression is inhibited by an antisense nucleic acid comprising a nucleotide sequence selected from the group consisting of SEQ ID NOs:8-3795, a gene product having at least 25% amino acid identity as determined using FASTA version 3.0t78 with the default parameters to a gene product whose expression is inhibited by an antisense nucleic acid comprising a nucleotide sequence selected from the group consisting of SEQ ID NOs.: 8-3795, a gene product encoded by a nucleic acid comprising a nucleotide sequence which hybridizes to a nucleic acid selected from the group consisting of SEQ ID NOs.: 8-3795 under stringent conditions, a gene product encoded by a nucleic acid comprising a nucleotide sequence which hybridizes to a nucleic acid selected from the group consisting of SEQ ID NOs.: 8-3795 under moderate conditions, and a gene product whose activity may be complemented by the gene product whose activity is inhibited by a nucleic acid selected from the group consisting of SEQ ID NOs: 8-3795;

[0367] (b) contacting the sensitized cell with a compound; and

[0368] (c) determining the extent to which said compound inhibits the growth of said sensitized cell relative to a cell which does not contain said antisense nucleic acid.

[0369] 296. The method of Paragraph 295, wherein said determining step comprises determining whether said compound inhibits the growth of said sensitized cell to a greater extent than said compound inhibits the growth of a nonsensitized cell.

[0370] 297. The method of Paragraph 295, wherein said cell is selected from the group consisting of bacterial cells, fungal cells, plant cells, and animal cells.

[0371] 298. The method of Paragraph 295, wherein said cell is a Gram positive bacterium.

[0372] 299. The method of Paragraph 298, wherein said Gram positive bacterium is selected from the group consisting of Staphylococcus species, Streptococcus species, Enterococcus species, Mycobacterium species, Clostridium species, and Bacillus species.

[0373] 300. The method of Paragraph 299, wherein said Gram positive bacterium is Staphylococcus aureus.

[0374] 301. The method of Paragraph 298, wherein said Gram positive bacterium is selected from the group consisting of Staphylococcus aureus RN450 and Staphylococcus aureus RN4220.

[0375] 302. The method of Paragraph 295, wherein said cell is selected from the group consisting of Anaplasma marginale, Aspergillus fumigatus, Bacillus anthracis, Bacterioides fragilis Bordetella pertussis, Burkholderia cepacia, Campylobacter jejuni, Candida albicans, Candida glabrata (also called Torulopsis glabrata), Candida tropicalis, Candida parapsilosis, Candida guilliermondii, Candida krusei, Candida kefyr (also called Candida pseudotropicalis), Candida dubliniensis, Chlamydia pneumoniae, Chlamydia trachomatus, Clostridium botulinum, Clostridium difficile, Clostridium perfringens, Coccidiodes immitis, Corynebacterium diptheriae, Cryptococcus neoformans, Enterobacter cloacae, Enterococcus faecalis, Enterococcus faecium, Escherichia coli, Haemophilus influenzae, Helicobacter pylori, Histoplasma capsulatum, Klebsiella pneumoniae, Listeria monocytogenes, Mycobacterium leprae, Mycobacterium tuberculosis, Neisseria gonorrhoeae, Neisseria meningitidis, Nocardia asteroides, Pasteurella haemolytica, Pasteurella multocida, Pneumocystis carinii, Proteus vulgaris, Pseudomonas aeruginosa, Salmonella bongori, Salmonella cholerasuis, Salmonella enterica, Salmonella paratyphi, Salmonella typhi, Salmonella typhimurium, Staphylococcus aureus, Listeria monocytogenes, Moxarella catarrhalis, Shigella boydii, Shigella dysenteriae, Shigella flexneri, Shigella sonnei, Staphylococcus epidermidis, Streptococcus pneumoniae, Streptococcus mutans, Treponema pallidum, Yersinia enterocolitica, Yersinia pestis and any species falling within the genera of any of the above species.

[0376] 303. The method of Paragraph 295, wherein said cell is not an E. coli cell.

[0377] 304. The method of Paragraph 295, wherein said gene product is from an organism other than E. coli.

[0378] 305. The method of Paragraph 295, wherein said antisense nucleic acid is transcribed from an inducible promoter.

[0379] 306. The method of Paragraph 305, further comprising contacting the cell with an agent which induces expression of said antisense nucleic acid from said inducible promoter, wherein said antisense nucleic acid is expressed at a sublethal level.

[0380] 307. The method of Paragraph 295, wherein inhibition of proliferation is measured by monitoring the optical density of a liquid culture.

[0381] 308. The method of Paragraph 295, wherein said gene product comprises a polypeptide having at least 25% amino acid identity as determined using FASTA version 3.0t78 with the default parameters to a sequence selected from the group consisting of SEQ ID NOs.: 3801-3805, 4861-5915, 10013-14110.

[0382] 309. The method of Paragraph 295, wherein said nucleic acid encoding said gene product comprises a nucleic acid selected from the group consisting of a nucleic acid comprising a nucleic acid having at least 70% nucleotide sequence identity as determined using BLASTN version 2.0 with the default parameters to a nucleotide sequence selected from the group consisting of SEQ ID NOS.: 3796-3800, 3806-4860, 5916-10012, a nucleic acid comprising a nucleotide sequence which hybridizes to a nucleotide sequence selected from the group consisting of SEQ ID NOS.: 3796-3800, 3806-4860, 5916-10012 under stringent conditions, and a nucleic acid comprising a nucleotide sequence which hybridizes to a nucleotide sequence selected from the group consisting of SEQ ID NOS.: 3796-3800, 3806-4860, 5916-10012 under moderate condtions.

[0383] 310. A compound identified using the method of Paragraph 295.

[0384] 311. A method for identifying a compound having the ability to inhibit cellular proliferation comprising:

[0385] (a) contacting a cell with an agent which reduces the activity or level of a gene product required for proliferation of said cell, wherein said gene product is selected from the group consisting of a gene product having at least 70% nucleotide sequence identity as determined using BLASTN version 2.0 with the default parameters to a gene product whose expression is inhibited by an antisense nucleic acid comprising a nucleotide sequence selected from the group consisting of SEQ ID NOs.: 8-3795, a gene product encoded by a nucleic acid having at least 70% nucleotide sequence identity as determined using BLASTN version 2.0 with the default parameters to a nucleic acid encoding a gene product whose expression is inhibited by an antisense nucleic acid comprising a nucleotide sequence selected from the group consisting of SEQ ID NOs:8-3795, a gene product having at least 25% amino acid identity as determined using FASTA version 3.0t78 with the default parameters to a gene product whose expression is inhibited by an antisense nucleic acid comprising a nucleotide sequence selected from the group consisting of SEQ ID NOs.: 8-3795, a gene product encoded by a nucleic acid comprising a nucleotide sequence which hybridizes to a nucleic acid selected from the group consisting of SEQ ID NOs.: 8-3795 under stringent conditions, a gene product encoded by a nucleic acid comprising a nucleotide sequence which hybridizes to a nucleic acid selected from the group consisting of SEQ ID NOs.: 8-3795 under moderate conditions, and a gene product whose activity may be complemented by the gene product whose activity is inhibited by a nucleic acid selected from the group consisting of SEQ ID NOs: 8-3795;

[0386] (b) contacting said cell with a compound; and

[0387] (c) determining the degree to which said compound reduces proliferation of said contacted cell relative to a cell which was not contacted with said agent.

[0388] 312. The method of Paragraph 311, wherein said determining step comprises determining whether said compound reduces proliferation of said contacted cell to a greater extent than said compound reduces proliferation of cells which have not been contacted with said agent.

[0389] 313. The method of Paragraph 311, wherein said cell is selected from the group consisting of Anaplasma marginale, Aspergillus fumigatus, Bacillus anthracis, Bacterioides fragilis Bordetella pertussis, Burkholderia cepacia, Campylobacter jejuni, Candida albicans, Candida glabrata (also called Torulopsis glabrata), Candida tropicalis, Candida parapsilosis, Candida guilliermondii, Candida krusei, Candida kefyr (also called Candida pseudotropicalis), Candida dubliniensis, Chlamydia pneumoniae, Chlamydia trachomatus, Clostridium botulinum, Clostridium difficile, Clostridium perfringens, Coccidiodes immitis, Corynebacterium diptheriae, Cryptococcus neoformans, Enterobacter cloacae, Enterococcus faecalis, Enterococcus faecium, Escherichia coli, Haemophilus influenzae, Helicobacter pylori, Histoplasma capsulatum, Klebsiella pneumoniae, Listeria monocytogenes, Mycobacterium leprae, Mycobacterium tuberculosis, Neisseria gonorrhoeae, Neisseria meningitidis, Nocardia asteroides, Pasteurella haemolytica, Pasteurella multocida, Pneumocystis carinii, Proteus vulgaris, Pseudomonas aeruginosa, Salmonella bongori, Salmonella cholerasuis, Salmonella enterica, Salmonella paratyphi, Salmonella typhi, Salmonella typhimurium, Staphylococcus aureus, Listeria monocytogenes, Moxarella catarrhalis, Shigella boydii, Shigella dysenteriae, Shigella flexneri, Shigella sonnei, Staphylococcus epidermidis, Streptococcus pneumoniae, Streptococcus mutans, Treponema pallidum, Yersinia enterocolitica, Yersinia pestis and any species falling within the genera of any of the above species.

[0390] 314. The method of Paragraph 311, wherein said cell is not an E. coli cell.

[0391] 315. The method of Paragraph 311, wherein said gene product is from an organism other than E. coli.

[0392] 316. The method of Paragraph 311, wherein said agent which reduces the activity or level of a gene product required for proliferation of said cell comprises an antisense nucleic acid to a gene or operon required for proliferation.

[0393] 317. The method of Paragraph 311, wherein said agent which reduces the activity or level of a gene product required for proliferation of said cell comprises a compound known to inhibit growth or proliferation of a cell.

[0394] 318. The method of Paragraph 311, wherein said cell contains a mutation which reduces the activity or level of said gene product required for proliferation of said cell.

[0395] 319. The method of Paragraph 311, wherein said mutation is a temperature sensitive mutation.

[0396] 320. The method of Paragraph 311, wherein said gene product comprises a gene product comprises a polypeptide having at least 25% amino acid identity as determined using FASTA version 3.0t78 with the default parameters to an amino acid sequence selected from the group consisting of SEQ ID NOs.: 3801-3805, 4861-5915, 10013-14110.

[0397] 321. A compound identified using the method of Paragraph 311.

[0398] 322. A method for identifying the biological pathway in which a proliferation-required gene product or a gene encoding a proliferation-required gene product lies comprising:

[0399] (a) providing a sublethal level of an antisense nucleic acid which inhibits the activity or reduces the level of said gene encoding a proliferation-required gene product or said said proliferation-required gene product in a test cell, wherein said proliferation-required gene product is selected from the group consisting of a gene product having at least 70% nucleotide sequence identity as determined using BLASTN version 2.0 with the default parameters to a gene product whose expression is inhibited by an antisense nucleic acid comprising a nucleotide sequence selected from the group consisting of SEQ ID NOs.: 8-3795, a gene product encoded by a nucleic acid having at least 70% nucleotide sequence identity as determined using BLASTN version 2.0 with the default parameters to a nucleic acid encoding a gene product whose expression is inhibited by an antisense nucleic acid comprising a nucleotide sequence selected from the group consisting of SEQ ID NOs:8-3795, a gene product having at least 25% amino acid identity as determined using FASTA version 3.0t78 with the default parameters to a gene product whose expression is inhibited by an antisense nucleic acid comprising a nucleotide sequence selected from the group consisting of SEQ ID NOs.: 8-3795, a gene product encoded by a nucleic acid comprising a nucleotide sequence which hybridizes to a nucleic acid selected from the group consisting of SEQ ID NOs.: 8-3795 under stringent conditions, a gene product encoded by a nucleic acid comprising a nucleotide sequence which hybridizes to a nucleic acid selected from the group consisting of SEQ ID NOs.: 8-3795 under moderate conditions, and a gene product whose activity may be complemented by the gene product whose activity is inhibited by a nucleic acid selected from the group consisting of SEQ ID NOs: 8-3795;

[0400] (b) contacting said test cell with a compound known to inhibit growth or proliferation of a cell, wherein the biological pathway on which said compound acts is known; and

[0401] (c) determining the degree to which said compound inhibits proliferation of said test cell relative to a cell which does not contain said antisense nucleic acid.

[0402] 323. The method of Paragraph 322, wherein said determining step comprises determining whether said test cell has a substantially greater sensitivity to said compound than a cell which does not express said sublethal level of said antisense nucleic acid.

[0403] 324. The method of Paragraph 322, wherein said gene product comprises a polypeptide having at least 25% amino acid identity as determined using FASTA version 3.0t78 with the default parameters to an amino acid sequence selected from the group consisting of SEQ ID NOs.: 3801-3805, 4861-5915, 10013-14110.

[0404] 325. The method of Paragraph 322, wherein said test cell is selected from the group consisting of Anaplasma marginale, Aspergillus fumigatus, Bacillus anthracis, Bacterioides fragilis Bordetella pertussis, Burkholderia cepacia, Campylobacter jejuni, Candida albicans, Candida glabrata (also called Torulopsis glabrata), Candida tropicalis, Candida parapsilosis, Candida guilliermondii, Candida krusei, Candida kefyr (also called Candida pseudotropicalis), Candida dubliniensis, Chlamydia pneumoniae, Chlamydia trachomatus, Clostridium botulinum, Clostridium difficile, Clostridium perfringens, Coccidiodes immitis, Corynebacterium diptheriae, Cryptococcus neoformans, Enterobacter cloacae, Enterococcus faecalis, Enterococcus faecium, Escherichia coli, Haemophilus influenzae, Helicobacter pylori, Histoplasma capsulatum, Klebsiella pneumoniae, Listeria monocytogenes, Mycobacterium leprae, Mycobacterium tuberculosis, Neisseria gonorrhoeae, Neisseria meningitidis, Nocardia asteroides, Pasteurella haemolytica, Pasteurella multocida, Pneumocystis carinii, Proteus vulgaris, Pseudomonas aeruginosa, Salmonella bongori, Salmonella cholerasuis, Salmonella enterica, Salmonella paratyphi, Salmonella typhi, Salmonella typhimurium, Staphylococcus aureus, Listeria monocytogenes, Moxarella catarrhalis, Shigella boydii, Shigella dysenteriae, Shigella flexneri, Shigella sonnei, Staphylococcus epidermidis, Streptococcus pneumoniae, Streptococcus mutans, Treponema pallidum, Yersinia enterocolitica, Yersinia pestis and any species falling within the genera of any of the above species.

[0405] 326. The method of Paragraph 322, wherein said test cell is not an E. coli cell.

[0406] 327. The method of Paragraph 322, wherein said gene product is from an organism other than E. coli.

[0407] 328. A method for determining the biological pathway on which a test compound acts comprising:

[0408] (a) providing a sublethal level of an antisense nucleic acid complementary to a proliferation-required nucleic acid in a cell, thereby producing a sensitized cell, wherein said antisense nucleic acid is selected from the group consisting of a nucleic acid having at least 70% nucleotide sequence identity as determined using BLASTN version 2.0 with the default parameters to a nucleotide sequence selected from the group consisting of SEQ ID NOs:8-3795 or a proliferation-inhibiting portion thereof a nucleic acid comprising a nucleotide sequence which hybridizes to a nucleic acid selected from the group consisting of SEQ ID NOs.: 8-3795 under stringent conditions, and a nucleic acid comprising a nucleotide sequence which hybridizes to a nucleic acid selected from the group consisting of SEQ ID NOs.: 8-3795 under moderate conditions and wherein the biological pathway in which said proliferation-required nucleic acid or a protein encoded by said proliferation-required polypeptide lies is known,

[0409] (b) contacting said cell with said test compound; and

[0410] (c) determining the degree to which said compound inhibits proliferation of said sensitized cell relative to a cell which does not contain said antisense nucleic acid.

[0411] 329. The method of Paragraph 328, wherein said determining step comprises determining whether said sensitized cell has a substantially greater sensitivity to said test compound than a cell which does not express said sublethal level of said antisense nucleic acid.

[0412] 330. The method of Paragraph 328, further comprising:

[0413] (d) providing a sublethal level of a second antisense nucleic acid complementary to a second proliferation-required nucleic acid in a second cell, wherein said second proliferation-required nucleic acid is in a different biological pathway than said proliferation-required nucleic acid in step (a); and

[0414] (e) determining whether said second cell does not have a substantially greater sensitivity to said test compound than a cell which does not express said sublethal level of said second antisense nucleic acid, wherein said test compound is specific for the biological pathway against which the antisense nucleic acid of step (a) acts if said sensitized cell has substantially greater sensitivity to said test compound than said second cell.

[0415] 331. The method of Paragraph 328, wherein said sensitized cell is selected from the group consisting of Anaplasma marginale, Aspergillus fumigatus, Bacillus anthracis, Bacterioides fragilis Bordetella pertussis, Burkholderia cepacia, Campylobacter jejuni, Candida albicans, Candida glabrata (also called Torulopsis glabrata), Candida tropicalis, Candida parapsilosis, Candida guilliermondii, Candida krusei, Candida kefyr (also called Candida pseudotropicalis), Candida dubliniensis, Chlamydia pneumoniae, Chlamydia trachomatus, Clostridium botulinum, Clostridium difficile, Clostridium perfringens, Coccidiodes immitis, Corynebacterium diptheriae, Cryptococcus neoformans, Enterobacter cloacae, Enterococcus faecalis, Enterococcus faecium, Escherichia coli, Haemophilus influenzae, Helicobacter pylori, Histoplasma capsulatum, Klebsiella pneumoniae, Listeria monocytogenes, Mycobacterium leprae, Mycobacterium tuberculosis, Neisseria gonorrhoeae, Neisseria meningitidis, Nocardia asteroides, Pasteurella haemolytica, Pasteurella multocida, Pneumocystis carinii, Proteus vulgaris, Pseudomonas aeruginosa, Salmonella bongori, Salmonella cholerasuis, Salmonella enterica, Salmonella paratyphi, Salmonella typhi, Salmonella typhimurium, Staphylococcus aureus, Listeria monocytogenes, Moxarella catarrhalis, Shigella boydii, Shigella dysenteriae, Shigella flexneri, Shigella sonnei, Staphylococcus epidermidis, Streptococcus pneumoniae, Streptococcus mutans, Treponema pallidum, Yersinia enterocolitica, Yersinia pestis and any species falling within the genera of any of the above species.

[0416] 332. The method of Paragraph 328, wherein said sensitized cell is not an E. coli cell.

[0417] 333. The method of Paragraph 328, wherein said proliferation-required nucleic acid is from an organism other than E. coli.

[0418] 334. A compound which inhibits proliferation by interacting with a gene encoding a gene product required for proliferation or with a gene product required for proliferation, wherein said gene product is selected from the group consisting of a gene product having at least 70% nucleotide sequence identity as determined using BLASTN version 2.0 with the default parameters to a gene product whose expression is inhibited by an antisense nucleic acid comprising a nucleotide sequence selected from the group consisting of SEQ ID NOs.: 8-3795, a gene product encoded by a nucleic acid having at least 70% nucleotide sequence identity as determined using BLASTN version 2.0 with the default parameters to a nucleic acid encoding a gene product whose expression is inhibited by an antisense nucleic acid comprising a nucleotide sequence selected from the group consisting of SEQ ID NOs:8-3795, a gene product having at least 25% amino acid identity as determined using FASTA version 3.0t78 with the default parameters to a gene product whose expression is inhibited by an antisense nucleic acid comprising a nucleotide sequence selected from the group consisting of SEQ ID NOs.: 8-3795, a gene product encoded by a nucleic acid comprising a nucleotide sequence which hybridizes to a nucleic acid selected from the group consisting of SEQ ID NOs.: 8-3795 under stringent conditions, a gene product encoded by a nucleic acid comprising a nucleotide sequence which hybridizes to a nucleic acid selected from the group consisting of SEQ ID NOs.: 8-3795 under moderate conditions, and a gene product whose activity may be complemented by the gene product whose activity is inhibited by a nucleic acid selected from the group consisting of SEQ ID NOs: 8-3795.

[0419] 335. The compound of Paragraph 334, wherein said gene product comprises a polypeptide having at least 25% amino acid identity as determined using FASTA version 3.0t78 with the default parameters to a sequence selected from the group consisting of SEQ ID NOs.: 3801-3805, 4861-5915, 10013-14110.

[0420] 336. The compound of Paragraph 334, wherein said gene comprises a nucleic acid selected from the group consisting of a nucleic acid comprising a nucleic acid having at least 70% nucleotide sequence identity as determined using BLASTN version 2.0 with the default parameters to a nucleotide sequence selected from the group consisting of SEQ ID NOS.: 3796-3800, 3806-4860, 5916-10012, a nucleic acid comprising a nucleotide sequence which hybridizes to a nucleotide sequence selected from the group consisting of SEQ ID NOS.: 3796-3800, 3806-4860, 5916-10012 under stringent conditions, and a nucleic acid comprising a nucleotide sequence which hybridizes to a nucleotide sequence selected from the group consisting of SEQ ID NOS.: 3796-3800, 3806-4860, 5916-10012 under moderate condtions.

[0421] 337. A method for manufacturing an antibiotic comprising the steps of:

[0422] screening one or more candidate compounds to identify a compound that reduces the activity or level of a gene product required for proliferation wherein said gene product is selected from the group consisting of a gene product having at least 70% nucleotide sequence identity as determined using BLASTN version 2.0 with the default parameters to a gene product whose expression is inhibited by an antisense nucleic acid comprising a nucleotide sequence selected from the group consisting of SEQ ID NOs.: 8-3795, a gene product encoded by a nucleic acid having at least 70% nucleotide sequence identity as determined using BLASTN version 2.0 with the default parameters to a nucleic acid encoding a gene product whose expression is inhibited by an antisense nucleic acid comprising a nucleotide sequence selected from the group consisting of SEQ ID NOs:8-3795, a gene product having at least 25% amino acid identity as determined using FASTA version 3.0t78 with the default parameters to a gene product whose expression is inhibited by an antisense nucleic acid comprising a nucleotide sequence selected from the group consisting of SEQ ID NOs.: 8-3795, a gene product encoded by a nucleic acid comprising a nucleotide sequence which hybridizes to a nucleic acid selected from the group consisting of SEQ ID NOs.: 8-3795 under stringent conditions, a gene product encoded by a nucleic acid comprising a nucleotide sequence which hybridizes to a nucleic acid selected from the group consisting of SEQ ID NOs.: 8-3795 under moderate conditions, and a gene product whose activity may be complemented by the gene product whose activity is inhibited by a nucleic acid selected from the group consisting of SEQ ID NOs: 8-3795; and

[0423] manufacturing the compound so identified.

[0424] 338. The method of Paragraph 337, wherein said screening step comprises performing any one of the methods of Paragraphs 205, 211, 222, 275, 290, 295, 311.

[0425] 339. The method of Paragraph 337, wherein said gene product comprises a polypeptide having at least 25% amino acid identity as determined using FASTA version 3.0t78 with the default parameters to an amino acid sequence selected from the group consisting of SEQ ID NOs.: 3801-3805, 4861-5915, 10013-14110.

[0426] 340. A method for inhibiting proliferation of a cell in a subject comprising administering an effective amount of a compound that reduces the activity or level of a gene product required for proliferation of said cell, wherein said gene product is selected from the group consisting of a gene product having at least 70% nucleotide sequence identity as determined using BLASTN version 2.0 with the default parameters to a gene product whose expression is inhibited by an antisense nucleic acid comprising a nucleotide sequence selected from the group consisting of SEQ ID NOs.: 8-3795, a gene product encoded by a nucleic acid having at least 70% nucleotide sequence identity as determined using BLASTN version 2.0 with the default parameters to a nucleic acid encoding a gene product whose expression is inhibited by an antisense nucleic acid comprising a nucleotide sequence selected from the group consisting of SEQ ID NOs:8-3795, a gene product having at least 25% amino acid identity as determined using FASTA version 3.0t78 with the default parameters to a gene product whose expression is inhibited by an antisense nucleic acid comprising a nucleotide sequence selected from the group consisting of SEQ ID NOs.: 8-3795, a gene product encoded by a nucleic acid comprising a nucleotide sequence which hybridizes to a nucleic acid selected from the group consisting of SEQ ID NOs.: 8-3795 under stringent conditions, a gene product encoded by a nucleic acid comprising a nucleotide sequence which hybridizes to a nucleic acid selected from the group consisting of SEQ ID NOs.: 8-3795 under moderate conditions, and a gene product whose activity may be complemented by the gene product whose activity is inhibited by a nucleic acid selected from the group consisting of SEQ ID NOs: 8-3795.

[0427] 341. The method of Paragraph 340 wherein said subject is selected from the group consisting of vertebrates, mammals, avians, and human beings.

[0428] 342. The method of Paragraph 340, wherein said gene product comprises a polypeptide having at least 25% amino acid identity as determined using FASTA version 3.0t78 with the default parameters to an amino acid sequence selected from the group consisting of SEQ ID NOs.: 3801-3805, 4861-5915, 10013-14110.

[0429] 343. The method of Paragraph 340, wherein said cell is selected from the group consisting of Anaplasma marginale, Aspergillus fumigatus, Bacillus anthracis, Bacterioides fragilis Bordetella pertussis, Burkholderia cepacia, Campylobacter jejuni, Candida albicans, Candida glabrata (also called Torulopsis glabrata), Candida tropicalis, Candida parapsilosis, Candida guilliermondii, Candida krusei, Candida kefyr (also called Candida pseudotropicalis), Candida dubliniensis, Chlamydia pneumoniae, Chlamydia trachomatus, Clostridium botulinum, Clostridium difficile, Clostridium perfringens, Coccidiodes immitis, Corynebacterium diptheriae, Cryptococcus neoformans, Enterobacter cloacae, Enterococcus faecalis, Enterococcus faecium, Escherichia coli, Haemophilus influenzae, Helicobacter pylori, Histoplasma capsulatum, Klebsiella pneumoniae, Listeria monocytogenes, Mycobacterium leprae, Mycobacterium tuberculosis, Neisseria gonorrhoeae, Neisseria meningitidis, Nocardia asteroides, Pasteurella haemolytica, Pasteurella multocida, Pneumocystis carinii, Proteus vulgaris, Pseudomonas aeruginosa, Salmonella bongori, Salmonella cholerasuis, Salmonella enterica, Salmonella paratyphi, Salmonella typhi, Salmonella typhimurium, Staphylococcus aureus, Listeria monocytogenes, Moxarella catarrhalis, Shigella boydii, Shigella dysenteriae, Shigella flexneri, Shigella sonnei, Staphylococcus epidermidis, Streptococcus pneumoniae, Streptococcus mutans, Treponema pallidum, Yersinia enterocolitica, Yersinia pestis and any species falling within the genera of any of the above species.

[0430] 344. The method of Paragraph 340, wherein said cell is not E. coli.

[0431] 345. The method of Paragraph 340, wherein said gene product is from an organism other than E. coli.

### Definitions

[0432] By “biological pathway” is meant any discrete cell function or process that is carried out by a gene product or a subset of gene products. Biological pathways include anabolic, catabolic, enzymatic, biochemical and metabolic pathways as well as pathways involved in the production of cellular structures such as cell walls. Biological pathways that are usually required for proliferation of cells or microorganisms include, but are not limited to, cell division, DNA synthesis and replication, RNA synthesis (transcription), protein synthesis (translation), protein processing, protein transport, fatty acid biosynthesis, electron transport chains, cell wall synthesis, cell membrane production, synthesis and maintenance, and the like.

[0433] By “inhibit activity of a gene or gene product” is meant having the ability to interfere with the function of a gene or gene product in such a way as to decrease expression of the gene, in such a way as to reduce the level or activity of a product of .the gene or in such a way as to inhibit the interaction of the gene or gene product with other biological molecules required for its activity. Agents which inhibit the activity of a gene include agents that inhibit transcription of the gene, agents that inhibit processing of the transcript of the gene, agents that reduce the stability of the transcript of the gene, and agents that inhibit translation of the mRNA transcribed from the gene. In microorganisms, agents which inhibit the activity of a gene can act to decrease expression of the operon in which the gene resides or alter the folding or processing of operon RNA so as to reduce the level or activity of the gene product. The gene product can be a non-translated RNA such as ribosomal RNA, a translated RNA (mRNA) or the protein product resulting from translation of the gene mRNA. Of particular utility to the present invention are antisense RNAs that have activities against the operons or genes to which they specifically hybridze.

[0434] By “activity against a gene product” is meant having the ability to inhibit the function or to reduce the level or activity of the gene product in a cell. This includes, but is not limited to, inhibiting the enzymatic activity of the gene product or the ability of the gene product to interact with other biological molecules required for its activity, including inhibiting the gene product's assembly into a multimeric structure.

[0435] By “activity against a protein” is meant having the ability to inhibit the function or to reduce the level or activity of the protein in a cell. This includes, but is not limited to, inhibiting the enzymatic activity of the protein or the ability of the protein to interact with other biological molecules required for its activity, including inhibiting the protein's assembly into a multimeric structure.

[0436] By “activity against a nucleic acid” is meant having the ability to inhibit the function or to reduce the level or activity of the nucleic acid in a cell. This includes, but is not limited to, inhibiting the ability of the nucleic acid interact with other biological molecules required for its activity, including inhibiting the nucleic acid's assembly into a multimeric structure.

[0437] By “activity against a gene” is meant having the ability to inhibit the function or expression of the gene in a cell. This includes, but is not limited to, inhibiting the ability of the gene to interact with other biological molecules required for its activity.

[0438] By “activity against an operon” is meant having the ability to inhibit the function or reduce the level of one or more products of the operon in a cell. This includes, but is not limited to, inhibiting the enzymatic activity of one or more products of the operon or the ability of one or more products of the operon to interact with other biological molecules required for its activity.

[0439] By “antibiotic” is meant an agent which inhibits the proliferation of a cell or microorganism.

[0440] By “E. coli or Escherichia coli” is meant Escherichia coli or any organism previously categorized as a species of Shigella including Shigella boydii, Shigella flexneri, Shigella dysenteriae, Shigella sonnei, Shigella 2A.

[0441] By “homologous coding nucleic acid” is meant a nucleic acid homologous to a nucleic acid encoding a gene product whose activity or level is inhibited by a nucleic acid selected from the group consisting of SEQ ID NOs.: 8-3795 or a portion thereof. In some embodiments, the homologous coding nucleic acid may have at least 97%, at least 95%, at least 90%, at least 85%, at least 80%, or at least 70% nucleotide sequence identity to a nucleotide sequence selected from the group consisting of SEQ ID NOS.: 3796-3800, 3806-4860, 5916-10012 and fragments comprising at least 10, 15, 20, 25, 30, 35, 40, 50, 75, 100, 150, 200, 300, 400, or 500 consecutive nucleotides thereof. In other embodiments the homologous coding nucleic acids may have at least 97%, at least 95%, at least 90%, at least 85%, at least 80%, or at least 70% nucleotide sequence identity to a nucleotide sequence selected from the group consisting of the nucleotide sequences complementary to one of SEQ ID NOs.: 8-3795 and fragments comprising at least 10, 15, 20, 25, 30, 35, 40, 50, 75, 100, 150, 200, 300, 400, or 500 consecutive nucleotides thereof. Identity may be measured using BLASTN version 2.0 with the default parameters or tBLASTX with the default parameters. (Altschul, S. F. et al. Gapped BLAST and PSI-BLAST: A New Generation of Protein Database Search Programs, Nucleic Acid Res. 25: 3389-3402 (1997), the disclosure of which is incorporated herein by reference in its entirety) Alternatively a “homologuous coding nucleic acid” could be identified by membership of the gene of interest to a functional orthologue cluster. All other members of that orthologue cluster would be considered homologues. Such a library of functional orthologue clusters can be found at http://www.ncbi.nlm.nih.gov/COG. A gene can be classified into a cluster of orthologous groups or COG by using the COGNITOR program available at the above web site, or by direct BLASTP comparison of the gene of interest to the members of the COGs and analysis of these results as described by Tatusov, R. L., Galperin, M. Y., Natale, D. A. and Koonin, E. V. (2000) The COG database: a tool for genome-scale analysis of protein functions and evolution. Nucleic Acids Research v. 28 n. 1, pp33-36.

[0442] The term “homologous coding nucleic acid” also includes nucleic acids comprising nucleotide sequences which encode polypeptides having at least 99%, 95%, at least 90%, at least 85%, at least 80%, at least 70%, at least 60%, at least 50%, at least 40% or at least 25% maino acid identity or similarity to a polypeptide comprising the amino acid sequence of one of SEQ IDNOs: 3801-3805, 4861-5915, 10013-14110 or to a polypeptpide whose expression is inhibited by a nucleic acid comprising a nucleotide sequence of one of SEQ ID NOs: 8-3795 or fragments comprising at least 5, 10, 15, 20, 25, 30, 35, 40, 50, 75, 100, or 150 consecutive amino acids thereof as determined using the FASTA version 3.0t78 algorithm with the default parameters. Alternatively, protein identity or similarity may be identified using BLASTP with the default parameters, BLASTX with the default parameters, TBLASTN with the default parameters, or tBLASTX with the default parameters. (Altschul, S. F. et al. Gapped BLAST and PSI-BLAST: A New Generation of Protein Database Search Programs, Nucleic Acid Res.

[0443] 25: 3389-3402 (1997), the disclosure of which is incorporated herein by reference in its entirety).

[0444] The term “homologous coding nucleic acid” also includes coding nucleic acids which hybridize under stringent conditions to a nucleic acid selected from the group consisting of the nucleotide sequences complementary to one of SEQ ID NOS.: 3796-3800, 3806-4860, 5916-10012 and coding nucleic acids comprising nucleotide sequences which hybridize under stringent conditions to a fragment comprising at least 10, 15, 20, 25, 30, 35, 40, 50, 75, 100, 150, 200, 300, 400, or 500 consecutive nucleotides of the sequences complementary to one of SEQ ID NOS.: 3796-3800, 3806-4860, 5916-10012 As used herein, “stringent conditions” means hybridization to filter-bound nucleic acid in 6× SSC at about 45° C. followed by one or more washes in 0.1× SSC/0.2% SDS at about 68° C. Other exemplary stringent conditions may refer, e.g., to washing in 6× SSC/0.05% sodium pyrophosphate at 37° C., 48° C., 55° C., and 60° C. as appropriate for the particular probe being used.

[0445] The term “homologous coding nucleic acid” also includes coding nucleic acids comprising nucleotide sequences which hybridize under moderate conditions to a nucleotide sequence selected from the group consisting of the sequences complementary to one of SEQ ID NOS.: 3796-3800, 3806-4860, 5916-10012 and coding nucleic acids comprising nucleotide sequences which hybridize under moderate conditions to a fragment comprising at least 10, 15, 20, 25, 30, 35, 40, 50, 75, 100, 150, 200, 300, 400, or 500 consecutive nucleotides of the sequences complementary to one of SEQ ID NOS.: 3796-3800, 3806-4860, 5916-10012. As used herein, “moderate conditions” means hybridization to filter-bound DNA in 6× sodium chloride/sodium citrate (SSC) at about 45° C. followed by one or more washes in 0.2× SSC/0.1% SDS at about 42-65° C.

[0446] The term “homologous coding nucleic acids” also includes nucleic acids comprising nucleotide sequences which encode a gene product whose activity may be complemented by a gene encoding a gene product whose activity is inhibited by a nucleic acid comprising a nucleotide sequence selected from the group consisting of SEQ ID NOs.: 8-3795. In some embodiments, the homologous coding nucleic acids may encode a gene product whose activity is complemented by the gene product encoded by a nucleic acid comprising a nucleotide sequence selected from the group consisting of SEQ ID NOS.: 3796-3800, 3806-4860, 5916-10012. In other embodiments, the homologous coding nucleic acids may comprise a nucleotide sequence encode a gene product whose activity is complemented by one of the polypeptides of SEQ ID NOs. 3745-4773.

[0447] The term “homologous antisense nucleic acid” includes nucleic acids comprising a nucleotide sequence having at least 97%, at least 95%, at least 90%, at least 85%, at least 80%, or at least 70% nucleotide sequence identity to a nucleotide sequence selected from the group consisting of one of the sequences of SEQ ID NOS. 8-3795 and fragments comprising at least 10, 15, 20, 25, 30, 35, 40, 50, 75, 100, 150, 200, 300, 400, or 500 consecutive nucleotides thereof. Homologous antisense nucleic acids may also comprising nucleotide sequences which have at least 97%, at least 95%, at least 90%, at least 85%, at least 80%, or at least 70% nucleotide sequence identity to a nucleotide sequence selected from the group consisting of the sequences complementary to one of sequences of SEQ ID NOS.: 3796-3800, 3806-4860, 5916-10012 and fragments comprising at least 10, 15, 20, 25, 30, 35, 40, 50, 75, 100, 150, 200, 300, 400, or 500 consecutive nucleotides thereof. Nucleic acid identity may be determined as described above.

[0448] The term “homologous antisense nucleic acid” also includes antisense nucleic acids comprising nucleotide sequences which hybridize under stringent conditions to a nucleotide sequence complementary to one of SEQ ID NOs.: 8-3795 and antisens nucleic acids comprising nucleotide sequences which hybridize under stringent conditions to a fragment comprising at least 10, 15, 20, 25, 30, 35, 40, 50, 75, 100, 150, 200, 300, 400, or 500 consecutive nucleotides of the sequence complementary to one of SEQ ID NOs. 8-3795. Homologous antisense nucleic acids also include antisense nucleic acids comprising nucleotide sequences which hybridize under stringent conditions to a nucleotide sequence selected from the group consisting of SEQ ID NOS.: 3796-3800, 3806-4860, 5916-10012 and antisense nucleic acids comprising nucleotide sequences which hybridize under stringent conditions to a fragment comprising at least 10, 15, 20,25, 30, 35, 40, 50, 75, 100, 150, 200, 300, 400, or 500 consecutive nucleotides of one of SEQ ID NOS.: 3796-3800, 3806-4860, 5916-10012.

[0449] The term “homologous antisense nucleic acid” also includes antisense nucleic acids comprising nucleotide sequences which hybridize under moderate conditions to a nucleotide sequence complementary to one of SEQ ID NOs.: 8-3795 and antisens nucleic acids comprising nucleotide seuqences which hybridize under moderate conditions to a fragment comprising at least 10, 15,20, 25, 30, 35, 40, 50, 75, 100, 150, 200, 300, 400, or 500 consecutive nucleotides of the sequence complementary to one of SEQ ID NOs. 8-3795. Homologous antisense nucleic acids also include antisense nucleic acids comprising nucleotide seuqences which hybridize under moderate conditions to a nucleotide sequence selected from the group consisting of SEQ ID NOS.: 3796-3800, 3806-4860, 5916-10012 and antisense nucleic acids which comprising nucleotide sequences hybridize under moderate conditions to a fragment comprising at least 10, 15, 20, 25, 30, 35, 40, 50, 75, 100, 150, 200, 300, 400, or 500 consecutive nucleotides of one of SEQ ID NOS.: 3796-3800, 3806-4860, 5916-10012.

[0450] By “homologous polypeptide” is meant a polypeptide homologous to a polypeptide whose activity or level is inhibited by a nucleic acid comprising a nucleotide sequence selected from the group consisting of SEQ ID NOs.: 8-3795 or by a homologous antisense nucleic acid. The term “homologous polypeptide” includes polypeptides having at least 99%, 95%, at least 90%, at least 85%, at least 80%, at least 70%, at least 60%, at least 50%, at least 40% or at least 25% amino acid identity or similarity to a polypeptide whose activity or level is inhibited by a nucleic acid selected from the group consisting of SEQ ID NOs: 8-3795 or by a homologous antisense nucleic acid, or polypeptides having at least 99%, 95%, at least 90%, at least 85%, at least 80%, at least 70%, at least 60%, at least 50%, at least 40% or at least 25% amino acid identity or similarity to a polypeptide to a fragment comprising at least 5, 10, 15, 20, 25, 30, 35, 40, 50, 75, 100, or 150 consecutive amino acids of a polypeptide whose activity or level is inhibited by a nucleic acid selected from the group consisting of SEQ ID NOs.: 8-3795 or by a homologous antisense nucleic acid. Identity or similarity may be determined using the FASTA version 3.0t78 algorithm with the default parameters. Alternatively, protein identity or similarity may be identified using BLASTP with the default parameters, BLASTX with the default parameters, or TBLASTN with the default parameters. (Altschul, S. F. et al. Gapped BLAST and PSI-BLAST: A New Generation of Protein Database Search Programs, Nucleic Acid Res. 25: 3389-3402 (1997), the disclosure of which is incorporated herein by reference in its entirety).

[0451] The term homologous polypeptide also includes polypeptides having at least 99%, 95%, at least 90%, at least 85%, at least 80%, at least 70%, at least 60%, at least 50%, at least 40% or at least 25% amino acid identity or similarity to a polypeptide selected from the group consisting of SEQ ID NOs: 3801-3805, 4861-5915, 10013-14110 and polypeptides having at least 99%, 95%, at least 90%, at least 85%, at least 80%, at least 70%, at least 60%, at least 50%, at least 40% or at least 25% amino acid identity or similarity to a fragment comprising at least 5, 10, 15, 20, 25, 30, 35, 40, 50, 75, 100, or 150 consecutive amino acids of a polypeptide selected from the group consisting of SEQ ID NOs: 3801-3805, 4861-5915, 10013-14110.

[0452] The invention also includes polynucleotides, preferably DNA molecules, that hybridize to one of the nucleic acids of SEQ ID NOs.: 8-3795, SEQ ID NOs.: 3796-3800, 3806-4860, 5916-10012 or the complements of any of the preceding nucleic acids. Such hybridization may be under stringent or moderate conditions as defined above or under other conditions which permit specific hybridization. The nucleic acid molecules of the invention that hybridize to these DNA sequences include oligodeoxynucleotides (“oligos”) which hybridize to the target gene under highly stringent or stringent conditions. In general, for oligos between 14 and 70 nucleotides in length the melting temperature (Tm) is calculated using the formula:

Tm(° C.)=81.5+16.6(log[monovalent cations (molar)]+0.41 (% G+C)−(500/N)

[0453] where N is the length of the probe. If the hybridization is carried out in a solution containing formamide, the melting temperature may be calculated using the equation:

Tm(° C.)=81.5+16.6(log[monovalent cations (molar)]+0.41(% G+C)−(0.61) (% formamide)−(500/N)

[0454] where N is the length of the probe. In general, hybridization is carried out at about 20-25 degrees below Tm (for DNA-DNA hybrids) or about 10-15 degrees below Tm (for RNA-DNA hybrids).

[0455] Other hybridization conditions are apparent to those of skill in the art (see, for example, Ausubel, F. M. et al., eds., 1989, Current Protocols in Molecular Biology, Vol. I, Green Publishing Associates, Inc. and John Wiley & Sons, Inc., New York, at pp. 6.3.1-6.3.6 and 2.10.3, the disclosure of which is incorporated herein by reference in its entirety).

[0456] The term, Salmonella, is the generic name for a large group of gram-negative enteric bacteria that are closely related to Escherichia coli. The diseases caused by Salmonella are often due to contamination of foodstuffs or the water supply and affect millions of people each year. Traditional methods of Salmonella taxonomy were based on assigning a separate species name to each serologically distinguishable strain (Kauffmann, F 1966 The bacteriology of the Enterobacteriaceae. Munksgaard, Copenhagen). Serology of Salmonella is based on surface antigens (O [somatic] and H [flagellar]). Over 2,400 serotypes or serovars of Salmonella are known (Popoff, et al. 2000 Res. Microbiol. 151:63-65). Therefore, each serotype was considered to be a separate species and often given names, accordingly (e.g. S. paratyphi, S. typhimurium, S. typhi, S. enteriditis, etc.).

[0457] However, by the 1970s and 1980s it was recognized that this system was not only cumbersome, but also inaccurate. Then, many Salmonella species were lumped into a single species (all serotypes and subgenera I, II, and IV and all serotypes of Arizona) with a second subspecies, S. bongorii also recognized (Crosa, et al., 1973, J. Bacteriol. 115:307-315). Though species designations are based on the highly variable surface antigens, the Salmonella are very similar otherwise with a major exception being pathogenicity determinants.

[0458] There has been some debate on the correct name for the Salmonella species. Currently (Brenner, et al. 2000 J. Clin. Microbiol. 38:2465-2467), the accepted name is Salmonella enterica. S. enterica is divided into six subspecies (I, S. enterica subsp. enterica; II, S. enterica, subsp. salamae; IIIa, S. enterica subsp. arizonae; IIIb, S. enterica subsp. diarizonae; IV, S. enterica subsp. houtenae; and VI, S. enterica subsp. indica). Within subspecies I, serotypes are used to distinguish each of the serotypes or serovars (e.g. S. enterica serotype Enteriditis, S. enterica serotype Typhimurium, S. enterica serotype Typhi, and S. enterica serotype Choleraesuis, etc.). Current convention is to spell this out on first usage (Salmonella enterica ser. Typhimurium) and then use an abbreviated form (Salmonella Typhimurium or S. Typhimurium). Note, the genus and species names (Salmonella enterica) are italicized but not the serotype/serovar name (Typhimurium). Because the taxonomic committees have yet to officially approve of the actual species name, this latter system is what is employed by the CDC (Brenner, et al. 2000 J. Clin. Microbiol. 38:2465-2467). Due to the concerns of both taxonomic priority and medical importance, some of these serotypes might ultimately receive full species designations (S. typhi would be the most notable).

[0459] Therefore, as used herein “Salmonella enterica or S. enterica” includes serovars Typhi, Typhimurium, Paratyphi, Choleraesuis, etc.” However, appeals of the “official” name are in process and the taxonomic designations may change (S. choleraesuis is the species name that could replace S. enterica based solely on priority).

[0460] By “identifying a compound” is meant to screen one or more compounds in a collection of compounds such as a combinatorial chemical library or other library of chemical compounds or to characterize a single compound by testing the compound in a given assay and determining whether it exhibits the desired activity.

[0461] By “inducer” is meant an agent or solution which, when placed in contact with a cell or microorganism, increases transcription, or inhibitor and/or promoter clearance/fidelity, from a desired promoter.

[0462] As used herein, “nucleic acid” means DNA, RNA, or modified nucleic acids. Thus, the terminology “the nucleic acid of SEQ ID NO: X” or “the nucleic acid comprising the nucleotide sequence” includes both the DNA sequence of SEQ ID NO: X and an RNA sequence in which the thymidines in the DNA sequence have been substituted with uridines in the RNA sequence and in which the deoxyribose backbone of the DNA sequence has been substituted with a ribose backbone in the RNA sequence. Modified nucleic acids are nucleic acids having nucleotides or structures which do not occur in nature, such as nucleic acids in which the internucleotide phosphate residues with methylphosphonates, phosphorothioates, phosphoramidates, and phosphate esters. Nonphosphate internucleotide analogs such as siloxane bridges, carbonate brides, thioester bridges, as well as many others known in the art may also be used in modified nucleic acids. Modified nucleic acids may also comprise, (x-anomeric nucleotide units and modified nucleotides such as 1,2-dideoxy-d-ribofuranose, 1,2-dideoxy-1-phenylribofuranose, and N⁴, N⁴-ethano-5-methyl-cytosine are contemplated for use in the present invention. Modified nucleic acids may also be peptide nucleic acids in which the entire deoxyribose-phosphate backbone has been exchanged with a chemically completely different, but structurally homologous, polyamide (peptide) backbone containing 2-aminoethyl glycine units.

[0463] As used herein, “sub-lethal” means a concentration of an agent below the concentration required to inhibit all cell growth.

### BRIEF DESCRIPTION OF THE DRAWINGS

[0464] FIG. 1 is an IPTG dose response curve in E. coli transformed with an IPTG-inducible plasmid containing either an antisense clone to the E. coli ribosomal protein rplW (AS-rplW) which is required for protein synthesis and essential for cell proliferation, or an antisense clone to the elaD (AS-elaD) gene which is not known to be involved in protein synthesis and which is also essential for proliferation.

[0465] FIG. 2A is a tetracycline dose response curve in E. coli transformed with an IPTG-inducible plasmid containing antisense to rplW (AS-rplW) in the absence (0) or presence of IPTG at concentrations that result in 20% and 50% growth inhibition.

[0466] FIG. 2B is a tetracycline dose response curve in E. coli transformed with an IPTG-inducible plasmid containing antisense to elaD (AS-elaD)in the absence (0) or presence of IPTG at concentrations that result in 20% and 50% growth inhibition.

[0467] FIG. 3 is a graph showing the fold increase in tetracycline sensitivity of E. coli transfected with antisense clones to essential ribosomal proteins L23 (AS-rplW) and L7/L12 and L10 (AS-rplLrplJ). Antisense clones to genes known to not be directly involved in protein synthesis, atpB/E (AS-atpB/E), visC (AS-visC), elaD (AS-elaD), yohH (AS-yohH), are much less sensitive to tetracycline.

[0468] FIG. 4 illustrates the results of an assay in which Staphylococcus aureus cells transcribing an antisense nucleic acid complementary to the gyrB gene encoding the β subunit of gyrase were contacted with several antibiotics whose targets were known.

### DETAILED DESCRIPTION OF THE PREFERRED EMBODIMENTS

[0469] The present invention describes a group of prokaryotic genes and gene families required for cellular proliferation. Exemplary genes and gene families from Staphylococcus aureus, Salmonella typhimurium, Klebsiella pneumoniae, Pseudomonas aeruginosa and Enterococcus faecalis, Escherichia coli, Enterococcus faecalis, Haemophilus influenzae, Helicobacter pylori, Klebsiella pneumoniae, Pseudomonas aeruginosa, Staphylococcus aureus, and Salmonella typhi are provided. A proliferation-required gene or gene family is one where, in the absence or substantial reduction of a gene transcript and/or gene product, growth or viability of the cell or microorganism is reduced or eliminated. Thus, as used herein, the terminology “proliferation-required” or “required for proliferation” encompasses instances where the absence or substantial reduction of a gene transcript and/or gene product completely eliminates cell growth as well as instances where the absence of a gene transcript and/or gene product merely reduces cell growth. These proliferation-required genes can be used as potential targets for the generation of new antimicrobial agents. To achieve that goal, the present invention also encompasses assays for analyzing proliferation-required genes and for identifying compounds which interact with the gene and/or gene products of the proliferation-required genes. In addition, the present invention contemplates the expression of genes and the purification of the proteins encoded by the nucleic acid sequences identified as required proliferation genes and reported herein. The purified proteins can be used to generate reagents and screen small molecule libraries or other candidate compound libraries for compounds that can be further developed to yield novel antimicrobial compounds.

[0470] The present invention also describes methods for identification of nucleotide sequences homologous to these genes and polypeptides described herein, including nucleic acids comprising nucleotide sequences homologous to the nucleic acids of SEQ ID NOS.: 3796-3800, 3806-4860, 5916-10012 and polypeptides homologous to the polypeptides of SEQ ID NOs.: 3801-3805, 4861-5915, 10013-14110. For example, these sequences may be used to identify homologous coding nucleic acids, homologous antisense nucleic acids, or homologous polypeptides in microorganisms such as Anaplasma marginale, Aspergillus fumigatus, Bacillus anthracis, Bacterioides fragilis Bordetella pertussis, Burkholderia cepacia, Campylobacter jejuni, Candida albicans, Candida glabrata (also called Torulopsis glabrata), Candida tropicalis, Candida parapsilosis, Candida guilliermondii, Candida krusei, Candida kefyr (also called Candida pseudotropicalis), Candida dubliniensis, Chlamydia pneumoniae, Chlamydia trachomatus, Clostridium botulinum, Clostridium difficile, Clostridium perfringens, Coccidiodes immitis, Corynebacterium diptheriae, Cryptococcus neoformans, Enterobacter cloacae, Enterococcus faecalis, Enterococcus faecium, Escherichia coli, Haemophilus influenzae, Helicobacter pylori, Histoplasma capsulatum, Klebsiella pneumoniae, Listeria monocytogenes, Mycobacterium leprae, Mycobacterium tuberculosis, Neisseria gonorrhoeae, Neisseria meningitidis, Nocardia asteroides, Pasteurella haemolytica, Pasteurella multocida, Pneumocystis carinii, Proteus vulgaris, Pseudomonas aeruginosa, Salmonella bongori, Salmonella cholerasuis, Salmonella enterica, Salmonella paratyphi, Salmonella typhi, Salmonella typhimurium, Staphylococcus aureus, Listeria monocytogenes, Moxarella catarrhalis, Shigella boydii, Shigella dysenteriae, Shigella flexneri, Shigella sonnei, Staphylococcus epidermidis, Streptococcus pneumoniae, Streptococcus mutans, Treponema pallidum, Yersinia enterocolitica, Yersinia pestis or any species falling within the genera of any of the above species. In some embodiments, the homologous coding nucleic acids, homologus antisense nucleic acids, or homologous polypeptides are identified in an organism other than E. coli.

[0471] The homologous coding nucleic acids, homologous antisense nucleic acids, or homologous polypeptides, may then be used in each of the methods described herein, including methods to identify compounds which inhibit the proliferation of the organism containing the homologous coding nucleic acid, homologous antisense nucleic acid or homologous polypeptide, methods of inhibiting the growth of the organism containing the homologous coding nucleic acid, homologus antisense nucleic acid or homologous polypeptide, methods of identifying compounds which influence the activity or level of a gene product required for proliferation of the organism containing the homologous coding nucleic acid, homologous antisense nucleic acid or homologous polypeptide, methods for identifying compounds or nucleic acids having the ability to reduce the level or activity of a gene product required for proliferation of the organism containing the homologous coding nucleic acid, homologous antisense nucleic acid or homologous polypeptide, methods of inhibiting the activity or expression of a gene in an operon required for proliferation of the organism containing the homologous coding nucleic acid, homologous antisense nucleic acid or homologous polypeptide, methods for identifying a gene required proliferation of the organism containing the homologous coding nucleic acid, homologous antisense nucleic acid or homologous polypeptide, methods for identifying the biological pathway in which a gene or gene product required for proliferation of the organism containing the homologous coding nucleic acid, homologous antisense nucleic acid or homologous polypeptide lies, methods for identifying compounds having activity against biological pathway required for proliferation of the organism containing the homologous coding nucleic acid, homologous antisense nucleic acid or homologous polypeptide, methods for determining the biological pathway on which a test compound acts, and methods of inhibiting the proliferation of the organism containing the homologous coding nucleic acid, homologous antisense nucleic acid or homologous polypeptide in a subject. In some embodiments of the present invention, the methods are performed using an organism, other than E. coli or a gene or gene product from an organism other than E. coli.

[0472] The present invention utilizes a novel method to identify proliferation-required sequences. Generally, a library of nucleic acid sequences from a given source are subcloned or otherwise inserted immediately downstream of an inducible promoter on an appropriate vector, such as a Staphylococcus aureus/E. coli or Pseudomonas aeruginosa/E. coli shuttle vector, or a vector which will replicate in both Salmonella typhimurium and Klebsiella pneumoniae, or other vector or shuttle vector capable of functioning in the intended organism., thus forming an expression library. It is generally preferred that expression is directed by a regulatable promoter sequence such that expression level can be adjusted by addition of variable concentrations of an inducer molecule or of an inhibitor molecule to the medium. Temperature activated promoters, such as promoters regulated by temperature sensitive repressors, such as the lambda C₁₈₅₇ repressor, are also envisioned. Although the insert nucleic acids may be derived from the chromosome of the cell or microorganism into which the expression vector is to be introduced, because the insert is not in its natural chromosomal location, the insert nucleic acid is an exogenous nucleic acid for the purposes of the discussion herein. The term “expression” is defined as the production of a sense or antisense RNA molecule from a gene, gene fragment, genomic fragment, chromosome, operon or portion thereof. Expression can also be used to refer to the process of peptide or polypeptide synthesis. An expression vector is defined as a vehicle by which a ribonucleic acid (RNA) sequence is transcribed from a nucleic acid sequence carried within the expression vehicle. The expression vector can also contain features that permit translation of a protein product from the transcribed RNA message expressed from the exogenous nucleic acid sequence carried by the expression vector. Accordingly, an expression vector can produce an RNA molecule as its sole product or the expression vector can produce a RNA molecule that is ultimately translated into a protein product.

[0473] Once generated, the expression library containing the exogenous nucleic acid sequences is introduced into a population of cells (such as the organism from which the exogenous nucleic acid sequences were obtained) to search for genes that are required for bacterial proliferation. Because the library molecules are foreign, in context, to the population of cells, the expression vectors and the nucleic acid segments contained therein are considered exogenous nucleic acid.

[0474] Expression of the exogenous nucleic acid fragments in the test population of cells containing the expression library is then activated. Activation of the expression vectors consists of subjecting the cells containing the vectors to conditions that result in the expression of the exogenous nucleic acid sequences carried by the expression library. The test population of cells is then assayed to determine the effect of expressing the exogenous nucleic acid fragments on the test population of cells. Those expression vectors that negatively impacted the growth of the cells upon induction of expression of the random sequences contained therein were identified, isolated, and purified for further study.

[0475] A variety of assays are contemplated to identify nucleic acid sequences that negatively impact growth upon expression. In one embodiment, growth in cultures expressing exogenous nucleic acid sequences and growth in cultures not expressing these sequences is compared. Growth measurements are assayed by examining the extent of growth by measuring optical densities. Alternatively, enzymatic assays can be used to measure bacterial growth rates to identify exogenous nucleic acid sequences of interest. Colony size, colony morphology, and cell morphology are additional factors used to evaluate growth of the host cells. Those cultures that fail to grow or grow at a reduced rate under expression conditions are identified as containing an expression vector encoding a nucleic acid fragment that negatively affects a proliferation-required gene.

[0476] Once exogenous nucleic acids of interest are identified, they are analyzed. The first step of the analysis is to acquire the nucleotide sequence of the nucleic acid fragment of interest. To achieve this end, the insert in those expression vectors identified as containing a nucleotide sequence of interest is sequenced, using standard techniques well known in the art. The next step of the process is to determine the source of the nucleotide sequence. As used herein “source” means the genomic region containing the cloned fragment.

[0477] Determination of the gene(s) corresponding to the nucleotide sequence was achieved by comparing the obtained sequence data with databases containing known protein and nucleotide sequences from various microorganisms. Thus, initial gene identification was made on the basis of significant sequence similarity or identity to either characterized or predicted Staphylococcus aureus, Salmonella typhimurium, Klebsiella pneumoniae, Pseudomonas aeruginosa or Enterococcus faecalis genes or their encoded proteins and/or homologues in other species.

[0478] The number of nucleotide and protein sequences available in database systems has been growing exponentially for years. For example, the complete nucleotide sequences of Caenorhabditis elegans and several bacterial genomes, including E. coli, Aeropyrum pernix, Aquifex aeolicus, Archaeoglobus fulgidus, Bacillus subtilis, Borrelia burgdorferi, Chlamydia pneumoniae, Chlamydia trachomatis, Clostridium tetani, Corynebacterium diptheria, Deinococcus radiodurans, Haemophilus influenzae, Helicobacter pylori 26695, Helicobacter pylori J99, Methanobacterium thermoautotrophicum, Methanococcus jannaschii, Mycobacterium tuberculosis, Mycoplasma genitalium, Mycoplasma pneumoniae, Pseudomonas aeruginosa, Pyrococcus abyssi, Pyrococcus horikoshii, Rickettsia prowazekii, Synechocystis PCC6803, Thermotoga maritima, Treponema pallidum, Bordetella pertussis, Campylobacter jejuni, Clostridium acetobutylicum, Mycobacterium tuberculosis CSU#93, Neisseria gonorrhoeae, Neisseria meningitidis, Pseudomonas aeruginosa, Pyrobaculum aerophilum, Pyrococcus furiosus, Rhodobacter capsulatus, Salmonella typhimurium, Streptococcus mutans, Streptococcus pyogenes, Ureaplasma urealyticum and Vibrio cholera are available. This nucleotide sequence information is stored in a number of databanks, such as GenBank, the National Center for Biotechnology Information (NCBI), the Genome Sequencing Center (http:Hlgenome.wustl.edu/gsc/salmonella.shtml), and the Sanger Centre (http://www.sanger.ac.uk/projects/S_typhi) which are publicly available for searching.

[0479] A variety of computer programs are available to assist in the analysis of the sequences stored within these databases. FASTA, (W. R. Pearson (1990) “Rapid and Sensitive Sequence Comparison with FASTP and FASTA” Methods in Enzymology 183:63-98), Sequence Retrieval System (SRS), (Etzold & Argos, SRS an indexing and retrieval tool for flat file data libraries. Comput. Appl. Biosci. 9:49-57, 1993) are two examples of computer programs that can be used to analyze sequences of interest. In one embodiment of the present invention, the BLAST family of computer programs, which includes BLASTN version 2.0 with the default parameters, or BLASTX version 2.0 with the default parameters, is used to analyze nucleotide sequences.

[0480] BLAST, an acronym for “Basic Local Alignment Search Tool,” is a family of programs for database similarity searching. The BLAST family of programs includes: BLASTN, a nucleotide sequence database searching program, BLASTX, a protein database searching program where the input is a nucleic acid sequence; and BLASTP, a protein database searching program. BLAST programs embody a fast algorithm for sequence matching, rigorous statistical methods for judging the significance of matches, and various options for tailoring the program for special situations. Assistance in using the program can be obtained by e-mail at blastincbi.nlm.nih.gov. tBLASTX can be used to translate a nucleotide sequence in all three potential reading frames into an amino acid sequence.

[0481] Bacterial genes are often transcribed in polycistronic groups. These groups comprise operons, which are a collection of genes and intergenic sequences under common regulation. The genes of an operon are transcribed on the same MRNA and are often related functionally. Given the nature of the screening protocol, it is possible that the identified exogenous nucleic acid corresponds to a gene or portion thereof with or without adjacent noncoding sequences, an intragenic sequence (i.e. a sequence within a gene), an intergenic sequence (i.e. a sequence between genes), a nucleotide sequence spanning at least a portion of two or more genes, a 5′ noncoding region or a 3′ noncoding region located upstream or downstream from the actual nucleotide sequence that is required for bacterial proliferation. Accordingly, it is often desirable to determine which gene(s) that is encoded within the operon is individually required for proliferation.

[0482] In one embodiment of the present invention, an operon is identified and then dissected to determine which gene or genes are required for proliferation. Operons can be identified by a variety of means known to those in the art. For example, the RegulonDB DataBase described by Huerta et al. (Nucl. Acids Res. 26:55-59, 1998), which may also be found on the website http://www.cifn.unam.mx/Computational_Biology/regulondb/, the disclosures of which are incorporated herein by reference in their entireties, provides information about operons in Escherichia coli. The Subtilist database (http://bioweb.pasteur.fr/GenoList/SubtiList), (Moszer, I., Glaser, P. and Danchin, A. (1995) Microbiology 141: 261-268 and Moszer, 1 (1998) FEBS Letters 430: 28-36, the disclosures of which are incorporated herein in their entireties), may also be used to predict operons. This database lists genes from the fully sequenced, Gram-positive bacteria, Bacillus subtilis, together with predicted promoters and terminator sites. This information can be used in conjunction with the Staphylococcus aureus genomic sequence data to predict operons and thus produce a list of the genes affected by the antisense nucleic acids of the present invention. The Pseudomonas aerginosa web site (http://www.pseudomonas.com) can be used to help predict operon organization in this bacterium. The databases available from the Genome Sequencing Center (http:/Hgenome.wustl.edu/gsc/salmonella.shtml), and the Sanger Centre (http:/Hwww.sanger.ac.uk/projects/S typhi) may be used to predict operons in Salmonella typhimurium. The TIGR microbial database has an incomplete version of the E. faecalis genome http://www.tigr.org/cgi-bin/BlastSearch/blast.cai?organism=_e faecalis. One can take a nucleotide sequence and BLAST it for homologs.

[0483] A number of techniques that are well known in the art can be used to dissect the operon. Analysis of RNA transcripts by Northern blot or primer extension techniques are commonly used to analyze operon transcripts. In one aspect of this embodiment, gene disruption by homologous recombination is used to individually inactivate the genes of an operon that is thought to contain a gene required for proliferation.

[0484] Several gene disruption techniques have been described for the replacement of a functional gene with a mutated, non-functional (null) allele. These techniques generally involve the use of homologous recombination. One technique using homologous recombination in Staphylococcus aureus is described in Xia et a. 1999, Plasmid 42: 144-149, the disclosure of which is incorporated herein by reference in its entirety. This technique uses crossover PCR to create a null allele with an in-frame deletion of the coding region of a target gene. The null allele is constructed in such a way that nucleotide sequences adjacent to the wild type gene are retained. These homologous sequences surrounding the deletion null allele provide targets for homologous recombination so that the wild type gene on the Staphylococcus aureus chromosome can be replaced by the constructed null allele. This method can be used with other bacteria as well, including Salmonella and Klebsiella species. Similar gene disruption methods that employ the counter selectable marker sacb (Schweizer, H. P., Klassen, T. and Hoang, T. (1996) Mol. Biol. of Pseudomonas. ASM press, 229-237, the disclosure of which is incorporated herein by reference in its entirety) are available for Pseudomonas, Salmonella and Klebsiella species. E. faecalis genes can be disrupted by recombining in a non-replicating plasmid that contains an internal fragment to that gene (Leboeuf, C., L. Leblanc, Y. Auffray and A. Hartke. 2000. J. Bacteriol. 182:5799-5806, the disclosure of which is incorporated herein by reference in its entirety).

[0485] The crossover PCR amplification product is subcloned into a suitable vector having a selectable marker, such as a drug resistance marker. In some embodiments the vector may have an origin of replication which is functional in E. coli or another organism distinct from the organism in which homologous recombination is to occur, allowing the plasmid to be grown in E. coli or the organism other than that in which homologous recombination is to occur, but may lack an origin of replication functional in Staphylococcus aureus, Salmonella typhimurium, Klebsiella pneumoniae, Pseudomonas aeruginosa and Enterococcus faecalis, Escherichia coli, Enterococcus faecalis, Haemophilus influenzae, Helicobacter pylori, Klebsiella pneumoniae, Pseudomonas aeruginosa, Staphylococcus aureus, or Salmonella typhi such that selection of the selectable marker requires integration of the vector into the homologous region of the Staphylococcus aureus, Salmonella typhimurium, Klebsiella pneumoniae, Pseudomonas aeruginosa and Enterococcus faecalis, Escherichia coli, Enterococcus faecalis, Haemophilus influenzae, Helicobacter pylori, Klebsiella pneumoniae, Pseudomonas aeruginosa, Staphylococcus aureus, or Salmonella typhi chromosome. Usually a single crossover event is responsible for this integration event such that the Staphylococcus aureus, Salmonella typhimurium, Klebsiella pneumoniae, Pseudomonas aeruginosa and Enterococcus faecalis, Escherichia coli, Enterococcus faecalis, Haemophilus influenzae, Helicobacter pylori, Klebsiella pneumoniae, Pseudomonas aeruginosa, Staphylococcus aureus, or Salmonella typhi chromosome now contains a tandem duplication of the target gene consisting of one wild type allele and one deletion null allele separated by vector sequence. Subsequent resolution of the duplication results in both removal of the vector sequence and either restoration of the wild type gene or replacement by the in-frame deletion. The latter outcome will not occur if the gene should prove essential. A more detailed description of this method is provided in Example 5 below. It will be appreciated that this method may be practiced with any of the nucleic acids or organisms described herein.

[0486] Recombinant DNA techniques can be used to express the entire coding sequences of the gene identified as required for proliferation, or portions thereof. The over-expressed proteins can be used as reagents for further study. The identified exogenous sequences are isolated, purified, and cloned into a suitable expression vector using methods well known in the art. If desired, the nucleic acids can contain the nucleotide sequences encoding a signal peptide to facilitate secretion of the expressed protein.

[0487] Expression of fragments of the bacterial genes identified as required for proliferation is also contemplated by the present invention. The fragments of the identified genes can encode a polypeptide comprising at least 5, at least 10, at least 15, at least 20, at least 25, at least 30, at least 35, at least 40, at least 45, at least 50, at least 55, at least 60, at least 65, at least 75, or more than 75 consecutive amino acids of a gene complementary to one of the identified sequences of the present invention. The nucleic acids inserted into the expression vectors can also contain endogenous sequences upstream and downstream of the coding sequence.

[0488] When expressing the encoded protien of the idnetified required for bacterial proliferation or a fragment thereof, the nucleotide sequence to be expressed is operably linked to a promoter in an expression vector using conventional cloning technology. The expression vector can be any of the bacterial, insect, yeast, or mammalian expression systems known in the art. Commercially available vectors and expression systems are available from a variety of suppliers including Genetics Institute (Cambridge, Mass.), Stratagene (La Jolla, Calif.), Promega (Madison, Wis.), and Invitrogen (San Diego, Calif.). If desired, to enhance expression and facilitate proper protein folding, the codon usage and codon bias of the sequence can be optimized for the particular expression organism in which the expression vector is introduced, as explained by Hatfield, et al., U.S. Pat. No. 5,082,767, incorporated herein by this reference. Fusion protein expression systems are also contemplated by the present invention.

[0489] Following expression of the protein encoded by the identified exogenous nucleic acid, the protein may be purified. Protein purification techniques are well known in the art. Proteins encoded and expressed from identified exogenous nucleic acids can be partially purified using precipitation techniques, such as precipitation with polyethylene glycol. Alternatively, epitope tagging of the protein can be used to allow simple one step purification of the protein. In addition, chromatographic methods such as ion-exchange chromatography, gel filtration, use of hydroxyapaptite columns, immobilized reactive dyes, chromatofocusing, and use of high-performance liquid chromatography, may also be used to purify the protein. Electrophoretic methods such as one-dimensional gel electrophoresis, high-resolution two-dimensional polyacrylamide electrophoresis, isoelectric focusing, and others are contemplated as purification methods. Also, affinity chromatographic methods, comprising antibody columns, ligand presenting columns and other affinity chromatographic matrices are contemplated as purification methods in the present invention.

[0490] The purified proteins produced from the gene coding sequences identified as required for proliferation can be used in a variety of protocols to generate useful antimicrobial reagents. In one embodiment of the present invention, antibodies are generated against the proteins expressed from the identified exogenous nucleic acids. Both monoclonal and polyclonal antibodies can be generated against the expressed proteins. Methods for generating monoclonal and polyclonal antibodies are well known in the art. Also, antibody fragment preparations prepared from the produced antibodies discussed above are contemplated.

[0491] In addition, the purified protein, fragments thereof, or derivatives thereof may be administered to an individual in a pharmaceutically acceptable carrier to induce an immune response against the protein. Preferably, the immune response is a protective immune response which protects the individual. Methods for determining appropriate dosages of the protein and pharmaceutically acceptable carriers may be determined empiracally and are familiar to those skilled in the art.

[0492] Another application for the purified proteins of the present invention is to screen small molecule libraries for candidate compounds active against the various target proteins of the present invention. Advances in the field of combinatorial chemistry provide methods, well known in the art, to produce large numbers of candidate compounds that can have a binding, or otherwise inhibitory effect on a target protein. Accordingly, the screening of small molecule libraries for compounds with binding affinity or inhibitory activity for a target protein produced from an identified gene is contemplated by the present invention.

[0493] The present invention further contemplates utility against a variety of other pathogenic microorganisms in addition to Staphylococcus aureus, Salmonella typhimurium, Klebsiella pneumoniae, Pseudomonas aeruginosa and Enterococcus faecalis, Escherichia coli, Enterococcus faecalis, Haemophilus influenzae, Helicobacter pylori, Klebsiella pneumoniae, Pseudomonas aeruginosa, Staphylococcus aureus, or Salmonella typhi. For example, homologous coding nucleic acids, homologous antisense nucleic acids or homologous polypeptides from other pathogenic microorganisms (including nucleic acids homologous to the nucleic acids of SEQ ID NOs.: 3796-3800, 3806-4860, 5916-10012, nucleic acids homologous to the antisense nucleic acids of SEQ ID NOs.: 8-3795, and polypeptides homologous to the polypeptides of SEQ ID NOs.: 3801-3805, 4861-5915, 10013-14110) may be identified using methods such as those described herein. The homologous coding nucleic acids, homologous antisense nucleic acids or homologous polypeptides may be used to identify compounds which inhibit the proliferation of these other pathogenic microorganisms using methods such as those described herein.

[0494] For example, the proliferation-required nucleic acids, antisense nucleic acids, and polypeptides from Staphylococcus aureus, Salmonella typhimurium, Klebsiella pneumoniae, Pseudomonas aeruginosa and Enterococcus faecalis, Escherichia coli, Enterococcus faecalis, Haemophilus influenzae, Helicobacter pylori, Klebsiella pneumoniae, Pseudomonas aeruginosa, Staphylococcus aureus, or Salmonella typhi described herein (including the nucleic acids of SEQ ID NOs.: 3796-3800, 3806-4860, 5916-10012, the antisense nucleic acids of SEQ ID NOs: 8-3795, and the polypeptides of SEQ ID NOs.: 3801-3805, 4861-5915, 10013-14110) may be used to identify homologous coding nucleic acids, homologous antisense nucleic acids or homologous polypeptides required for proliferation in prokaryotes and eukaryotes. For example, nucleic acids or polypeptides required for the proliferation of protists, such as Plasmodium spp.; plants; animals, such as Entamoeba spp. and Contracaecum spp; and fungi including Candida spp., (e.g., Candida albicans), Cryptococcus neoformans, and Aspergillus fumigatus may be identified. In one embodiment of the present invention, monera, specifically bacteria, including both Gram positive and Gram negative bacteria, are probed in search of novel gene sequences required for proliferation. Likewise, homologous antisense nucleic acids which may be used to inhibit growth of these organisms or to identify antibiotics may also be identified. These embodiments are particularly important given the rise of drug resistant bacteria.

[0495] The number of bacterial species that are becoming resistant to existing antibiotics is growing. A partial list of these microorganisms includes: Escherichia spp., such as E. coli, Enterococcus spp, such as E. faecalis; Pseudomonas spp., such as P. aeruginosa, Clostridium spp., such as C. botulinum, Haemophilus spp., such as H. influenzae, Enterobacter spp., such as E. cloacae, Vibrio spp., such as V. cholera; Moraxala spp., such as M. catarrhalis; Streptococcus spp., such as S. pneumoniae, Neisseria spp., such as N. gonorrhoeae; Mycoplasma spp., such as Mycoplasma pneumoniae; Salmonella typhimurium; Helicobacter pylori; Escherichia coli; and Mycobacterium tuberculosis. The genes and polypeptides identified as required for the proliferation of Staphylococcus aureus, Salmonella typhimurium, Klebsiella pneumoniae, Pseudomonas aeruginosa and Enterococcus faecalis, Escherichia coli, Enterococcus faecalis, Haemophilus influenzae, Helicobacter pylori, Klebsiella pneumoniae, Pseudomonas aeruginosa, Staphylococcus aureus, or Salmonella typhi (including the nucleic acids of SEQ ID NOs.: 3796-3800, 3806-4860, 5916-10012, the sequences complementary to the nucleic acids of SEQ ID NOs.: 3796-3800, 3806-4860, 5916-10012, and the polypeptides of SEQ ID NOs.: 3801-3805, 4861-5915, 10013-14110) can be used to identify homologous coding nucleic acids or homologous polypeptides required for proliferation from these and other organisms using methods such as nucleic acid hybridization and computer database analysis. Likewise, the antisense nucleic acids which inhibit proliferation of Staphylococcus aureus, Salmonella typhimurium, Klebsiella pneumoniae, Pseudomonas aeruginosa and Enterococcus faecalis, Escherichia coli, Enterococcus faecalis, Haemophilus influenzae, Helicobacter pylori, Klebsiella pneumoniae, Pseudomonas aeruginosa, Staphylococcus aureus, or Salmonella typhi (including the antisense nucleic acids of SEQ ID NOs.: 8-3795 or the sequences complementary thereto) may also be used to identify antisense nucleic acids which inhibit proliferation of these and other microorganisms or cells using nucleic acid hybridization or computer database analysis.

[0496] In one embodiment of the present invention, the nucleic acid sequences from Staphylococcus aureus, Salmonella typhimurium, Klebsiella pneumoniae, Pseudomonas aeruginosa and Enterococcus faecalis, Escherichia coli, Enterococcus faecalis, Haemophilus influenzae, Helicobacter pylori, Klebsiella pneumoniae, Pseudomonas aeruginosa, Staphylococcus aureus, or Salmonella typhii (including the nucleic acids of SEQ ID NOs.: 3796-3800, 3806-4860, 5916-10012 and the antisense nucleic acids of SEQ ID NOs. 8-3795) are used to screen genomic libraries generated from Staphylococcus aureus, Salmonella typhimurium, Klebsiella pneumoniae, Pseudomonas aeruginosa and Enterococcus faecalis, Escherichia coli, Enterococcus faecalis, Haemophilus influenzae, Helicobacter pylori, Klebsiella pneumoniae, Pseudomonas aeruginosa, Staphylococcus aureus, or Salmonella typhi and other bacterial species of interest. For example, the genomic library may be from Gram positive bacteria, Gram negative bacteria or other organisms including Anaplasma marginale, Aspergillus fumigatus, Bacillus anthracis, Bacterioides fragilis Bordetella pertussis, Burkholderia cepacia, Campylobacter jejuni, Candida albicans, Candida glabrata (also called Torulopsis glabrata), Candida tropicalis, Candida parapsilosis, Candida guilliermondii, Candida krusei, Candida kefyr (also called Candida pseudotropicalis), Candida dubliniensis, Chlamydia pneumoniae, Chlamydia trachomatus, Clostridium botulinum, Clostridium difficile, Clostridium perfringens, Coccidiodes immitis, Corynebacterium diptheriae, Cryptococcus neoformans, Enterobacter cloacae, Enterococcus faecalis, Enterococcus faecium, Escherichia coli, Haemophilus influenzae, Helicobacter pylori, Histoplasma capsulatum, Klebsiella pneumoniae, Listeria monocytogenes, Mycobacterium leprae, Mycobacterium tuberculosis, Neisseria gonorrhoeae, Neisseria meningitidis, Nocardia asteroides, Pasteurella haemolytica, Pasteurella multocida, Pneumocystis carinii, Proteus vulgaris, Pseudomonas aeruginosa, Salmonella bongori, Salmonella cholerasuis, Salmonella enterica, Salmonella paratyphi, Salmonella typhi, Salmonella typhimurium, Staphylococcus aureus, Listeria monocytogenes, Moxarella catarrhalis, Shigella boydii, Shigella dysenteriae, Shigella flexneri, Shigella sonnei, Staphylococcus epidermidis, Streptococcus pneumoniae, Streptococcus mutans, Treponema pallidum, Yersinia enterocolitica, Yersinia pestis or any species falling within the genera of any of the above species, including coagulase negative species of Staphylococcus. In some embodiments, the genomic library may be from an organism other than E. coli. Standard molecular biology techniques are used to generate genomic libraries from various cells or microorganisms. In one aspect, the libraries are generated and bound to nitrocellulose paper. The identified exogenous nucleic acid sequences of the present invention can then be used as probes to screen the libraries for homologous sequences.

[0497] For example, the libraries may be screened to identify homologous coding nucleic acids or homologous antisense nucleic acids comprising nucleotide sequences which hybridize under stringent conditions to a nucleic acid selected from the group consisting of SEQ ID NOs.: 8-3795, nucleic acids comprising nucleotide sequences which hybridize under stringent conditions to a fragment comprising at least 10, 15, 20, 25, 30, 35, 40, 50, 75, 100, 150, 200,300, 400, or 500 consecutive nucleotides of one of SEQ ID .NOs. 8-3795, nucleic acids comprising nucleotide sequences which hybridize under stringent conditions to a nucleic acid complementary to one of SEQ ID NOs. 8-3795, nucleic acids comprising nucleotide sequences which hybridize under stringent conditions to a fragment comprising at least 10, 15, 20, 25, 30, 35, 40, 50, 75, 100, 150, 200, 300, 400, or 500 consecutive nucleotides of the sequence complementary to one of SEQ ID NOs. 8-3795, nucleic acids comprising nucleotide sequences which hybridize under stringent conditions to a nucleic acid selected from the group consisting of SEQ ID NOS.: 3796-3800, 3806-4860, 5916-10012, nucleic acids comprising nucleotide sequences which hybridize under stringent conditions to a fragment comprising at least 10, 15, 20, 25, 30, 35, 40, 50, 75, 100, 150, 200, 300, 400, or 500 consecutive nucleotides of one of SEQ ID NOS.: 3796-3800, 3806-4860, 5916-10012, nucleic acids comprising nucleotide sequences which hybridize under stringent conditions to a nucleic acid complementary to one of SEQ ID NOS.: 3796-3800, 3806-4860, 5916-10012, nucleic acids comprising nucleotide sequences which hybridize under stringent conditions to a fragment comprising at least 10, 15, 20, 25, 30, 35, 40, 50, 75, 100, 150, 200, 300,400, or 500 consecutive nucleotides of the sequence complementary to one of SEQ ID NOS.: 3796-3800, 3806-4860, 5916-10012, nucleic acids comprising nucleotide sequences which hybridize under stringent conditions to a nucleic acid selected from the group consisting of SEQ ID NOS.: 3796-3800, 3806-4860, 5916-10012, and nucleic acids comprising nucleotide sequences which hybridize under stringent conditions to a fragment comprising at least 10, 15, 20, 25, 30, 35, 40, 50, 75, 100, 150, 200, 300, 400, or 500 consecutive nucleotides of one of SEQ ID NOS.: 3796-3800, 3806-4860, 5916-10012.

[0498] The libraries may also be screened to identify homologous nucleic coding nucleic acids or homologous antisense nucleic acids comprising nucleotide sequences which hybridize under moderate conditions to a nucleic acid selected from the group consisting of SEQ ID NOs.: 8-3795, nucleic acids comprising nucleotide sequences which hybridize under moderate conditions to a fragment comprising at least 10, 15, 20, 25, 30, 35, 40, 50, 75, 100, 150, 200, 300, 400, or 500 consecutive nucleotides of one of SEQ ID NOs. 8-3795, nucleic acids comprising nucleotide sequences which hybridize under moderate conditions to a nucleic acid complementary to one of SEQ ID NOs. 8-3795, nucleic acids comprising nucleotide sequences which hybridize under moderate conditions to a fragment comprising at least 10, 15, 20, 25, 30, 35, 40, 50, 75, 100, 150, 200, 300, 400, or 500 consecutive nucleotides of the sequence complementary to one of SEQ ID NOs. 8-3795, nucleic acids comprising nucleotide sequences which hybridize under moderate conditions to a nucleic acid selected from the group consisting of SEQ ID NOS.: 3796-3800, 3806-4860, 5916-10012, nucleic acids comprising nucleic acid sequences which hybridize under moderate conditions to a fragment comprising at least 10, 15, 20, 25, 30, 35, 40, 50, 75, 100, 150,200, 300, 400, or 500 consecutive nucleotides of one of SEQ ID NOS.: 3796-3800, 3806-4860, 5916-10012, nucleic acids comprising nucleotide sequences which hybridize under moderate conditions to a nucleic acid complementary to one of SEQ ID NOS.: 3796-3800, 3806-4860, 5916-10012 and nucleic acids comprising nucleotide sequences which hybridize under moderate conditions to a fragment comprising at least 10, 15, 20,25, 30, 35, 40, 50, 75, 100, 150, 200, 300, 400, or 500 consecutive nucleotides of the sequence complementary to one of SEQ ID NOS.: 3796-3800, 3806-4860, 5916-10012.

[0499] The homologous nucleic coding nucleic acids, homologous antisense nucleic acids or homologous polypeptides identified as above can then be used as targets or tools for the identification of new, antimicrobial compounds using methods such as those described herein. In some embodiments, the homologous coding nucleic acids, homologous antisense nucleic acids, or homologous polypeptides may be used to identify compounds with activity against more than one microorganism.

[0500] For example, the preceding methods may be used to isolate homologous coding nucleic acids or homologous antisense nucleic acids comprising a nucleotide sequence with at least 97%, at least 95%, at least 90%, at least 85%, at least 80%, or at least 70% nucleotide sequence identity to a nucleotide sequence selected from the group consisting of one of the sequences of SEQ ID NOS. 8-3795, fragments comprising at least 10, 15, 20, 25, 30, 35, 40, 50, 75, 100, 150, 200, 300, 400, or 500 consecutive nucleotides thereof, and the sequences complementary thereto. The preceding methods may also be used to isolate homologous coding nucleic acids or homologous antisense nucleic acids comprising a nucleotide sequence with at least 97%, at least 95%, at least 90%, at least 85%, at least 80%, or at least 70% nucleotide sequence identity to a nucleotide sequence selected from the group consisting of one of the nucleotide sequences of SEQ ID NOS.: 3796-3800, 3806-4860, 5916-10012, fragments comprising at least 10, 15, 20, 25, 30, 35, 40, 50, 75, 100, 150, 200, 300, 400, or 500 consecutive nucleotides thereof, and the sequences complementary thereto. In some embodiments, the preceding methods may be used to isolate homologous coding nucleic acids or homologous antisense nucleic acids comprising a nucleotide sequence with at least 97%, at least 95%, at least 90%, at least 85%, at least 80%, or at least 70% nucleotide sequence identity to a nucleic acid sequence selected from the group consisting of one of the sequences of SEQ ID NOS. 3796-3800, 3806-4860, 5916-10012, fragments comprising at least 10, 15, 20,25, 30, 35, 40, 50, 75, 100, 150, 200, 300, 400, or 500 consecutive nucleotides thereof, and the sequences complementary thereto. Identity may be measured using BLASTN version 2.0 with the default parameters. (Altschul, S. F. et al. Gapped BLAST and PSI-BLAST: A New Generation of Protein Database Search Programs, Nucleic Acid Res. 25: 3389-3402 (1997), the disclosure of which is incorporated herein by reference in its entirety). For example, the homologous polynucleotides may comprise a coding sequence which is a naturally occurring allelic variant of one of the coding sequences described herein. Such allelic variants may have a substitution, deletion or addition of one or more nucleotides when compared to the nucleic acids of SEQ ID NOs: 8-3795, SEQ ID NOS.: 3796-3800, 3806-4860, 5916-10012 or the nucleotide sequences complementary thereto.

[0501] Additionally, the above procedures may be used to isolate homologous coding nucleic acids which encode polypeptides having at least 99%, 95%, at least 90%, at least 85%, at least 80%, at least 70%, at least 60%, at least 50%, at least 40% or at least 25% amino acid identity or similarity to a polypeptide comprising the sequence of one of SEQ ID NOs: 3801-3805, 4861-5915, 10013-14110 or to a polypeptpide whose expression is inhibited by a nucleic acid of one of SEQ ID NOs: 8-3795 or fragments comprising at least 5, 10, 15, 20,25, 30, 35, 40, 50, 75, 100, or 150 consecutive amino acids thereof as determined using the FASTA version 3.0t78 algorithm with the default parameters. Alternatively, protein identity or similarity may be identified using BLASTP with the default parameters, BLASTX with the default parameters, or TBLASTN with the default parameters. (Altschul, S. F. et al. Gapped BLAST and PSI-BLAST: A New Generation of Protein Database Search Programs, Nucleic Acid Res. 25: 3389-3402 (1997), the disclosure of which is incorporated herein by reference in its entirety).

[0502] Alternatively, homologous coding nucleic acids, homologous antisense nucleic acids or homologous polypeptides may be identified by searching a database to identify sequences having a desired level of nucleotide or amino acid sequence homology to a nucleic acid or polypeptide involved in proliferation or an antisense nucleic acid to a nucleic acid involved in microbial proliferation. A variety of such databases are available to those skilled in the art, including GenBank and GenSeq. In some embodiments, the databases are screened to identify nucleic acids with at least 97%, at least 95%, at least 90%, at least 85%, at least 80%, or at least 70% nucleotide sequence identity to a nucleic acid required for proliferation, an antisense nucleic acid which inhibits proliferation, or a portion of a nucleic acid required for proliferation or a portion of an antisense nucleic acid which inhibits proliferation. For example, homologous coding sequences may be identified by using a database to identify nucleic acids homologous to one of SEQ ID Nos. 8-3795, homologous to fragments comprising at least 10, 15, 20, 25, 30, 35, 40, 50, 75, 100, 150, 200, 300, 400, or 500 consecutive nucleotides thereof, nucleic acids homologous to one of SEQ ID NOS.: 3796-3800, 3806-4860, 5916-10012, homologous to fragments comprising at least 10, 15, 20, 25, 30, 35,40, 50, 75, 100, 150, 200, 300,400, or 500 consecutive nucleotides of one of SEQ ID NOS.: 3796-3800, 3806-4860, 5916-10012, nucleic acids homologous to one of SEQ ID Nos. 8-3795, homologous to fragments comprising at least 10, 15, 20,25,30, 35, 40, 50, 75, 100, 150,200, 300, 400, or 500 consecutive nucleotides thereof or nucleic acids homologous to the sequences complementary to any of the preceding nucleic acids. In other embodiments, the databases are screened to identify polypeptides having at least 99%, 95%, at least 90%, at least 85%, at least 80%, at least 70%, at least 60%, at least 50%, at least 40% or at least 25% amino acid sequence identity or similarity to a polypeptide involved in proliferation or a portion thereof. For example, the database may be screened to identify polypeptides homologous to a polypeptide comprising one of SEQ ID NOs: 3801-3805, 4861-5915, 10013-14110, a polypeptide whose expression is inhibited by a nucleic acid of one of SEQ ID NOs: 8-3795 or homologous to fragments comprising at least 5, 10, 15, 20, 25, 30, 35, 40, 50, 75, 100, or 150 consecutive amino acids of any of the preceding polypeptides. In some embodiments, the database may be screened to identify homologous coding nucleic acids, homologous antisense nucleic acids or homologous polypeptides from cells or microorganisms other than the Staphylococcus aureus, Salmonella typhimurium, Klebsiella pneumoniae, Pseudomonas aeruginosa and Enterococcus faecalis, Escherichia coli, Enterococcus faecalis, Haemophilus influenzae, Helicobacter pylori, Klebsiella pneumoniae, Pseudomonas aeruginosa, Staphylococcus aureus, or Salmonella typhi species from which they were obtained. For example the database may be screened to identify homologous coding nucleic acids, homologous antisense nucleic acids or homologous polypeptides from microorganisms such as Anaplasma marginale, Aspergillus fumigatus, Bacillus anthracis, Bacterioides fragilis Bordetella pertussis, Burkholderia cepacia, Campylobacter jejuni, Candida albicans, Candida glabrata (also called Torulopsis glabrata), Candida tropicalis, Candida parapsilosis, Candida guilliermondii, Candida krusei, Candida kefyr (also called Candida pseudotropicalis), Candida dubliniensis, Chlamydia pneumoniae, Chlamydia trachomatus, Clostridium botulinum, Clostridium difficile, Clostridium perfringens, Coccidiodes immitis, Corynebacterium diptheriae, Cryptococcus neoformans, Enterobacter cloacae, Enterococcus faecalis, Enterococcus faecium, Escherichia coli, Haemophilus influenzae, Helicobacter pylori, Histoplasma capsulatum, Klebsiella pneumoniae, Listeria monocytogenes, Mycobacterium leprae, Mycobacterium tuberculosis, Neisseria gonorrhoeae, Neisseria meningitidis, Nocardia asteroides, Pasteurella haemolytica, Pasteurella multocida, Pneumocystis carinii, Proteus vulgaris, Pseudomonas aeruginosa, Salmonella bongori, Salmonella cholerasuis, Salmonella enterica, Salmonella paratyphi, Salmonella typhi, Salmonella typhimurium, Staphylococcus aureus, Listeria monocytogenes, Moxarella catarrhalis, Shigella boydii, Shigella dysenteriae, Shigella flexneri, Shigella sonnei, Staphylococcus epidermidis, Streptococcus pneumoniae, Streptococcus mutans, Treponema pallidum, Yersinia enterocolitica, Yersinia pestis or any species falling within the genera of any of the above species, including coagulase negative Staphylococcus. In some embodiments, the homologous coding nucleic acids, homologous antisense nucleic acids, or homologous polypeptides are from an organism other than E. coli.

[0503] In another embodiment, gene expression arrays and microarrays can be employed. Gene expression arrays are high density arrays of DNA samples deposited at specific locations on a glass chip, nylon membrane, or the like. Such arrays can be used by researchers to quantify relative gene expression under different conditions. Gene expression arrays are used by researchers to help identify optimal drug targets, profile new compounds, and determine disease pathways. An example of this technology is found in U.S. Pat. No. 5,807,522, which is hereby incorporated by reference.

[0504] It is possible to study the expression of all genes in the genome of a particular microbial organism using a single array. For example, the arrays may consist of 12×24 cm nylon filters containing PCR products corresponding to ORFs from Staphylococcus aureus, Salmonella typhimurium, Klebsiella pneumoniae, Pseudomonas aeruginosa and Enterococcus faecalis, Escherichia coli Enterococcus faecalis, Haemophilus influenzae, Helicobacter pylori, Klebsiella pneumoniae, Pseudomonas aeruginosa, Staphylococcus aureus, or Salmonella typhi (including the nucleic acids of SEQ ID NOs.: 3796-3800, 3806-4860, 5916-10012). 10 ngs of each PCR product are spotted every 1.5 mm on the filter. Single stranded labeled cDNAs are prepared for hybridization to the array (no second strand synthesis or amplification step is done) and placed in contact with the filter. Thus the labeled cDNAs are of “antisense” orientation. Quantitative analysis is done by phosphorimager.

[0505] Hybridization of cDNA made from a sample of total cell mRNA to such an array followed by detection of binding by one or more of various techniques known to those in the art results in a signal at each location on the array to which cDNA hybridized. The intensity of the hybridization signal obtained at each location in the array thus reflects the amount of mRNA for that specific gene that was present in the sample. Comparing the results obtained for mRNA isolated from cells grown under different conditions thus allows for a comparison of the relative amount of expression of each individual gene during growth under the different conditions.

[0506] Gene expression arrays may be used to analyze the total mRNA expression pattern at various time points after induction of an antisense nucleic acid complementary to a proliferation-required gene. Analysis of the expression pattern indicated by hybridization to the array provides information on other genes whose expression is influenced by antisense expression. For example, if the antisense is complementary to a gene for ribosomal protein L7/L12 in the 50S subunit, levels of other mRNAs may be observed to increase, decrease or stay the same following expression of antisense to the L7/L12 gene. If the antisense is complementary to a different 50S subunit ribosomal protein mRNA (e.g. L25), a different mRNA expression pattern may result. Thus, the mRNA expression pattern observed following expression of an antisense nucleic acid comprising a nucleotide sequence complementary to a proliferation required gene may identify other proliferation-required nucleic acids. In addition, the mRNA expression patterns observed when the bacteria are exposed to candidate drug compounds or known antibiotics may be compared to those observed with antisense nucleic acids comprising a nucleotide sequence complementary to a proliferation-required nucleic acid. If the mRNA expression pattern observed with the candidate drug compound is similar to that observed with the antisense nucleic acid, the drug compound may be a promising therapeutic candidate. Thus, the assay would be useful in assisting in the selection of promising candidate drug compounds for use in drug development.

[0507] In cases where the source of nucleic acid deposited on the array and the source of the nucleic acid being hybridized to the array are from two different cells or microorganisms, gene expression arrays can identify homologous nucleic acids in the two cells or microorganisms.

[0508] The present invention also contemplates additional methods for screening other microorganisms for proliferation-required genes. In one aspect of this embodiment, an antisense nucleic acid comprising a nucleotide sequence complementary to the proliferation-required sequences from Staphylococcus aureus, Salmonella typhimurium, Klebsiella pneumoniae, Pseudomonas aeruginosa and Enterococcus faecalis, Escherichia coli, Enterococcus faecalis, Haemophilus influenzae, Helicobacter pylori, Klebsiella pneumoniae, Pseudomonas aeruginosa, Staphylococcus aureus, or Salmonella typhi or a portion thereof is transcribed in an antisense orientation in such a way as to alter the level or activity of a nucleic acid required for proliferation of an autologous or heterologous cell or microorganism. For example, the antisense nucleic acid may be a homologous antisense nucleic acid such as an antisense nucleic acid homologous to the nucleotide sequence complementary to one of SEQ ID NOs.: 3796-3800, 3806-4860, 5916-10012, an antisense nucleic acid comprising a nucleotide sequence homologous to one of SEQ ID Nos.: 8-3795, or an antisense nucleic acid comprising a nucleotide sequence complementary to a portion of any of the preceding nucleic acids. The cell or microorganism transcribing the homologous antisense nucleic acid may be used in a cell-based assay, such as those described herein, to identify candidate antibiotic compounds. In another embodiment, the conserved portions of nucleotide sequences identified as proliferation-required can be used to generate degenerate primers for use in the polymerase chain reaction (PCR). The PCR technique is well known in the art. The successful production of a PCR product using degenerate probes generated from the nucleotide sequences identified herein indicates the presence of a homologous gene sequence in the species being screened. This homologous gene is then isolated, expressed, and used as a target for candidate antibiotic compounds. In another aspect of this embodiment, the homologous gene (for example a homologous coding nucleic acid )thus identified, or a portion thereof, is transcribed in an autologous cell or microorganism or in a heterologous cell or microorganism in an antisense orientation in such a way as to alter the level or activity of a homologous gene required for proliferation in the autologous or heterologous cell or microorganism. Alternatively, a homologous antisense nucleic acid may be transcribed in an autologous or heterologous cell or microorganism in such a way as to alter the level or activity of a gene product required for proliferation in the autologous or heterologous cell or microorganism.

[0509] The nucleic acids homologous to the genes required for the proliferation of Staphylococcus aureus, Salmonella typhimurium, Klebsiella pneumoniae, Pseudomonas aeruginosa and Enterococcus faecalis, Escherichia coli, Enterococcus faecalis, Haemophilus influenzae, Helicobacter pylori, Klebsiella pneumoniae, Pseudomonas aeruginosa, Staphylococcus aureus, or Salmonella typhi or the sequences complementary thereto may be used to identify homologous coding nucleic acids or homologous antisense nucleic acids from cells or microorganisms other than Staphylococcus aureus, Salmonella typhimurium, Klebsiella pneumoniae, Pseudomonas aeruginosa and Enterococcus faecalis, Escherichia coli, Enterococcus faecalis, Haemophilus influenzae, Helicobacter pylori, Klebsiella pneumoniae, Pseudomonas aeruginosa, Staphylococcus aureus, or Salmonella typhi to inhibit the proliferation of cells or microorganisms other than Staphylococcus aureus, Salmonella typhimurium, Klebsiella pneumoniae, Pseudomonas aeruginosa and Enterococcus faecalis, Escherichia coli, Enterococcus faecalis, Haemophilus influenzae, Helicobacter pylori, Klebsiella pneumoniae, Pseudomonas aeruginosa, Staphylococcus aureus, or Salmonella typhi by inhibiting the activity or reducing the amount of the identified homologous coding nucleic acid or homologous polypeptide in the cell or microorganism other than Staphylococcus aureus, Salmonella typhimurium, Klebsiella pneumoniae, Pseudomonas aeruginosa Enterococcus faecalis, Escherichia coli, Enterococcus faecalis, Haemophilus influenzae, Helicobacter pylori, or Salmonella typhi or to identify compounds which inhibit the growth of cells or microorganisms other than Staphylococcus aureus, Salmonella typhimurium, Klebsiella pneumoniae, Pseudomonas aeruginosa, Enterococcus faecalis, Escherichia coli, Enterococcus faecalis, Haemophilus influenzae, Helicobacter pylori, or Salmonella typhi as described below. For example, the nucleic acids homologous to proliferation-required genes from Staphylococcus aureus, Salmonella typhimurium, Klebsiella pneumoniae, Pseudomonas aeruginosa and Enterococcus faecalis, Escherichia coli, Enterococcus faecalis, Haemophilus influenzae, Helicobacter pylori, Klebsiella pneumoniae, Pseudomonas aeruginosa, Staphylococcus aureus, or Salmonella typhi or the sequences complementary thereto may be used to identify compounds which inhibit the growth of Anaplasma marginale, Aspergillus fumigatus, Bacillus anthracis, Bacterioides fragilis Bordetella pertussis, Burkholderia cepacia, Campylobacter jejuni, Candida albicans, Candida glabrata (also called Torulopsis glabrata), Candida tropicalis, Candida parapsilosis, Candida guilliermondii, Candida krusei, Candida kefyr (also called Candida pseudotropicalis), Candida dubliniensis, Chlamydia pneumoniae, Chlamydia trachomatus, Clostridium botulinum, Clostridium difficile, Clostridium perfringens, Coccidiodes immitis, Corynebacterium diptheriae, Cryptococcus neoformans, Enterobacter cloacae, Enterococcus faecalis, Enterococcus faecium, Escherichia coli, Haemophilus influenzae, Helicobacter pylori, Histoplasma capsulatum, Klebsiella pneumoniae, Listeria monocytogenes, Mycobacterium leprae, Mycobacterium tuberculosis, Neisseria gonorrhoeae, Neisseria meningitidis, Nocardia asteroides, Pasteurella haemolytica, Pasteurella multocida, Pneumocystis carinii, Proteus vulgaris, Pseudomonas aeruginosa, Salmonella bongori, Salmonella cholerasuis, Salmonella enterica, Salmonella paratyphi, Salmonella typhi, Salmonella typhimurium, Staphylococcus aureus, Listeria monocytogenes, Moxarella catarrhalis, Shigella boydii, Shigella dysenteriae, Shigella flexneri, Shigella sonnei, Staphylococcus epidermidis, Streptococcus pneumoniae, Streptococcus mutans, Treponema pallidum, Yersinia enterocolitica, Yersinia pestis and any species falling within the genera of any of the above species. In some embodiments of the present invention, the nucleic acids homologous to proliferation-required sequences from Staphylococcus aureus, Salmonella typhimurium, Klebsiella pneumoniae, Pseudomonas aeruginosa and Enterococcus faecalis, Escherichia coli, Enterococcus faecalis, Haemophilus influenzae, Helicobacter pylori, Klebsiella pneumoniae, Pseudomonas aeruginosa, Staphylococcus aureus, or Salmonella typhi (including nucleic acids homologous to one of SEQ ID NOs.: 3796-3800, 3806-4860, 5916-10012) or the sequences complementary thereto (including nucleic acids homologous to one of SEQ ID NOs.: 8-3795) are used to identify proliferation-required sequences in an organism other than E. coli.

[0510] In another embodiment of the present invention, antisense nucleic acids complementary to the sequences identified as required for proliferation or portions thereof (including antisense nucleic acids comprising a nucleotide sequence complementary to one of SEQ ID NOs.: 3796-3800, 3806-4860, 5916-10012 or portions thereof, such as the nucleic acids of SEQ ID NOs.: 8-3795) are transferred to vectors capable of function within a species other than the species from which the sequences were obtained. For example, the vector may be functional in Anaplasma marginale, Aspergillus fumigatus, Bacillus anthracis, Bacterioides fragilis Bordetella pertussis, Burkholderia cepacia, Campylobacter jejuni, Candida albicans, Candida glabrata (also called Torulopsis glabrata), Candida tropicalis, Candida parapsilosis, Candida guilliermondii, Candida krusei, Candida kefyr (also called Candida pseudotropicalis), Candida dubliniensis, Chlamydia pneumoniae, Chlamydia trachomatus, Clostridium botulinum, Clostridium difficile, Clostridium perfringens, Coccidiodes immitis, Corynebacterium diptheriae, Cryptococcus neoformans, Enterobacter cloacae, Enterococcus faecalis, Enterococcus faecium, Escherichia coli, Haemophilus influenzae, Helicobacter pylori, Histoplasma capsulatum, Klebsiella pneumoniae, Listeria monocytogenes, Mycobacterium leprae, Mycobacterium tuberculosis, Neisseria gonorrhoeae, Neisseria meningitidis, Nocardia asteroides, Pasteurella haemolytica, Pasteurella multocida, Pneumocystis carinii, Proteus vulgaris, Pseudomonas aeruginosa, Salmonella bongori, Salmonella cholerasuis, Salmonella enterica, Salmonella paratyphi, Salmonella typhi, Salmonella typhimurium, Staphylococcus aureus, Listeria monocytogenes, Moxarella catarrhalis, Shigella boydii, Shigella dysenteriae, Shigella flexneri, Shigella sonnei, Staphylococcus epidermidis, Streptococcus pneumoniae, Streptococcus mutans, Treponema pallidum, Yersinia enterocolitica, Yersinia pestis or any species falling within the genera of any of the above species. In some embodiments of the present invention, the vector may be functional in an organism other than E. coli. As would be appreciated by one of ordinary skill in the art, vectors may contain certain elements that are species specific. These elements can include promoter sequences, operator sequences, repressor genes, origins of replication, ribosomal binding sequences, termination sequences, and others. To use the antisense nucleic acids, one of ordinary skill in the art would know to use standard molecular biology techniques to isolate vectors containing the sequences of interest from cultured bacterial cells, isolate and purify those sequences, and subclone those sequences into a vector adapted for use in the species of bacteria to be screened.

[0511] Vectors for a variety of other species are known in the art. For example, numerous vectors which function in E. coli are known in the art. Also, Pla et al. have reported an expression vector that is functional in a number of relevant hosts including: Salmonella typhimurium, Pseudomonas putida, and Pseudomonas aeruginosa. J. Bacteriol. 172(8):4448-55 (1990). Brunschwig and Darzins (Gene (1992) 111:35-4, the disclosure of which is incorporated herein by reference in its entirety) described a shuttle expression vector for Pseudomonas aeruginosa. Similarly many examples exist of expression vectors that are freely transferable among various Gram-positive microorganisms. Expression vectors for Enterococcus faecalis may be engineered by incorporating suitable promoters into a pAK80 backbone (Israelsen, H., S. M. Madsen, A. Vrang, E. B. Hansen and E. Johansen. 1995. Appl. Environ. Microbiol. 61:2540-2547, the disclosure of which is incorporated herein by reference in its entirety).

[0512] Following the subcloning of the antisense nucleic acids complementary to proliferation-required sequences from Staphylococcus aureus, Salmonella typhimurium, Klebsiella pneumoniae, Pseudomonas aeruginosa and Enterococcus faecalis, Escherichia coli, Enterococcus faecalis, Haemophilus influenzae, Helicobacter pylori, Klebsiella pneumoniae, Pseudomonas aeruginosa, Staphylococcus aureus, or Salmonella typhi or portions thereof into a vector functional in a second cell or microorganism of interest (i.e. a cell or microorganism other than the one from which the identified nucleic acids were obtained), the antisense nucleic acids are conditionally transcribed to test for bacterial growth inhibition. The nucleotide sequences of the nucleic acids from Staphylococcus aureus, Salmonella typhimurium, Klebsiella pneumoniae, Pseudomonas aeruginosa, Enterococcus faecalis, Escherichia coli Enterococcus faecalis, Haemophilus influenzae, Helicobacter pylori, or Salmonella typhi that, when transcribed, inhibit growth of the second cell or microorganism are compared to the known genomic sequence of the second cell or microorganism to identify the homologous gene from the second organism. If the homologous sequence from the second cell or microorganism is not known, it may be identified and isolated by hybridization to the proliferation-required Staphylococcus aureus, Salmonella typhimurium, Klebsiella pneumoniae, Pseudomonas aeruginosa, Enterococcus faecalis Escherichia coli, Enterococcus faecalis, Haemophilus influenzae, Helicobacter pylori, or Salmonella typhi sequence of interest or by amplification using PCR primers based on the proliferation-required nucleotide sequence of interest as described above. In this way, sequences which may be required for the proliferation of the second cell or microorganism may be identified. For example, the second microorganism may be Anaplasma marginale, Aspergillus fumigatus, Bacillus anthracis, Bacterioides fragilis Bordetella pertussis, Burkholderia cepacia, Campylobacter jejuni, Candida albicans, Candida glabrata (also called Torulopsis glabrata), Candida tropicalis, Candida parapsilosis, Candida guilliermondii, Candida krusei, Candida kefyr (also called Candida pseudotropicalis), Candida dubliniensis, Chlamydia pneumoniae, Chlamydia trachomatus, Clostridium botulinum, Clostridium difficile, Clostridium perfringens, Coccidiodes immitis, Corynebacterium diptheriae, Cryptococcus neoformans, Enterobacter cloacae, Enterococcus faecalis, Enterococcus faecium, Escherichia coli, Haemophilus influenzae, Helicobacter pylori, Histoplasma capsulatum, Klebsiella pneumoniae, Listeria monocytogenes, Mycobacterium leprae, Mycobacterium tuberculosis, Neisseria gonorrhoeae, Neisseria meningitidis, Nocardia asteroides, Pasteurella haemolytica, Pasteurella multocida, Pneumocystis carinii, Proteus vulgaris, Pseudomonas aeruginosa, Salmonella bongori, Salmonella cholerasuis, Salmonella enterica, Salmonella paratyphi, Salmonella typhi, Salmonella typhimurium, Staphylococcus aureus, Listeria monocytogenes, Moxarella catarrhalis, Shigella boydii, Shigella dysenteriae, Shigella flexneri, Shigella sonnei, Staphylococcus epidermidis, Streptococcus pneumoniae, Streptococcus mutans, Treponema pallidum, Yersinia enterocolitica, Yersinia pestis or any species falling within the genera of any of the above species. In some embodiments of the present invention, the second microorganism is an organism other than E. coli.

[0513] The homologous nucleic acid sequences from the second cell or microorganism which are identified as described above may then be operably linked to a promoter, such as an inducible promoter, in an antisense orientation and introduced into the second cell or microorganism. The techniques described herein for identifying Staphylococcus aureus, Salmonella typhimurium, Klebsiella pneumoniae, Pseudomonas aeruginosa and Enterococcus faecalis, Escherichia coli, Enterococcus faecalis, Haemophilus influenzae, Helicobacter pylori, Klebsiella pneumoniae, Pseudomonas aeruginosa, Staphylococcus aureus, or Salmonella typhi genes required for proliferation may thus be employed to determine whether the identified nucleotide sequences from a second cell or microorganism inhibit the proliferation of the second cell or microorganism. For example, the second microorganism may be Anaplasma marginale, Aspergillus fumigatus, Bacillus anthracis, Bacterioides fragilis Bordetella pertussis, Burkholderia cepacia, Campylobacter jejuni, Candida albicans, Candida glabrata (also called Torulopsis glabrata), Candida tropicalis, Candida parapsilosis, Candida guilliermondii, Candida krusei, Candida kefyr (also called Candida pseudotropicalis), Candida dubliniensis, Chlamydia pneumoniae, Chlamydia trachomatus, Clostridium botulinum, Clostridium difficile, Clostridium perfringens, Coccidiodes immitis, Corynebacterium diptheriae, Cryptococcus neoformans, Enterobacter cloacae, Enterococcus faecalis, Enterococcus faecium, Escherichia coli, Haemophilus influenzae, Helicobacter pylori, Histoplasma capsulatum, Klebsiella pneumoniae, Listeria monocytogenes, Mycobacterium leprae, Mycobacterium tuberculosis, Neisseria gonorrhoeae, Neisseria meningitidis, Nocardia asteroides, Pasteurella haemolytica, Pasteurella multocida, Pneumocystis carinii, Proteus vulgaris, Pseudomonas aeruginosa, Salmonella bongori, Salmonella cholerasuis, Salmonella enterica, Salmonella paratyphi, Salmonella typhi, Salmonella typhimurium, Staphylococcus aureus, Listeria monocytogenes, Moxarella catarrhalis, Shigella boydii, Shigella dysenteriae, Shigella flexneri, Shigella sonnei, Staphylococcus epidermidis, Streptococcus pneumoniae, Streptococcus mutans, Treponema pallidum, Yersinia enterocolitica, Yersinia pestis or any species falling within the genera of any of the above species. In some embodiments of the present invention, the second microorganism may be an organism other than E. coli.

[0514] Antisense nucleic acids required for the proliferation of microorganisms other than Staphylococcus aureus, Salmonella typhimurium, Klebsiella pneumoniae, Pseudomonas aeruginosa, Enterococcus faecalis, Escherichia coli, Enterococcus faecalis, Haemophilus influenzae, Helicobacter pylori, or Salmonella typhi or the genes corresponding thereto, may also be hybridized to a microarray containing the Staphylococcus aureus, Salmonella typhimurium, Klebsiella pneumoniae, Pseudomonas aeruginosa, Enterococcus faecalis ORFs, Escherichia coli, Enterococcus faecalis, Haemophilus influenzae, Helicobacter pylori, and Salmonella typhi (including the nucleic acids of SEQ ID NOs.: 3796-3800, 3806-4860, 5916-10012) to gauge the homology between the Staphylococcus aureus, Salmonella typhimurium, Klebsiella pneumoniae, Pseudomonas aeruginosa, Enterococcus faecalis, Escherichia coli, Enterococcus faecalis, Haemophilus influenzae, Helicobacter pylori, or Salmonella typhi sequences and the proliferation-required nucleic acids from other cells or microorganisms. For example, the proliferation-required nucleic acid may be from Anaplasma marginale, Aspergillus fumigatus, Bacillus anthracis, Bacterioides fragilis Bordetella pertussis, Burkholderia cepacia, Campylobacter jejuni, Candida albicans, Candida glabrata (also called Torulopsis glabrata), Candida tropicalis, Candida parapsilosis, Candida guilliermondii, Candida krusei, Candida kefyr (also called Candida pseudotropicalis), Candida dubliniensis, Chlamydia pneumoniae, Chlamydia trachomatus, Clostridium botulinum, Clostridium difficile, Clostridium perfringens, Coccidiodes immitis, Corynebacterium diptheriae, Cryptococcus neoformans, Enterobacter cloacae, Enterococcus faecalis, Enterococcus faecium, Escherichia coli, Haemophilus influenzae, Helicobacter pylori, Histoplasma capsulatum, Klebsiella pneumoniae, Listeria monocytogenes, Mycobacterium leprae, Mycobacterium tuberculosis, Neisseria gonorrhoeae, Neisseria meningitidis, Nocardia asteroides, Pasteurella haemolytica, Pasteurella multocida, Pneumocystis carinii, Proteus vulgaris, Pseudomonas aeruginosa, Salmonella bongori, Salmonella cholerasuis, Salmonella enterica, Salmonella paratyphi, Salmonella typhi, Salmonella typhimurium, Staphylococcus aureus, Listeria monocytogenes, Moxarella catarrhalis, Shigella boydii, Shigella dysenteriae, Shigella flexneri, Shigella sonnei, Staphylococcus epidermidis, Streptococcus pneumoniae, Streptococcus mutans, Treponema pallidum, Yersinia enterocolitica, Yersinia pestis or any species falling within the genera of any of the above species. In some embodiments of the present invention, the proliferation-required nucleotide sequences from Staphylococcus aureus, Salmonella typhimurium, Klebsiella pneumoniae, Pseudomonas aeruginosa, Enterococcus faecalis, Escherichia coli, Enterococcus faecalis, Haemophilus influenzae, Helicobacter pylori, Salmonella typhi or homologous nucleic acids are used to identify proliferation-required sequences in an organism other than E. coli. In some embodiments of the present invention, the proliferation-required sequences may be from an organism other than E. coli. The proliferation-required nucleic acids from a cell or microorganism other than Staphylococcus aureus, Salmonella typhimurium, Klebsiella pneumoniae, Pseudomonas aeruginosa, Enterococcus faecalis, Escherichia coli, Enterococcus faecalis, Haemophilus influenzae, Helicobacter pylori, or Salmonella typhi may be hybridized to the array under a variety of conditions which permit hybridization to occur when the probe has different levels of homology to the nucleotide sequence on the microarray. This would provide an indication of homology across the cells or microorganisms as well as clues to other possible essential genes in these cells or microorganisms.

[0515] In still another embodiment, the antisense nucleic acids of the present invention (including the antisense nucelic acids of SEQ ID NOs. 8-3795 or homologous antisense nucleic acids) that inhibit bacterial growth or proliferation can be used as antisense therapeutics for killing bacteria. The antisense sequences can be complementary to one of SEQ ID NOs.: 3796-3800, 3806-4860, 5916-10012, homologous nucleic acids, or portions thereof. Alternatively, antisense therapeutics can be complementary to operons in which proliferation-required genes reside (i.e. the antisense nucleic acid may hybridize to a nucleotide sequence of any gene in the operon in which the proliferation-required genes reside). Further, antisense therapeutics can be complementary to a proliferation-required gene or portion thereof with or without adjacent noncoding sequences, an intragenic sequence (i.e. a sequence within a gene), an intergenic sequence (i.e. a sequence between genes), a sequence spanning at least a portion of two or more genes, a 5′ noncoding region or a 3′ noncoding region located upstream or downstream from the actual sequence that is required for bacterial proliferation or an operon containing a proliferation-required gene.

[0516] In addition to therapeutic applications, the present invention encompasses the use of nucleic acids complementary to nucleic acids required for proliferation as diagnostic tools. For example, nucleic acid probes comprising nucleotide sequences complementary to proliferation-required sequences that are specific for particular species of cells or microorganisms can be used as probes to identify particular microorganism species or cells in clinical specimens. This utility provides a rapid and dependable method by which to identify the causative agent or agents of a bacterial infection. This utility would provide clinicians the ability to accurately identify the species responsible for the infection and amdminister a compound effective against it. In an extension of this utility, antibodies generated against proteins translated from mRNA transcribed from proliferation-required sequences can also be used to screen for specific cells or microorganisms that produce such proteins in a species-specific manner.

[0517] Other embodiments of the present invention include methods of identifying compounds which inhibit the activity of gene products required for cellular proliferation using rational drug design. As discussed in more detail below, in such methods, the structure of the gene product is determined using techniques such as x-ray crystallography or computer modeling. Compounds are screened to identify those which have a structure which would allow them to interact with the gene product or a portion thereof to inhibit its activity. The compounds may be obtained using any of a variety of methods familiar to those skilled in the art, including combinatorial chemistry. In some embodiments, the compounds may be obtained from a natural product library. In some embodiments, compounds having a structure which allows them to interact with the active site of a gene product, such as the active site of an enzyme, or with a portion of the gene product which interacts with another biomolecule to form a complex are identified. If desired, lead compounds may be identified and further optimized to provide compounds which are highly effective against the gene product.

[0518] The following examples teach the genes of the present invention and a subset of uses for the genes identified as required for proliferation. These examples are illustrative only and are not intended to limit the scope of the present invention.

### EXAMPLES

[0519] The following examples are directed to the identification and exploitation of genes required for proliferation. Methods of gene identification are discussed as well as a variety of methods to utilize the identified sequences. It will be appreciated that any of the antisense nucleic acids, proliferartion-required genes or proliferation-required gene products described herein, or portions thereof, may be used in the procedures described below, including the antisense nucleic acids of SEQ ID NOs.: 8-3795, the nucleic acids of SEQ ID NOS.: 3796-3800, 3806-4860, 5916-10012, or the polypeptides of SEQ ID NOs.: 3801-3805, 4861-5915, 10013-14110. Likewise, homologous coding nucleic acids or portions thereof, may be used in any of the procedures described below.

[0520] Genes Identified as Required for Proliferation of Staphylococcus aureus, Salmonella typhimurium, Klebsiella pneumoniae, Pseudomonas aeruginosa or Enterococcus faecalis

[0521] Genomic fragments were operably linked to an inducible promoter in a vector and assayed for growth inhibition activity. Example 1 describes the examination of a library of genomic fragments cloned into vectors comprising inducible promoters. Upon induction with xylose or IPTG, the vectors produced an RNA molecule corresponding to the subcloned genomic fragments. In those instances where the genomic fragments were in an antisense orientation with respect to the promoter, the transcript produced was complementary to at least a portion of an MRNA (messenger RNA) encoding a Staphylococcus aureus, Salmonella typhimurium, Klebsiella pneumoniae, Pseudomonas aeruginosa or Enterococcus faecalis gene product such that they interacted with sense mRNA produced from various Staphylococcus aureus, Salmonella typhimurium, Klebsiella pneumoniae, Pseudomonas aeruginosa or Enterococcus faecalis genes and thereby decreased the translation efficiency or the level of the sense messenger RNA thus decreasing production of the protein encoded by these sense mRNA molecules. In cases where the sense mRNA encoded a protein required for proliferation, bacterial cells containing a vector from which transcription from the promoter had been induced failed to grow or grew at a substantially reduced rate. Additionally, in cases where the transcript produced was complementary to at least a portion of a non-translated RNA and where that non-translated RNA was required for proliferation, bacterial cells containing a vector from which transcription from the promoter had been induced also failed to grow or grew at a substantially reduced rate.

### Example 1

### Inhibition of Bacterial Proliferation after Induction of Antisense Expression

[0522] Nucleic acids involved in proliferation of Staphylococcus aureus, Salmonella typhimurium, and Klebsiella pneumoniae were identified as follows. Randomly generated fragments of Staphylococcus aureus, Salmonella typhimurium, Klebsiella pneumoniae, Pseudomonas aeruginosa or Enterococcus faecalis genomic DNA were transcribed from inducible promoters.

[0523] In the case of Staphylococcus aureus, a novel inducible promoter system, XylT5, comprising a modified T5 promoter fused to the xylO operater from the xyla promoter of Staphylococcus aureus was used. The promoter is described in U.S. Provisional Patent Application Ser. No. 60/259,434, the disclosure of which is incorporated herein by reference in its entirety. Transcription from this hybrid promoter is inducible by xylose.

[0524] Randomly generated fragments of Salmonella typhimurium genomic DNA were transcribed from an IPTG inducible promoter in pLEX5BA (Krause et al., J. Mol. Biol.

[0525] 274: 365 (1997) or a derivative thereof. Randomly generated fragements of Klebsiella pneumoniae genomic DNA were expressed from an IPTG inducible promoter in pLEX5BA-Kan. To construct pLEX5BA-kan, pLEX5BA was digested to completion with ClaI in order to remove the bla gene. Then the plasmid was treated with a partial NotI digestion and blunted with T4 DNA polymerase. A 3.2 kbp fragment was then gel purified and ligated to a blunted 1.3 kbp kan gene from pKant. Kan resistant transformants were selected on Kan plates. Orientation of the kan gene was checked by SmaI digestion. A clone, which had the kan gene in the same orientation as the bla gene, was used to identify genes required for proliferation of Klebsiella pneumoniae.

[0526] Randomly generated fragments of Pseudomonas aeruginosa genomic DNA were trancribed from a two-component inducible promoter system. Integrated on the chromosome was the T7 RNA polymerase gene regulated by lacUV5/lacO (Brunschwig, E. and Darzins, A. 1992. Gene 1 11:35-41, the disclosure of which is incorporated herein by reference in its entirety). On a separate plasmid, a T7 gene 10 promoter, which is transcribed by T7 RNA polymerase, was fused with a lacO operator followed by a multiple cloning site.

[0527] Should the genomic DNA downstream of the promoter contain, in an antisense orientation, at least a portion of an MRNA or a non-translated RNA encoding a gene product involved in proliferation, then induction of transcription from the promoter will result in detectable inhibition of proliferation.

[0528] In the case of Staphylococcus aureus, a shotgun library of Staphylococcus aureus genomic fragments was cloned into the vector pXyIT5-P15a, which harbors the Xy1T5 inducible promoter. The vector was linearized at a unique BamHI site immediately downstream of the XyIT5 promoter/operator. The linearized vector was treated with shrimp alkaline phosphatase to prevent reclosure of the linearized ends. Genomic DNA isolated from Staphylococcus aureus strain RN450 was fully digested with the restriction enzyme Sau3A, or, alternatively, partially digested with DNase I and “blunt-ended” by incubating with T4 DNA polymerase. Random genomic fragments between 200 and 800 base pairs in length were selected by gel purification. The size-selected genomic fragments were added to the linearized and dephosphorylated vector at a molar ratio of 0.1 to 1, and ligated to form a shotgun library.

[0529] The ligated products were transformed into electrocompetent E. coli strain XL1-Blue MRF (Stratagene) and plated on LB medium with supplemented with carbenicillin at 100 μg/ml. Resulting colonies numbering 5×10⁵ or greater were scraped and combined, and were then subjected to plasmid purification.

[0530] The purified library was then transformed into electrocompetent Staphylococcus aureus RN4220. Resulting transformants were plated on agar containing LB+0.2% glucose (LBG medium)+chloramphenicol at 15 μg/ml (LBG+CM15 medium) in order to generate 100 to 150 platings at 500 colonies per plating. The colonies were subjected to robotic picking and arrayed into wells of 384 well culture dishes. Each well contained 100 μl of LBG+CM15 liquid medium. Inoculated 384 well dishes were incubated 16 hours at 37° C., and each well was robotically gridded onto solid LBG+CM15 medium with or without 2% xylose. Gridded plates were incubated 16 hours at 37° C., and then manually scored for arrayed colonies that were growth-compromised in the presence of xylose.

[0531] Arrayed colonies that were growth-sensitive on medium containing 2% xylose, yet were able to grow on similar medium lacking xylose, were subjected to further growth sensitivity analysis as follows: Colonies from the plate lacking xylose were manually picked and inoculated into individual wells of a 96 well culture dish containing LBG+CM15, and were incubated for 16 hours at 37° C. These cultures were robotically diluted 1/100 into fresh medium and allowed to incubate for 4 hours at 37° C., after which they were subjected to serial dilutions in a 384 well array and then gridded onto media containing 2% xylose or media lacking xylose. After growth for 16 hours at 37° C., the arrays that resulted on the two media were compared to each other. Clones that grew similarly at all dilutions on both media were scored as a negative and were no longer considered. Clones that grew on xylose medium but failed to grow at the same serial dilution on the non-xylose plate were given a score based on the differential, i.e. should the clone grow at a serial dilution of 10⁴ or less on the xylose plate and grow at a serial dilution of 10⁸ or less on the non-xylose plate, then the corresponding clone received a score of “4” representing the log difference in growth observed.

[0532] For Salmonella typhimurium and Klebsiella pneumoniae growth curves were carried out by back diluting cultures 1:200 into fresh media containing 1 mM IPTG or media lacking IPTG and measuring the OD₄₅₀ every 30 minutes (min). To study the effects of transcriptional induction on solid medium, 10², 10³, 10⁴, 10⁵, 10⁶, 10⁷ and 10⁸ fold dilutions of overnight cultures were prepared. Aliquots of from 0.5 to 3 μl of these dilutions were spotted on selective agar plates with or without 1 mM IPTG. After overnight incubation, the plates were compared to assess the sensitivity of the clones to IPTG.

[0533] Nucleic acids involved in proliferation of Pseudomonas aeruginosa were identified as follows. Randomly generated fragments of Pseudomonas aeruginosa genomic DNA were transcribed from a two-component inducible promoter system. Integrated on the chromosome was the T7 RNA polymerase gene regulated by lacUV5/lacO (Brunschwig, E. and Darzins, A. 1992. Gene 111:35-41). On an expression plasmid there was a T7 gene 10 promoter, which is transcribed by T7 RNA polymerase, fused with a lacO operator followed by a multiple cloning site. Transcription from this hybrid promoter is inducible by IPTG. Should the genomic DNA downstream of the promoter contain, in an antisense orientation, at least a portion of an mRNA encoding a gene product involved in proliferation, then induction of expression from the promoter will result in detectable inhibition of proliferation.

[0534] A shotgun library of Pseudomonas aeruginosa genomic fragments was cloned into the vectors pEP5, pEP5S, or other similarly constructed vectors which harbor the T7lacO inducible promoter. The vector was linearized at a unique SmaI site immediately downstream of the T7lacO promoter/operator. The linearized vector was treated with shrimp alkaline phosphatase to prevent reclosure of the linearized ends. Genomic DNA isolated from Pseudomonas aeruginosa strain PAO1 was partially digested with DNase I and “blunt-ended” by incubating with T4 DNA polymerase. Random genomic fragments between 200 and 800 base pairs in length were selected by gel purification. The size-selected genomic fragments were added to the linearized and dephosphorylated vector at a molar ratio of 2 to 1, and ligated to form a shotgun library.

[0535] The ligated products were transformed into electrocompetent E. coli strain XL1-Blue MRF (Stratagene) and plated on LB medium with carbenicillin at 100 μg/ml or Streptomycin 100 μg/ml. Resulting colonies numbering 5×10⁵ or greater were scraped and combined, and were then subjected to plasmid purification.

[0536] The purified library was then transformed into electrocompetent Pseudomonas aeruginosa strain PAO1. Resulting transformants were plated on LB agar with carbenicillin at 100 μg/ml or Streptomycin 40 μg/ml in order to generate 100 to 150 platings at 500 colonies per plating. The colonies were subjected to robotic picking and arrayed into wells of 384 well culture dishes. Each well contained 100 μl of LB+CB 100 or Streptomycin 40 liquid medium. Inoculated 384 well dishes were incubated 16 hours at room temperature, and each well was robotically gridded onto solid LB+CB100 or Streptomycin 40 medium with or without 1 mM IPTG. Gridded plates were incubated 16 hours at 37° C., and then manually scored for arrayed colonies that were growth-compromised in the presence of IPTG.

[0537] Arrayed colonies that were growth-sensitive on medium containing 1 mM IPTG, yet were able to grow on similar medium lacking IPTG, were subjected to further growth sensitivity analysis as follows: Colonies from the plate lacking IPTG were manually picked and inoculated into individual wells of a 96 well culture dish containing LB+CB100 or Streptomycin 40, and were incubated for 16 hours at 30° C. These cultures were robotically diluted 1/100 into fresh medium and allowed to incubate for 4 hours at 37° C., after which they were subjected to serial dilutions in a 384 well array and then gridded onto media with and without 1 mM IPTG. After growth for 16 hours at 37° C., the arrays of serially diluted spots that resulted were compared between the two media. Clones that grew similarly at all dilutions on both media were scored as a negative and were no longer considered. Clones that grew on IPTG medium but failed to grow at the same serial dilution on the non-IPTG plate were given a score based on the differential, i.e. should the clone grow at a serial dilution of 10⁴ or less on the IPTG plate and grow at a serial dilution of 10⁸ or less on the IPTG plate, then the corresponding clone received a score of “4” representing the log difference in growth observed.

[0538] Following the identification of those vectors that, upon induction, negatively impacted Pseudomonas aeruginosa growth or proliferation, the inserts or nucleic acid fragments contained in those vectors were isolated for subsequent characterization. Vectors of interest were subjected to nucleic acid sequence determination.

[0539] Nucleic acids involved in proliferation of E. faecalis were identified as follows. Randomly generated fragments of genomic DNA were expressed from the vectors pEPEF3 or pEPEF14, which contain the CP25 or P59 promoter, respectively, regulated by the xy1 operator/repressor. Should the genomic DNA downstream of the promoter contain, in an antisense orientation, at least a portion of a mRNA encoding a gene product involved in proliferation, then induction of expression from the promoter will result in detectable inhibition of proliferation.

[0540] A shotgun library of E. faecalis genomic fragments was cloned into the vector pEPEF3 or pEPEF14, which harbor xylose inducible promoters. The vector was linearized at a unique SmaI site immediately downstream of the promoter/operator. The linearized vector was treated with alkaline phosphatase to prevent reclosure of the linearized ends. Genomic DNA isolated from E. faecalis strain OG1RF was partially digested with DNase I and “blunt-ended” by incubating with T4 DNA polymerase. Random genomic fragments between 200 and 800 base pairs in length were selected by gel purification. The size-selected genomic fragments were added to the linearized and dephosphorylated vector at a molar ratio of 2 to 1, and ligated to form a shotgun library.

[0541] The ligated products were transformed into electrocompetent E. coli strain TOP10 cells (Invitrogen) and plated on LB medium with erythromycin (Erm) at 150 μg/ml. Resulting colonies numbering 5×10⁵ or greater were scraped and combined, and were then subjected to plasmid purification.

[0542] The purified library was then transformed into electrocompetent E. faecalis strain OGIRF. Resulting transformants were plated on Todd-Hewitt (TH) agar with erythromycin at 10 μg/ml in order to generate 100 to 150 platings at 500 colonies per plating. The colonies were subjected to robotic picking and arrayed into wells of 384 well culture dishes. Each well contained 100 μl of THB+Erm 10 μg/ml. Inoculated 384 well dishes were incubated 16 hours at room temperature, and each well was robotically gridded onto solid TH agar+Erm with or without 5% xylose. Gridded plates were incubated 16 hours at 37° C., and then manually scored for arrayed colonies that were growth-compromised in the presence of xylose.

[0543] Arrayed colonies that were growth-sensitive on medium containing 5% xylose, yet were able to grow on similar medium lacking xylose, were subjected to further growth sensitivity analysis. Colonies from the plate lacking xylose were manually picked and inoculated into individual wells of a 96 well culture dish containing THB+Erm 10, and were incubated for 16 hours at 30° C. These cultures were robotically diluted 1/100 into fresh medium and allowed to incubate for 4 hours at 37° C., after which they were subjected to serial dilution on plates containing 5% xylose or plates lacking xylose. After growth for 16 hours at 37° C., the arrays of serially diluted spots that resulted were compared between the two media. Colonies that grew similarly on both media were scored as a negative and corresponding colonies were no longer considered. Colonies on xylose medium that failed to grow to the same serial dilution compared to those on the non-xylose plate were given a score based on the differential. For example, colonies on xylose medium that only grow to a serial dilution of −4 while they were able to grow to −8 on the non-xylose plate, then the corresponding transformant colony received a score of “4” representing the log difference in growth observed.

[0544] Following the identification of those vectors that, upon induction, negatively impacted E. faecalis growth or proliferation, the inserts or nucleic acid fragments contained in those expression vectors were isolated for subsequent characterization. The inserts in the vectors of interest were subjected to nucleotide sequence determination.

[0545] It will be appreciated that other restriction enzymes and other endonucleases or methodologies may be used to generate random genomic fragments. In addition, random genomic fragments may be generated by mechanical shearing. Sonication and nebulization are two such techniques commonly used for mechanical shearing of DNA.

### Example 2

### Nucleotide Sequence Determination of Identified Clones Transribing Nucleic Acid Fragments with Detrimental Effects on Staphylococcus aureus, Salmonella typhimurium, Klebsiella pneumoniae, Pseudomonas aeruginosa or Enterococcus faecalis Proliferation

[0546] Plasmids from clones that received a dilution plating score of “2” or greater were isolated to obtain the genomic DNA insert responsible for growth inhibition as follows. Staphylococcus aureus were grown in standard laboratory media (LB or TB with 15 ug/ml Chloramphenicol to select for the plasmid). Growth was carried out at 37° C. overnight in culture tubes or 2 ml deep well microtiter plates.

[0547] Lysis of Staphylococcus aureus was performed as follows. Cultures (2-5 ml) were centrifuged and the cell pellets resuspended in 1.5 mg/ml solution of lysostaphin (20 μl/ml of original culture) followed by addition of 250 μl of resuspension buffer (Qiagen). Alternatively, cell pellets were resuspended directly in 250 μl of resuspension buffer (Qiagen) to which 5-20 μl of a 1 mg/ml lysostaphin solution were added.

[0548] DNA was isolated using Qiagen miniprep kits or Wizard (Qiagen) miniprep kits according to the instructions provided by the manufacturer.

[0549] The genomic DNA inserts were amplified from the purified plasmids by PCR as follows.

[0550] 1 μl of Qiagen purified plasmid was put into a total reaction volume of 25 μl Qiagen Hot Start PCR mix. For Staphylococcus aureus, the following primers were used in the PCR reaction:

| | |
|---|---|
| pXylT5F: CAGCAGTCTGAGTTATAAAATAG | (SEQ ID NO: 1) |
| LexL TGTTTTATCAGACCGCTT | (SEQ ID NO: 2) |

[0551] Similar methods were conducted for Salmonella typhimurium and Klebsiella pneumoniae. For Salmonella typhimurium and Klebsiella pneumoniae the following primers were used:

| | |
|---|---|
| 5′-TGTTTTATCAGACCGCTT-3′ | (SEQ ID NO: 2) |
| and | |
| 5′-ACAATTTCACACAGCCTC-3′ | (SEQ ID NO: 4) |

[0552] PCR was carried out in a PE GenAmp with the following cycle times:

[0553] Step 1. 95° C. 15 min

[0554] Step 2. 94° C. 45sec

[0555] Step 3. 54° C. 45 sec

[0556] Step 4. 72° C. 1 minute

[0557] Step 5. Return to step 2, 29 times

[0558] Step 6. 72° C. 10 minutes

[0559] Step 7. 4° C. hold

[0560] The PCR products were cleaned using Qiagen Qiaquick PCR plates according to the manufacturer's instructions.

[0561] For Pseudomonas aeruginosa, plasmids from transformant colonies that received a dilution plating score of “2” or greater were isolated to obtain the genomic DNA insert responsible for growth inhibition as follows. Pseudomonas aeruginosa were grown in standard laboratory media (LB with carbenicillin at 100 μg/ml or Streptomycin 40 μg/ml to select for the plasmid). Growth was carried out at 30° C. overnight in 100 ul culture wells in microtiter plates. To amplify insert DNA 2 ul of culture were placed into 25 ul Qiagen Hot Start PCR mix. PCR reactions were in 96 well microtiter plates. For plasmid pEP5S the following primers were used in the PCR reaction:

| | |
|---|---|
| T7L1+: GTCGGCGATATAGGCGCCAGCAACCG | (SEQ ID NO: 5) |
| pStrA3: ATAATCGAGCATGAGTATCATACG | (SEQ ID NO: 6) |

[0562] PCR was carried out in a PE GenAmp with the following cycle times:

[0563] Step 1. 95° C. 15 min

[0564] Step 2. 94° C. 45 sec

[0565] Step 3. 54° C. 45 sec

[0566] Step 4. 72° C. 1 minute

[0567] Step 5. Return to step 2, 29 times

[0568] Step 6. 72° C. 10 minutes

[0569] Step 7. 4° C. hold

[0570] The PCR products were cleaned using Qiagen Qiaquick PCR plates according to the manufacturer's instructions.

[0571] The purified PCR products were then directly cycle sequenced with Qiagen Hot Start PCR mix. The following primers were used in the sequencing reaction:

| | |
|---|---|
| T7/L2: ATGCGTCCGGCGTAGAGGAT | (SEQ ID NO: 7) |

[0572] PCR was carried out in a PE GenAmp with the following cycle times:

[0573] Step 1. 94° C. 15 min

[0574] Step 2. 96° C. 10 sec

[0575] Step 3. 50° C. 5 sec

[0576] Step 4. 60° C. 4 min

[0577] Step 5. Return to step 2, 24 times

[0578] Step 6. 4° C. hold

[0579] The PCR products were cleaned using Qiagen Qiaquick PCR plates according to the manufacturer's instructions.

[0580] For E. faecalis, plasmids from transformant colonies that received a dilution plating score of “2” or greater were isolated to obtain the genomic DNA insert responsible for growth inhibition as follows. E. faecalis were grown in THB 10 μg/ml Erm at 30° C. overnight in 100 ul culture wells in microtiter plates. To amplify insert DNA 2 ul of culture were placed into 25 μl Qiagen Hot Start PCR mix. PCR reactions were in 96 well microtiter plates. The following primers were used in the PCR reaction:

| | |
|---|---|
| pXylT5: CAGCAGTCTGAGTTATAAAATAG | (SEQ ID NO: 1) |
| and the | |

[0581] PCR was carried out in a PE GenAmp with the following cycle times:

[0582] Step 1. 95° C. 15 min

[0583] Step 2. 94° C. 45 sec

[0584] Step 3. 54° C. 45 sec

[0585] Step 4. 72° C. 1 minute

[0586] Step 5. Return to step 2, 29 times

[0587] Step 6. 72° C. 10 minutes

[0588] Step 7. 4° C. hold

[0589] The PCR products were cleaned using Qiagen Qiaquick PCR plates according to the manufacturer's instructions.

[0590] The purified PCR products were then directly cycle sequenced with Qiagen Hot Start PCR mix. The following primers were used in the PCR reaction:

| | |
|---|---|
| pXylT5: CAGCAGTCTGAGTTATAAAATAG | (SEQ ID NO: 1) |

[0591] PCR was carried out in a PE GenAmp with the following cycle times:

[0592] Step 1. 94° C. 15 min

[0593] Step 2. 96° C. 10 sec

[0594] Step 3. 50° C. 5 sec

[0595] Step 4. 60° C. 4 min

[0596] Step 5. Return to step 2, 24 times

[0597] Step 6. 4° C. hold

[0598] The PCR products were cleaned using Qiagen Qiaquick PCR plates according to the manufacturer's instructions.

[0599] The amplified genomic DNA inserts from each of the above procedures were subjected to automated sequencing. Sequence identification numbers (SEQ ID NOs) and clone names for the identified inserts are listed in Table IA and discussed below.

### Example 3

### Comparison of Isolated Nucleic Acids to Known Sequences

[0600] The nucleotide sequences of the subcloned fragments from Staphylococcus aureus, Salmonella typhimurium, Klebsiella pneumoniae, Pseudomonas aeruginosa or Enterococcus faecalis obtained from the expression vectors discussed above were compared to known sequences from Staphylococcus aureus, Salmonella typhimurium, Klebsiella pneumoniae, Pseudomonas aeruginosa or Enterococcus faecalis and other microorganisms as follows. First, to confirm that each clone originated from one location on the chromosome and was not chimeric, the nucleotide sequences of the selected clones were compared against the Staphylococcus aureus, Salmonella typhimurium, Klebsiella pneumoniae, Pseudomonas aeruginosa or Enterococcus faecalis genomic sequences to align the clone to the correct position on the chromosome. The NCBI BLASTN v 2.0.9 program was used for this comparison, and the incomplete Staphylococcus aureus genomic sequences licensed from TIGR, as well as the NCBI nonredundant GenBank database were used as the source of genomic data. Salmonella typhimurium sequences were compared to sequences available from the Genome Sequencing Center (http://genome.wustl.edu/gsc/salmonella.shtml), and the Sanger Centre (http://www.sanger.ac.uk/projects/S_typhi). Pseudomonas aeruginosa sequences were compared to a proprietary database and the NCBI GenBank database. The E. faecalis sequences were compared to a proprietary database.

[0601] The BLASTN analysis was performed using the default parameters except that the filtering was turned off. No further analysis was performed on inserts which resulted from the ligation of multiple fragments.

[0602] In general, antisense molecules and their complementary genes are identified as follows. First, all possible full length open reading frames (ORFs) are extracted from available genomic databases. Such databases include the GenBank nonredundant (nr) database, the unfinished genome database available from TIGR and the PathoSeq database developed by Incyte Genomics. The latter database comprises over 40 annotated bacterial genomes including complete ORF analysis. If databases are incomplete with regard to the bacterial genome of interest, it is not necessary to extract all ORFs in the genome but only to extract the ORFs within the portions of the available genomic sequences which are complementary to the clones of interest. Computer algorithms for identifying ORFs, such as GeneMark, are available and well known to those in the art. Comparison of the clone DNA to the complementary ORF(s) allows determination of whether the clone is a sense or antisense clone. Furthermore, each ORF extracted from the database can be compared to sequences in well annotated databases including the GenBank (nr) protein database, SWISSPROT and the like. A description of the gene or of a closely related gene in a closely related microorganism is often available in these databases. Similar methods are used to identify antisense clones corresponding to genes encoding non-translated RNAs.

[0603] In order to generate the gene identification data compiled in Table IB, each of the cloned nucleic acid sequences discussed above corresponding to SEQ ID NO.s 8-3795 was used to identify the corresponding Staphylococcus aureus, Salmonella typhimurium, Klebsiella pneumoniae, Pseudomonas aeruginosa or Enterococcus faecalis ORFs in the PathoSeq v.4.1 (March 2000 release) database of microbial genomic sequences. For this purpose, the NCBI BLASTN 2.0.9 computer algorithm was used. The default parameters were used except that filtering was turned off. The default parameters for the BLASTN and BLASTX analyses were:

[0604] Expectation value (e)=10

[0605] Alignment view options: pairwise

[0606] Filter query sequence (DUST with BLASTN, SEG with others)=T

[0607] Cost to open a gap (zero invokes behavior)=0

[0608] Cost to extend a gap (zero invokes behavior)=0

[0609] X dropoff value for gapped alignment (in bits) (zero invokes behavior)=0

[0610] Show GI's in deflines=F

[0611] Penalty for a nucleotide mismatch (BLASTN only)=!3

[0612] Reward for a nucleotide match (BLASTN only)=1

[0613] Number of one-line descriptions (V)=500

[0614] Number of alignments to show (B)=250

[0615] Threshold for extending hits=default

[0616] Perform gapped alignment (not available with BLASTX)=T

[0617] Query Genetic code to use=1

[0618] DB Genetic code (for TBLAST[nx] only=1

[0619] Number of processors to use=1

[0620] SeqAlign file

[0621] Believe the query defline=F

[0622] Matrix=BLOSUM62

[0623] Word Size=default

[0624] Effective length of the database (use zero for the real size)=0

[0625] Number of best hits from a region to keep=100

[0626] Length of region used to judge hits=20

[0627] Effective length of the search space (use zero for the real size)=0

[0628] Query strands to search against database (for BLAST[nx] and TBLASTX), 3 is both, 1 is top, 2 is bottom=3

[0629] Produce HTML output=F

[0630] Alternatively, ORFs were identified and refined by conducting a survey of the public and private data sources. Full-length gene protein and nucleotide sequences for these organisms were assembled from various sources. For Pseudomonas aeruginosa, gene sequences were adopted from the Pseudomonas genome sequencing project (downloaded from http://www.pseudomonas.com). For Klebsiella pneumoniae, Staphylococcus aureus, Streptococcus pneumoniae and Salmonella typhi, genomic sequences from PathoSeq v 4.1 (Mar 2000 release) was reanalyzed for ORFs using the gene finding software GeneMark v 2.4a, which was purchased from GenePro Inc. 451 Bishop St., N. W., Suite B, Atlanta, Ga., 30318, USA.

[0631] Antisense clones were identified as those clones for which transcription from the inducible promoter would result in the expression of an RNA antisense to a complementary ORF, intergenic or intragenic sequence. Those clones containing single inserts and that caused growth sensitivity upon induction are listed in Table IA. ORFs complementary to the antisense nucleic acids, and their encoded polypeptides, are listed in Table IB.

[0632] The gene descriptions in the PathoSeq database derive from annotations available in the public sequence databases described above. Where a clone was found to share significant sequence identity to two or more adjacent ORFs, it was listed once for each ORF and the PathoSeq information for each ORF was compiled in Table IB.

[0633] Table IA lists the SEQ ID NOs. and clone names of the inserts which inhibited proliferation and the organism in which the clone was identified. This information was used to identify the ORFs (SEQ ID NOs.: 3796-3800, 3806-4860, 5916-10012) whose gene products (SEQ ID NOs. 3801-3805, 4861-5915, 10013-14110) were inhibited by the nucleic acids comprising the nucleotide sequences of SEQ ID NOs. 8-3795. Table IB lists the clone name, the SEQ ID NO. of the antisense clone (in the column labelled Clone SEQ ID), the PathoSeq Locus containing the clone, the SEQ ID of the ORF identified in PathoSeq (in the column labelled Gene Seq ID (protein), the refined full length gene (column labelled genemarked gene), and the SEQ ID NO of the protein encoded by the refined full length gene (column labelled full length ORF protein SEQ ID).

[0634] Table IC provides a cross reference between PathoSeq Gene Locus listed in Table IB, the SEQ ID NOs. of the PathoSeq proteins and the SEQ ID NOs. of the nucleic acids which encode them.

[0635] It will be appreciated that ORFs may also be identified using databases other than PathoSeq. For example, the ORFs may be identified using the methods described in U.S. Provisional Patent Application Ser. No. 60/191,078, filed Mar. 21, 2000, the disclosure of which is incorporated herein by reference in its entirety.

### Example 4

### Identification of Genes and their Corresponding Operons Affected by Antisense Inhibition

[0636] Once the genes involved in Staphylococcus aureus, Salmonella typhimurium, Klebsiella pneumoniae, Pseudomonas aeruginosa or Enterococcus faecalis proliferation are identified as described above, the operons in which these genes lie may be identified by comparison with known microbial genomes. Since bacterial genes are transcribed in a polycistronic manner, the antisense inhibition of a single gene in an operon might affect the expression of all the other genes on the operon or the genes downstream from the single gene identified. Accordingly, each of the genes contained within an operon may be analyzed for their effect on proliferation.

[0637] Operons are predicted by looking for all adjacent genes in a genomic region that lie in the same orientation with no large noncoding gaps in between. First, full-length ORFs complementary to the antisense molecules are identified as described above. Adjacent ORFs are then identified and their relative orientation determined either by directly analyzing the genomic sequences surrounding the ORFs complementary to the antisense clones or by extracting adjacent ORFs from the collection obtained through whole genome ORF analysis described above followed by ORF alignment. Operons predicted in this way may be confirmed by comparison to the arrangement of the homologous nucleic acids in the Bacillus subtilis complete genome sequence, as reported by the genome database compiled at Institut Pasteur Subtilist Release RI 5.1 (Jun. 24, 1999) which can be found at htt ://bioweb.pasteur.fr/GenoList/SubtiList/. The Bacillus subtilis genome is the only fully sequenced and annotated genome from a Gram-positive microorganism, and appears to have a high level of similarity to Staphylococcus aureus both at the level of conservation of gene sequence and genomic organization including operon structure. Operons for Salmonella typhimurium and Klebsiella pneumoniae may be identified by comparison with E. coli, Haemophilus, or Pseudomonas sequences. The Pseudomonas aeruginosa web site (http://www.pseudomonas.com) can also be used to help predict operon organization in this bacterium.

[0638] Extensive DNA sequences of Salmonella typhimurium are available through the Salmonella Genome Center (Washington University, St. Louis, Mo.) the Sanger Centre (United Kingdom) and the PathoSeq database (Incyte ). Annotation of some of the DNA sequences in some of the aforementioned databases is lacking, but comparisons may be made to E. coli using tools such as BLASTX.

[0639] Public or proprietary databases may be used to analyzed E. faecalis sequences as well as sequences from the organisms listed above.

[0640] The results of such an analysis as applied to clone number S1M10000001A05 from Staphylococcus aureus are listed in Table II. Table II lists the SEQ ID NOs. of the Staphylococcus aureus genes involved in proliferation, the SEQ ID NOs. of the proteins encoded by these genes, and the clone name containing the nucleic acid which inhibits Staphylococcus aureus proliferation. In addition, Table II lists those other genes located on the operon included in the Staphylococcus aureus genomic sequence determined as described above. For each of the genes described in Table II, the microoganism containing the most closely related homolog, identified in one of the public databases, is also indicated in Table II.

TABLE II

| | | | | | Organism |
|---|---|---|---|---|---|
| | | | | | used for |
| DNA | Protein | Molecule | | | identification |
| Seq ID | Seq ID | number | Clone name | Gene | of gene |
| 3796 | 3801 | SaXA001 | S1M10000001A05 | ytmI | B. subtilis |
| 3797 | 3802 | | | nirR | S. carnosus |
| 3798 | 3803 | | | nirB | S. carnosus |
| 3799 | 3804 | | | nirD | S. carnosus |
| 3800 | 3805 | | | sirB | S. carnosus |

[0641] The preceding analyses may be conducted for each of the sequences which are listed in Table IA which inhibit proliferation and the ORFs listed in Table IB and Table IC. Once the full length ORFs and/or the operons containing them have been identified using the methods described above, they can be obtained from a genomic library by performing a PCR amplification using primers at each end of the desired sequence. Those skilled in the art will appreciate that a comparison of the ORFs to homologous sequences in other cells or microorganisms will facilitate confirmation of the start and stop codons at the ends of the ORFs.

[0642] In some embodiments, the primers may contain restriction sites which facilitate the insertion of the gene or operon into a desired vector. For example, the gene may be inserted into an expression vector and used to produce the proliferation-required protein as described below. Other methods for obtaining the full length ORFs and/or operons are familiar to those skilled in the art. For exmaple, natural restriction sites may be employed to insert the full length ORFs and/or operons into a desired vector.

### Example 5

### Identification of Individual Genes within an Operon Required for Proliferation

[0643] The following example illustrates a method for determining if a targeted gene within an operon is required for cell proliferation by replacing the targeted allele in the chromosome with an in-frame deletion of the coding region of the targeted gene.

[0644] Deletion inactivation of a chromosomal copy of a gene in Staphylococcus aureus, Salmonella typhimurium, Klebsiella pneumoniae, Pseudomonas aeruginosa, Enterococcus faecalis, Escherichia coli, Enterococcus faecalis, Haemophilus influenzae, Helicobacter pylori, or Salmonella typhi can be accomplished by integrative gene replacement. The principles of this method were described in Xia, M., et al. 1999 Plasmid 42:144-149 and Hamilton, C. M., et al 1989. J Bacteriol. 171: 4617-4622, the disclosures of which are incorporated herein by reference in their entireties. A similar gene disruption method is available for Pseudomonas aeruginosa, except the counter selectable marker is sacB (Schweizer, H. P., Klassen, T. and Hoang, T. (1996) Mol. Biol. of Pseudomonas. ASM press, 229-237, the disclosure of which is incorporated herein by reference in its entirety). In this approach, a mutant allele of the targeted gene is constructed by way of an in-frame deletion and introduced into the chromosome using a suicide vector. This results in a tandem duplication comprising a deleted (null) allele and a wild type allele of the target gene. Cells in which the vector sequences have been deleted are isolated using a counter-selection technique. Removal of the vector sequence from the chromosomal insertion results in either restoration of the wild-type target sequence or replacement of the wild type sequence with the deletion (null) allele. E. faecalis genes can be disrupted using a suicide vector that contains an internal fragment to a gene of interest. With the appropriate selection this plasmid will homologously recombine into the chromosome (Nallapareddy, S. R., X. Qin, G. M. Weinstock, M. Hook, B. E. Murray. 2000. Infect. Immun. 68:5218-5224, the disclosure of which is incorporated herein by reference).

[0645] The resultant population of Staphylococcus aureus, Salmonella typhimurium, Klebsiella pneumoniae, Pseudomonas aeruginosa, Enterococcus faecalis, Escherichia coli, Enterococcus faecalis, Haemophilus influenzae, Helicobacter pylori, or Salmonella typhi colonies can then be evaluated to determine whether the target sequence is required for proliferation by PCR amplification of the affected target sequence. If the targeted gene is not required for proliferation, then PCR analysis will show that roughly equal numbers of colonies have retained either the wild-type or the mutant allele. If the targeted gene is required for proliferation, then only wild-type alleles will be recovered in the PCR analysis.

[0646] The method of cross-over PCR is used to generate the mutant allele by amplification of nucleotide sequences flanking but not including the coding region of the gene of interest, using specifically designed primers such that overlap between the resulting two PCR amplification products allows them to hybridize. Further PCR amplification of this hybridization product using primers representing the extreme 5′ and 3′ ends can produce an amplification product containing an in-frame deletion of the coding region but retaining substantial flanking sequences.

[0647] For Staphylococcus aureus, this amplification product is subcloned into the suicide vector pSA3182 (Xia, M., et al. 1999 Plasmid 42:144-149, the disclosure of which is incorporated herein by reference in its entirety) which is host-dependent for autonomous replication. This vector includes a tetC tetracycline-resistance marker and the origin of replication of the well-known Staphylococcus aureus plasmid pT181 (Mojumdar, M and Kahn, S. A., Characterisation of the Tetracycline Resistance Gene of Plasmid pT181, J. Bacteriol. 170: 5522 (1988), the disclosure of which is incorporated herein by reference in its entirety). The vector lacks the repC gene which is required for autonomous replication of the vector at the pT181 origin. This vector can be propagated in a Staphylococcus aureus host strain such as SA3528, which expresses repC in trans. Once the amplified truncated target gene sequence is cloned and propagated in the pSA3182 vector, it can then be introduced into a repC minus strain such as RN4220 (Kreiswirth, B. N. et al., The Toxic Shock Syndrome Exotoxin Structural Gene is Not Detectably Transmitted by a Prophage, Nature 305:709-712 (1983), the disclosure of which is incorporated herein by reference in its entirety) by electroporation with selection for tetracycline resistance. In this strain, the vector must integrate by homologous recombination at the targeted gene in the chromosome to impart drug resistance. This results in a inserted truncated copy of the allele, followed by pSA3182 vector sequence, and finally an intact and functional allele of the targeted gene.

[0648] Once a tetracycline resistant Staphylococcus aureus strain is isolated using the above technique and shown to include truncated and wild-type alleles of the targeted gene as described above, a second plasmid, pSA7592 (Xia, M., et al. 1999 Plasmid 42:144-149, the disclosure of which is incorporated herein by reference in its entirety) is introduced into the strain by electroporation. This gene includes an erythromycin resistance gene and a repC gene that is expressed at high levels. Expression of repC in these transformants is toxic due to interference of normal chromosomal replication at the integrated pT181 origin of replication. This selects for strains that have removed the vector sequence by homologous recombination, resulting in either of two outcomes: The selected cells either possess a wild-type allele of the targeted gene or a gene in which the wild-type allele has been replaced by the engineered in-frame deletion of the truncated allele.

[0649] PCR amplification can be used to determine the genetic outcome of the above process in the resulting erythromycin resistant, tet sensitive transformant colonies. If the targeted gene is not required for cellular replication, then PCR evidence for both wild-type and mutant alleles will be found among the population of resultant transformants. However, if the targeted gene is required for cellular proliferation, then only the wild-type form of the gene will be evident among the resulting transformants.

[0650] Similarly, for Salmonella typhimurium, Klebsiella pneumoniae, Pseudomonas aeruginosa or Enterococcus faecalis, Escherichia coli Enterococcus faecalis, Haemophilus influenzae, Helicobacter pylori, or Salmonella typhi the PCR products containing the mutant allele of the target sequence may be introduced into an appropriate knockout vector and cells in which the wild type target has been disrupted are selected using the appropriate methodology.

[0651] The above methods have the advantage that insertion of an in-frame deletion mutation is far less likely to cause downstream polar effects on genes in the same operon as the targeted gene. However, it will be appreciated that other methods for disrupting Staphylococcus aureus, Salmonella typhimurium, Klebsiella pneumoniae, Pseudomonas aeruginosa, Enterococcus faecalis, Escherichia coli, Enterococcus faecalis, Haemophilus influenzae, Helicobacter pylori, or Salmonella typhi genes which are familiar to those skilled in the art may also be used.

[0652] Each gene in the operon may be disrupted using the methodology above to determine whether it is required for proliferation.

### Example 6

### Expression of the Proteins Encoded by Genes Identified as Required for Staphylococcus aureus, Salmonella typhimurium, Klebsiella pneumoniae, Pseudomonas aeruginosa, Enterococcus faecalis, Escherichia coli, Enterococcus faecalis, Haemophilus influenzae, Helicobacter pylori, or Salmonella typhi Proliferation

[0653] The following is provided as one exemplary method to express the proliferation-required proteins idenfied as described above. The proliferation-required proteins may be expressed using any of the bacterial, insect, yeast, or mammalian expression systems known in the art. In some embodiments, the proliferation-required proteins encoded by the identified nucleotide sequences described above (including the proteins of SEQ ID NOs.: 3801-3805,4861-5915, 10013-14110 encoded by the nucleic acids of SEQ ID NOs.: 3796-3800, 3806-4860, 5916-10012 are expressed using expression systems designed either for E. coli or for Staphylococcus aureus, Salmonella typhimurium, Klebsiella pneumoniae, Pseudomonas aeruginosa, Enterococcus faecalis, Enterococcus faecalis, Haemophilus influenzae, Helicobacter pylori, or Salmonella typhi. First, the initiation and termination codons for the gene are identified. If desired, methods for improving translation or expression of the protein are well known in the art. For example, if the nucleic acid encoding the polypeptide to be expressed lacks a methionine codon to serve as the initiation site, a strong Shine-Delgarno sequence, or a stop codon, these nucleotide sequences can be added. Similarly, if the identified nucleic acid lacks a transcription termination signal, this nucleotide sequence can be added to the construct by, for example, splicing out such a sequence from an appropriate donor sequence. In addition, the coding sequence may be operably linked to a strong constitutive promoter or an inducible promoter if desired. The identified nucleic acid or portion thereof encoding the polypeptide to be expressed is obtained by, for example, PCR from the bacterial expression vector or genome using oligonucleotide primers complementary to the identified nucleic acid or portion thereof and containing restriction endonuclease sequences appropriate for inserting the coding sequences into the vector such that the coding sequences can be expressed from the vector's promoter. Alternatively, other conventional cloning techniques may be used to place the coding sequence under the control of the promoter. In some embodiments, a termination signal may be located downstream of the coding sequence such that transcription of the coding sequence ends at an appropriate position.

[0654] Several expression vector systems for protein expression in E. coli are well known and available to those knowledgeable in the art. The coding sequence may be inserted into any of these vectors and placed under the control of the promoter. The expression vector may then be transformed into DH5α or some other E. coli strain suitable for the over expression of proteins.

[0655] Alternatively, an expression vector encoding a protein required for proliferation of Staphylococcus aureus, Salmonella typhimurium, Klebsiella pneumoniae, Pseudomonas aeruginosa, Enterococcus faecalis, Escherichia coli, Enterococcus faecalis, Haemophilus influenzae, Helicobacter pylori, or Salmonella typhi may be introduced into Staphylococcus aureus, Salmonella typhimurium, Klebsiella pneumoniae, Pseudomonas aeruginosa, Enterococcus faecalis, Escherichia coli, Enterococcus faecalis, Haemophilus influenzae, Helicobacter pylori, or Salmonella typhi. Protocols for introducing nucleic acids into these organisms are well known in the art. For example, the protocols described in J. C. Lee “Electroporation of Staphylococci” from Methods in Molecular Biology vol 47: Electroporation Protocols for Microorganisms Edited by: J. A. Nickoloff Humana Press Inc., Totowa, N.J. pp209-216, the disclosure of which is incorporated herein by reference in its entirety, may be used to introduce nucleic acids into Staphylococcus aureus. Nucleic acids may also be introduced into Salmonella typhimurium, Klebsiella pneumoniae, Pseudomonas aeruginosa or Enterococcus faecalis using methods familiar to those skilled in the art. Positive transformants are selected after growing the transformed cells on plates containing an antibiotic to which the vector confers resistance. In one embodiment, Staphylococcus aureus is transformed with an expression vector in which the coding sequence is operably linked to the T5 promoter containing a xylose operator such that expression of the encoded protein is inducible with xylose.

[0656] In one embodiment, the protein is expressed and maintained in the cytoplasm as the native sequence. In an alternate embodiment, the expressed protein can be modified to include a protein tag that allows for differential cellular targeting, such as to the periplasmic space of Gram-negative or Gram-positive expression hosts or to the exterior of the cell (i.e., into the culture medium). In some embodiments, the osmotic shock cell lysis method described in Chapter 16 of Current Protocols in Molecular Biology, Vol. 2, (Ausubel, et al., Eds.) John Wiley & Sons, Inc. (1997) may be used to liberate the polypeptide from the cell. In still another embodiment, such a protein tag could also facilitate purification of the protein from either fractionated cells or from the culture medium by affinity chromatography. Each of these procedures can be used to express a proliferation-required protein.

[0657] Expressed proteins, whether in the culture medium or liberated from the periplasmic space or the cytoplasm, are then purified or enriched from the supernatant using conventional techniques such as ammonium sulfate precipitation, standard chromatography, immunoprecipitation, immunochromatography, size exclusion chromatography, ion exchange chromatography, and HPLC. Alternatively, the polypeptide may be secreted from the host cell in a sufficiently enriched or pure state in the supernatant or growth media of the host cell to permit it to be used for its intended purpose without further enrichment. The purity of the protein product obtained can be assessed using techniques such as SDS PAGE, which is a protein resolving technique well known to those skilled in the art. Coomassie, silver staining or staining with an antibody are typical methods used to visualize the protein of interest.

[0658] Antibodies capable of specifically recognizing the protein of interest can be generated using synthetic peptides using methods well known in the art. See, Antibodies: A Laboratory Manual, (Harlow and Lane, Eds.) Cold Spring Harbor Laboratory (1988). For example, 15-mer peptides having an amino acid sequence encoded by the appropriate identified gene sequence of interest or portion thereof can be chemically synthesized. The synthetic peptides are injected into mice to generate antibodies to the polypeptide encoded by the identified nucleic acid sequence of interest or portion thereof. Alternatively, samples of the protein expressed from the expression vectors discussed above can be purified and subjected to amino acid sequencing analysis to confirm the identity of the recombinantly expressed protein and subsequently used to raise antibodies. An Example describing in detail the generation of monoclonal and polyclonal antibodies appears in Example 7.

[0659] The protein encoded by the identified nucleic acid of interest or portion thereof can be purified using standard immunochromatography techniques. In such procedures, a solution containing the secreted protein, such as the culture medium or a cell extract, is applied to a column having antibodies against the secreted protein attached to the chromatography matrix. The secreted protein is allowed to bind the immunochromatography column. Thereafter, the column is washed to remove non-specifically bound proteins. The specifically-bound secreted protein is then released from the column and recovered using standard techniques. These procedures are well known in the art.

[0660] In an alternative protein purification scheme, the identified nucleic acid of interest or portion thereof can be incorporated into expression vectors designed for use in purification schemes employing chimeric polypeptides. In such strategies the coding sequence of the identified nucleic acid of interest or portion thereof is inserted in-frame with the gene encoding the other half of the chimera. The other half of the chimera can be maltose binding protein (MBP) or a nickel binding polypeptide encoding sequence. A chromatography matrix having maltose or nickel attached thereto is then used to purify the chimeric protein. Protease cleavage sites can be engineered between the MBP gene or the nickel binding polypeptide and the identified expected gene of interest, or portion thereof. Thus, the two polypeptides of the chimera can be separated from one another by protease digestion.

[0661] One useful expression vector for generating maltose binding protein fuision proteins is pMAL (New England Biolabs), which encodes the malE gene. In the pMa1 protein fusion system, the cloned gene is inserted into a pMa1 vector downstream from the malE gene. This results in the expression of an MBP-fusion protein. The fusion protein is purified by affinity chromatography. These techniques as described are well known to those skilled in the art of molecular biology.

### Example 7

### Production of an Antibody to an Isolated Staphylococcus aureus, Salmonella typhimurium, Klebsiella pneumoniae, Pseudomonas aeruginosa Enterococcus faecalis, Escherichia coli, Enterococcus faecalis, Haemophilus influenzae, Helicobacter pylori, or Salmonella typhi Protein

[0662] Substantially pure protein or polypeptide (including one of the polypeptides of SEQ ID NOs.: 3801-3805, 4861-5915, 10013-14110) is isolated from the transformed cells as described in Example 6. The concentration of protein in the final preparation is adjusted, for example, by concentration on a 10,000 molecular weight cut off AMICON filter device (Millipore, Bedford, Mass.), to the level of a few micrograms/ml. Monoclonal or polyclonal antibody to the protein can then be prepared as follows:

[0663] Monoclonal Antibody Production by Hybridoma Fusion

[0664] Monoclonal antibody to epitopes of any of the peptides identified and isolated as described can be prepared from murine hybridomas according to the classical method of Kohler, G. and Milstein, C., Nature 256:495 (1975) or any of the well-known derivative methods thereof. Briefly, a mouse is repetitively inoculated with a few micrograms of the selected protein or peptides derived therefrom over a period of a few weeks. The mouse is then sacrificed, and the antibody-producing cells of the spleen isolated. The spleen cells are fused by means of polyethylene glycol with mouse myeloma cells, and the excess unfused cells are destroyed by growth of the system on selective medium comprising aminopterin (HAT medium). The successfully-fused cells are diluted and aliquots of the dilution placed in wells of a microtiter plate where growth of the culture is continued. Antibody-producing clones are identified by detection of antibody in the supernatant fluid of the wells by immunoassay procedures, such as ELISA, as described by Engvall, E., “Enzyme immunoassay ELISA and EMIT,” Meth. Enzymol. 70:419 (1980), and derivative methods thereof. Selected positive clones can be expanded and their monoclonal antibody product harvested for use. Detailed procedures for monoclonal antibody production are described in Davis, L. et al. Basic Methods in Molecular Biology Elsevier, New York. Section 21-2.

[0665] Polyclonal Antibody Production by Immunization

[0666] Polyclonal antiserum containing antibodies to heterogeneous epitopes of a single protein or a peptide can be prepared by immunizing suitable animals with the expressed protein or peptides derived therefrom described above, which can be unmodified or modified to enhance immunogenicity. Effective polyclonal antibody production is affected by many factors related both to the antigen and the host species. For example, small molecules tend to be less immunogenic than larger molecules and can require the use of carriers and adjuvant. Also, host animals vary in response to site of inoculations and dose, with both inadequate or excessive doses of antigen resulting in low titer antisera. Small doses (ng level) of antigen administered at multiple intradermal sites appears to be most reliable. An effective immunization protocol for rabbits can be found in Vaitukaitis, J. et al. J. Clin. Endocrinol. Metab. 33:988-991 (1971).

[0667] Booster injections can be given at regular intervals, and antiserum harvested when antibody titer thereof, as determined semi-quantitatively, for example, by double immunodiffusion in agar against known concentrations of the antigen, begins to fall. See, for example, Ouchterlony, O. et al., Chap. 19 in: Handbook of Experimental Immunology D. Wier (ed) Blackwell (1973). Plateau concentration of antibody is usually in the range of 0.1 to 0.2 mg/ml of serum (about 12 EM). Affinity of the antisera for the antigen is determined by preparing competitive binding curves, as described, for example, by Fisher, D., Chap. 42 in: Manual of Clinical Immunology, 2d Ed. (Rose and Friedman, Eds.) Amer. Soc. For Microbiol., Washington, D.C. (1980).

[0668] Antibody preparations prepared according to either protocol are useful in quantitative immunoassays which determine concentrations of antigen-bearing substances in biological samples; they are also used semi-quantitatively or qualitatively to identify the presence of antigen in a biological sample. The antibodies can also be used in therapeutic compositions for killing bacterial cells expressing the protein.

### Example 8

### Screening Chemical Libraries

[0669] A. Protein-based Assays

[0670] Having isolated and expressed bacterial proteins shown to be required for bacterial proliferation, the present invention further contemplates the use of these expressed target proteins in assays to screen libraries of compounds for potential drug candidates. The generation of chemical libraries is well known in the art. For example, combinatorial chemistry can be used to generate a library of compounds to be screened in the assays described herein. A combinatorial chemical library is a collection of diverse chemical compounds generated by either chemical synthesis or biological synthesis by combining a number of chemical “building block” reagents. For example, a linear combinatorial chemical library such as a polypeptide library is formed by combining amino acids in every possible combination to yield peptides of a given length. Millions of chemical compounds theoretically can be synthesized through such combinatorial mixings of chemical building blocks. For example, one commentator observed that the systematic, combinatorial mixing of 100 interchangeable chemical building blocks results in the theoretical synthesis of 100 million tetrameric compounds or 10 billion pentameric compounds. (Gallop et al., “Applications of Combinatorial Technologies to Drug Discovery, Background and Peptide Combinatorial Libraries,” Journal of Medicinal Chemistry, Vol. 37, No. 9, 1233-1250 (1994). Other chemical libraries known to those in the art may also be used, including natural product libraries.

[0671] Once generated, combinatorial libraries can be screened for compounds that possess desirable biological properties. For example, compounds which may be useful as drugs or to develop drugs would likely have the ability to bind to the target protein identified, expressed and purified as discussed above. Further, if the identified target protein is an enzyme, candidate compounds would likely interfere with the enzymatic properties of the target protein. For example, the enzymatic function of a target protein may be to serve as a protease, nuclease, phosphatase, dehydrogenase, transporter protein, transcriptional enzyme, and any other type of enzyme known or unknown. Thus, the present invention contemplates using the protein products described above to screen combinatorial chemical libraries.

[0672] In one example, the target protein is a serine protease and the substrate of the enzyme is known. The present example is directed towards the analysis of libraries of compounds to identify compounds that function as inhibitors of the target enzyme. First, a library of small molecules is generated using methods of combinatorial library formation well known in the art. U.S. Pat. Nos. 5,463,564 and 5,574,656, to Agrafiotis, et al., entitled “System and Method of Automatically Generating Chemical Compounds with Desired Properties,” the disclosures of which are incorporated herein by reference in their entireties, are two such teachings. Then the library compounds are screened to identify those compounds that possess desired structural and functional properties. U.S. Pat. No. 5,684,711, the disclosure of which is incorporated herein by reference in its entirety, also discusses a method for screening libraries.

[0673] To illustrate the screening process, the target polypeptide and chemical compounds of the library are combined with one another and permitted to interact with one another. A labeled substrate is added to the incubation. The label on the substrate is such that a detectable signal is emitted from the products of the substrate molecules that result from the activity of the target polypeptide. The emission of this signal permits one to measure the effect of the combinatorial library compounds on the enzymatic activity of target enzymes by comparing it to the signal emitted in the absence of combinatorial library compounds. The characteristics of each library compound are encoded so that compounds demonstrating activity against the enzyme can be analyzed and features common to the various compounds identified can be isolated and combined into future iterations of libraries.

[0674] Once a library of compounds is screened, subsequent libraries are generated using those chemical building blocks that possess the features shown in the first round of screen to have activity against the target enzyme. Using this method, subsequent iterations of candidate compounds will possess more and more of those structural and functional features required to inhibit the function of the target enzyme, until a group of enzyme inhibitors with high specificity for the enzyme can be found. These compounds can then be further tested for their safety and efficacy as antibiotics for use in manmmals.

[0675] It will be readily appreciated that this particular screening methodology is exemplary only. Other methods are well known to those skilled in the art. For example, a wide variety of screening techniques are known for a large number of naturally-occurring targets when the biochemical function of the target protein is known. For example, some techniques involve the generation and use of small peptides to probe and analyze target proteins both biochemically and genetically in order to identify and develop drug leads. Such techniques include the methods described in PCT publications No. WO9935494, WO9819162, WO9954728, the disclosures of which are incorporated herein by reference in their entireties. Other techniques utilize natural product libraries or libraries of larger molecules such as proteins.

[0676] It will be appreciated that the above protein-based assays may be performed with any of the proliferation-required polypeptides from Staphylococcus aureus, Salmonella typhimurium, Klebsiella pneumoniae, Pseudomonas aeruginosa, Enterococcus faecalis, Escherichia coli, Enterococcus faecalis, Haemophilus influenzae, Helicobacter pylori, or Salmonella typhi (including the polypeptides of SEQ ID NOs.: 3801-3805, 4861-5915, 10013-14110) or portions thereof. In addition, the above protein-based assays may be performed with homologous polypeptides or portions thereof.

[0677] B. Cell-based Assays

[0678] Current cell-based assays used to identify or to characterize compounds for drug discovery and development frequently depend on detecting the ability of a test compound to modulate the activity of a target molecule located within a cell or located on the surface of a cell. An advantage of cell-based assays is that they allow the effect of a compound on a target molecule's activity to be detected within the physiologically relevant environment of the cell as opposed to an in vitro environment. Most often such target molecules are proteins such as enzymes, receptors and the like. However, target molecules may also include other molecules such as DNAs, lipids, carbohydrates and RNAs including messenger RNAs, ribosomal RNAs, tRNAs, regulatory RNAs and the like. A number of highly sensitive cell-based assay methods are available to those of skill in the art to detect binding and interaction of test compounds with specific target molecules. However, these methods are generally not highly effective when the test compound binds to or otherwise interacts with its target molecule with moderate or low affinity. In addition, the target molecule may not be readily accessible to a test compound in solution, such as when the target molecule is located inside the cell or within a cellular compartment. Thus, current cell-based assay methods are limited in that they are not effective in identifying or characterizing compounds that interact with their targets with moderate to low affinity or compounds that interact with targets that are not readily accessible.

[0679] The cell-based assay methods of the present invention have substantial advantages over current cell-based assays. These advantages derive from the use of sensitized cells in which the level or activity of at least one proliferation-required gene product (the target molecule) has been specifically reduced to the point where the presence or absence of its function becomes a rate-determining step for cellular proliferation. Bacterial, fungal, plant, or animal cells can all be used with the present method. Such sensitized cells become much more sensitive to compounds that are active against the affected target molecule. Thus, cell-based assays of the present invention are capable of detecting compounds exhibiting low or moderate potency against the target molecule of interest because such compounds are substantially more potent on sensitized cells than on non-sensitized cells. The effect may be such that a test compound may be two to several times more potent, at least 10 times more potent, at least 20 times more potent, at least 50 times more potent, at least 100 times more potent, at least 1000 times more potent, or even more than 1000 times more potent when tested on the sensitized cells as compared to the non-sensitized cells. The proliferation-required nucleic acids or polypeptides from Staphylococcus aureus, Salmonella typhimurium, Klebsiella pneumoniae, Pseudomonas aeruginosa, Enterococcus faecalis, Escherichia coli, Enterococcus faecalis, Haemophilus influenzae, Helicobacter pylori, or Salmonella typhi, or portions thereof, may be employed in any of the cell-based assays described herein. Similarly, homologous coding nucleic acids, homologous antisense nucleic acids, or homologous polypeptides or portions of the homologous nucleic acids or homologous polypeptides, may be employed in any of the cell-based assays described herein.

[0680] Due in part to the increased appearance of antibiotic resistance in pathogenic microorganisms and to the significant side-effects associated with some currently used antibiotics, novel antibiotics acting at new targets are highly sought after in the art. Yet, another limitation in the current art related to cell-based assays is the problem of repeatedly identifying hits against the same kinds of target molecules in the same limited set of biological pathways. This may occur when compounds acting at such new targets are discarded, ignored or fail to be detected because compounds acting at the “old” targets are encountered more frequently and are more potent than compounds acting at the new targets. As a result, the majority of antibiotics in use currently interact with a relatively small number of target molecules within an even more limited set of biological pathways.

[0681] The use of sensitized cells of the current invention provides a solution to the above problem in two ways. First, desired compounds acting at a target of interest, whether a new target or a previously known but poorly exploited target, can now be detected above the “noise” of compounds acting at the “old” targets due to the specific and substantial increase in potency of such desired compounds when tested on the sensitized cells of the current invention. Second, the methods used to sensitize cells to compounds acting at a target of interest may also sensitize these cells to compounds acting at other target molecules within the same biological pathway. For example, expression of an antisense molecule to a gene encoding a ribosomal protein is expected to sensitize the cell to compounds acting at that ribosomal protein and may also sensitize the cells to compounds acting at any of the ribosomal components (proteins or rRNA) or even to compounds acting at any target which is part of the protein synthesis pathway. Thus an important advantage of the present invention is the ability to reveal new targets and pathways that were previously not readily accessible to drug discovery methods.

[0682] Sensitized cells of the present invention are prepared by reducing the activity or level of a target molecule. The target molecule may be a gene product, such as an RNA or polypeptide produced from the proliferation-required nucleic acids from Staphylococcus aureus, Salmonella typhimurium, Klebsiella pneumoniae, Pseudomonas aeruginosa, Enterococcus faecalis, Escherichia coli, Enterococcus faecalis, Haemophilus influenzae, Helicobacter pylori, or Salmonella typhi (including a gene product produced from the nucleic acids of SEQ ID NOs.: 3796-3800, 3806-4860, 5916-10012, such as the polypeptides of SEQ ID NOs.: 3801-3805, 4861-5915, 10013-14110) or from homologous nucleic acids. For example, the target molecule may be one of the polypeptides of SEQ ID NOs. 3801-3805, 4861-5915, 10013-14110 or a homologous polypeptide. Alternatively, the target may be a gene product such as an RNA or polypeptide which is produced from a sequence within the same operon as the proliferation-required nucleic acids from Staphylococcus aureus, Salmonella typhimurium, Klebsiella pneumoniae, Pseudomonas aeruginosa, Enterococcus faecalis, Escherichia coli, Enterococcus faecalis, Haemophilus influenzae, Helicobacter pylori, or Salmonella typhi or from homologous nucleic acids. In addition, the target may be an RNA or polypeptide in the same biological pathway as the proliferation-required nucleic acids from Staphylococcus aureus, Salmonella typhimurium, Klebsiella pneumoniae, Pseudomonas aeruginosa, Enterococcus faecalis, Escherichia coli, Enterococcus faecalis, Haemophilus influenzae, Helicobacter pylori, or Salmonella typhi or from homologous nucleic acids. Such biological pathways include, but are not limited to, enzymatic, biochemical and metabolic pathways as well as pathways involved in the production of cellular structures such the cell wall.

[0683] Current methods employed in the arts of medicinal and combinatorial chemistries are able to make use of structure-activity relationship information derived from testing compounds in various biological assays including direct binding assays and cell-based assays. Occasionally compounds are directly identified in such assays that are sufficiently potent to be developed as drugs. More often, initial hit compounds exhibit moderate or low potency. Once a hit compound is identified with low or moderate potency, directed libraries of compounds are synthesized and tested in order to identify more potent leads. Generally these directed libraries are combinatorial chemical libraries consisting of compounds with structures related to the hit compound but containing systematic variations including additions, subtractions and substitutions of various structural features. When tested for activity against the target molecule, structural features are identified that either alone or in combination with other features enhance or reduce activity. This information is used to design subsequent directed libraries containing compounds with enhanced activity against the target molecule. After one or several iterations of this process, compounds with substantially increased activity against the target molecule are identified and may be further developed as drugs. This process is facilitated by use of the sensitized cells of the present invention since compounds acting at the selected targets exhibit increased potency in such cell-based assays, thus; more compounds can now be characterized providing more useful information than would be obtained otherwise.

[0684] Thus, it is now possible using cell-based assays of the present invention to identify or characterize compounds that previously would not have been readily identified or characterized including compounds that act at targets that previously were not readily exploited using cell-based assays. The process of evolving potent drug leads from initial hit compounds is also substantially improved by the cell-based assays of the present invention because, for the same number of test compounds, more structure-function relationship information is likely to be revealed.

[0685] The method of sensitizing a cell entails selecting a suitable gene or operon. A suitable gene or operon is one whose transcription and/or expression is required for the proliferation of the cell to be sensitized. The next step is to introduce into the cells to be sensitized, an antisense RNA capable of hybridizing to the suitable gene or operon or to the RNA encoded by the suitable gene or operon. Introduction of the antisense RNA can be in the form of a vector in which antisense RNA is produced under the control of an inducible promoter. The amount of antisense RNA produced is modulated by varying an inducer concentration to which the cell is exposed and thereby varying the activity of the promoter driving transcription of the antisense RNA. Thus, cells are sensitized by exposing them to an inducer concentration that results in a sub-lethal level of antisense RNA expression. The requisite maount of inducer may be derived empiracally by one of skill in the art.

[0686] In one embodiment of the cell-based assays, antisense nucleic acids complementary to the identified Staphylococcus aureus, Salmonella typhimurium, Klebsiella pneumoniae, Pseudomonas aeruginosa, Enterococcus faecalis, Escherichia coli, Enterococcus faecalis, Haemophilus influenzae, Helicobacter pylori, or Salmonella typhi nucleotide sequences or portions thereof (including antisense nucleic acids comprising a nucleotide sequence complementary to one of SEQ ID NOs.: 3796-3800, 3806-4860, 5916-10012, and the antisense nucleic acids of SEQ ID NOs.: 8-3795 or antisense nucleic acids comprising a nucleotide sequence complementary to portions of the foregoing nucleic acids thereof), antisense nucleic complementary to homologous coding nucleic acids or portions thereof or homologous antisense nucleic acids are used to inhibit the production of a proliferation-required protein. Vectors producing antisense RNA complementary to identified genes required for proliferation, or portions thereof, are used to limit the concentration of a proliferation-required protein without severely inhibiting growth. The proliferation-required protein may be one of the proteins of SEQ ID NOs.: 3801-3805, 4861-5915, 10013-14110 or a homologous polypeptide. To achieve that goal, a growth inhibition dose curve of inducer is calculated by plotting various doses of inducer against the corresponding growth inhibition caused by the antisense expression. From this curve, the concentration of inducer needed to achieve various percentages of antisense induced growth inhibition, from 1 to 100% can be determined.

[0687] A variety of different regulatable promoters may be used to produce the antisense nucleic acid. Transcription from the regulatable promoters may be modulated by controlling the activity of a transcription factor repressor which acts at the regulatable promoter. For example, if transcription is modulated by affecting the activity of a repressor, the choice of inducer to be used depends on the repressor/operator responsible for regulating transcription of the antisense nucleic acid. If the regulatable promoter comprises a T5 promoter fused to a xylO (xylose operator; e.g. derived from Staphylococcus xylosis (Schnappinger, D. et al., FEMS Microbiol. Let. 129: 121-128 (1995), the disclosure of which is incorporated herein by reference in its entirety) then transcription of the antisense nucleic acid may be regulated by a xylose repressor. The xylose repressor may be provided by ectoptic expression within an S. aureus cell of an exogenous xylose repressor gene, e.g. derived from S. xylosis DNA. In such cases transcription of antisense RNA from the promoter is inducible by adding xylose to the medium and the promoter is thus “xylose inducible.” Similarly, IPTG inducible promoters may be used. For example, the highest concentration of the inducer that does not reduce the growth rate significantly can be estimated from the curve. Cellular proliferation can be monitored by growth medium turbidity via OD measurements. In another example, the concentration of inducer that reduces growth by 25% can be predicted from the curve. In still another example, a concentration of inducer that reduces growth by 50% can be calculated. Additional parameters such as colony forming units (cfu) can be used to measure cellular viability.

[0688] Cells to be assayed are exposed to the above-determined concentrations of inducer. The presence of the inducer at this sub-lethal concentration reduces the amount of the proliferation required gene product to a sub-optimal amount in the cell that will still support growth. Cells grown in the presence of this concentration of inducer are therefore specifically more sensitive to inhibitors of the proliferation-required protein or RNA of interest or to inhibitors of proteins or RNAs in the same biological pathway as the proliferation-required protein or RNA of interest but not to inhibitors of unrelated proteins or RNAs.

[0689] Cells pretreated with sub-inhibitory concentrations of inducer and thus containing a reduced amount of proliferation-required target gene product are then used to screen for compounds that reduce cell growth. The sub-lethal concentration of inducer may be any concentration consistent with the intended use of the assay to identify candidate compounds to which the cells are more sensitive. For example, the sub-lethal concentration of the inducer may be such that growth inhibition is at least about 5%, at least about 8%, at least about 10%, at least about 20%, at least about 30%, at least about 40%, at least about 50%, at least about 60% at least about 75%, or more. Cells which are pre-sensitized using the preceding method are more sensitive to inhibitors of the target protein because these cells contain less target protein to inhibit than do wild-type cells.

[0690] It will be appreciated that the above cell-based assays may be performed using antisense nucleic acids comprising a nucleotide sequence complementary to any of the proliferation-required nucleic acids from Staphylococcus aureus, Salmonella typhimurium, Klebsiella pneumoniae, Pseudomonas aeruginosa, Enterococcus faecalis, Escherichia coli, Enterococcus faecalis, Haemophilus influenzae, Helicobacter pylori, or Salmonella typhi, or portions thereof, antisense nucleic acids complementary to homologous coding nucleic acids or portions thereof or homologous antisense nucleic acids. In this way, the level or activity of a target, such as any of the proliferation-required polypeptides from Staphylococcus aureus, Salmonella typhimurium, Klebsiella pneumoniae, Pseudomonas aeruginosa, Enterococcus faecalis, Escherichia coli, Enterococcus faecalis, Haemophilus influenzae, Helicobacter pylori, or Salmonella typhi, or homologous polypeptides.

[0691] In another embodiment of the cell-based assays of the present invention, the level or activity of a proliferation required gene product is reduced using a mutation, such as a temperature sensitive mutation, in the gene encoding a gene product required for proliferation and an antisense nucleic acid comprising a nucleotide sequence complementary to the gene encoding the gene product required for proliferation or a portion thereof. Growing the cells at an intermediate temperature between the permissive and restrictive temperatures of the temperature sensitive mutant where the mutation is in a proliferation-required gene produces cells with reduced activity of the proliferation-required gene product. The antisense RNA complementary to the proliferation-required sequence further reduces the activity of the proliferation required gene product. Drugs that may not have been found using either the temperature sensitive mutation or the antisense nucleic acid alone may be identified by determining whether cells in which transcription of the antisense nucleic acid has been induced and which are grown at a temperature between the permissive temperature and the restrictive temperature are substantially more sensitive to a test compound than cells in which expression of the antisense nucleic acid has not been induced and which are grown at a permissive temperature. Also drugs found previously from either the antisense nucleic acid alone or the temperature sensitive mutation alone may have a different sensitivity profile when used in cells combining the two approaches, and that sensitivity profile may indicate a more specific action of the drug in inhibiting one or more activities of the gene product.

[0692] Temperature sensitive mutations may be located at different sites within the gene and correspond to different domains of the protein. For example, the dnaB gene of Escherichia coli encodes the replication fork DNA helicase. DnaB has several domains, including domains for oligomerization, ATP hydrolysis, DNA binding, interaction with primase, interaction with DnaC, and interaction with DnaA [(Biswas, E. E. and Biswas, S. B. 1999. Mechanism and DnaB helicase of Escherichia coli: structural domains involved in ATP hydrolysis, DNA binding, and oligomerization. Biochem. 38:10919-10928; Hiasa, H. and Marians, K. J. 1999. Initiation of bidirectional replication at the chromosomal origin is directed by the interaction between helicase and primase. J. Biol. Chem. 274:27244-27248; San Martin, C., Radermacher, M., Wolpensinger, B., Engel, A., Miles, C. S., Dixon, N. E., and Carazo, J. M. 1998. Three-dimensional reconstructions from cryoelectron microscopy images reveal an intimate complex between helicase DnaB and its loading partner DnaC. Structure 6:501-9; Sutton, M. D., Carr, K. M., Vicente, M., and Kaguni, J. M. 1998. Escherichia coli DnaA protein. The N-terminal domain and loading of DnaB helicase at the E. coli chromosomal origin. J. Biol. Chem. 273:34255-62.), the disclosures of which are incorporated herein by reference in their entireties]. Temperature sensitive mutations in different domains of DnaB confer different phenotypes at the restrictive temperature, which include either an abrupt stop or slow stop in DNA replication with or without DNA breakdown (Wechsler, J. A. and Gross, J. D. 1971. Escherichia coli mutants temperature-sensitive for DNA synthesis. Mol. Gen. Genetics 113:273-284, the disclosure of which is incorporated herein by reference in its entirety) and termination of growth or cell death. Combining the use of temperature sensitive mutations in the dnaB gene that cause cell death at the restrictive temperature with an antisense to the dnaB gene could lead to the discovery of very specific and effective inhibitors of one or a subset of activities exhibited by DnaB.

[0693] It will be appreciated that the above method may be performed with any mutation which reduces but does not eliminate the activity or level of the gene product which is required for proliferation.

[0694] It will be appreciated that the above cell-based assays may be performed using mutations in, such as temperature sensitive mutations, and antisense nucleic acids comprising a nucleotide sequence complementary to any of the genes encoding proliferation-required gene products from from Staphylococcus aureus, Salmonella typhimurium, Klebsiella pneumoniae, Pseudomonas aeruginosa, Enterococcus faecalis, Escherichia coli, Enterococcus faecalis, Haemophilus influenzae, Helicobacter pylori, or Salmonella typhi, or portions thereof (including the nucleic acids of SEQ ID NOs.: 3796-3800, 3806-4860, 5916-10012), mutations in and antisense nucleic acids complementary to homologous coding nucleic acids or portions thereof or homologous antisense nucleic acids. In this way, the level or activity of a target, such as any of the proliferation-required polypeptides from Staphylococcus aureus, Salmonella typhimurium, Klebsiella pneumoniae, Pseudomonas aeruginosa, Enterococcus faecalis, Escherichia coli, Enterococcus faecalis, Haemophilus influenzae, Helicobacter pylori, or Salmonella typhi (including the polypeptides of SEQ ID NOs.: 3801-3805, 4861-5915, 10013-14110), or homologous polypeptides may be reduced.

[0695] When screening for antimicrobial agents against a gene product required for proliferation, growth inhibition of cells containing a limiting amount of that proliferation-required gene product can be assayed. Growth inhibition can be measured by directly comparing the amount of growth, measured by the optical density of the growth medium, between an experimental sample and a control sample. Alternative methods for assaying cell proliferation include measuring green fluorescent protein (GFP) reporter construct emissions, various enzymatic activity assays, and other methods well known in the art.

[0696] It will be appreciated that the above method may be performed in solid phase, liquid phase or a combination of the two. For example, cells grown on nutrient agar containing the inducer of the antisense construct may be exposed to compounds spotted onto the agar surface. If desired, the cells may be grown on agar containing varying concentrations of the inducer. A compound's effect may be judged from the diameter of the resulting killing zone, the area around the compound application point in which cells do not grow. Multiple compounds may be transferred to agar plates and simultaneously tested using automated and semi-automated equipment including but not restricted to multi-channel pipettes (for example the Beckman Multimek) and multi-channel spotters (for example the Genomic Solutions Flexys). In this way multiple plates and thousands to millions of compounds may be tested per day.

[0697] The compounds may also be tested entirely in liquid phase using microtiter plates as described below. Liquid phase screening may be performed in microtiter plates containing 96, 384, 1536 or more wells per microtiter plate to screen multiple plates and thousands to millions of compounds per day. Automated and semi-automated equipment may be used for addition of reagents (for example cells and compounds) and determination of cell density.

### Example 9

### Cell-based Assay Using Antisense Complementary to Genes Encoding Ribosomal Proteins

[0698] The effectiveness of the above cell-based assay was validated using constructs transribing antisense RNA to the proliferation required E. coli genes rplL, rplJ, and rplW encoding ribosomal proteins L7/L12, L10 and L23 respectively. These proteins are essential components of the protein synthesis apparatus of the cell and as such are required for proliferation. These constructs were used to test the effect of antisense transcription on cell sensitivity to antibiotics known to bind to the ribosome and thereby inhibit protein synthesis. Constructs transcribing antisense RNA to several other genes (elaD, visC, yohH, and atpE/B), the products of which are not involved in protein synthesis were used for comparison.

[0699] First, pLex5BA (Krause et al., J. Mol. Biol. 274: 365 (1997), the disclosure of which is incorporated herein by reference in its entirety) vectors containing antisense constructs to either rplW or to elaD were introduced into separate E. coli cell populations. Vector introduction is a technique well known to those of ordinary skill in the art. The vectors of this example contain IPTG inducible promoters that drive the transcription of the antisense RNA in the presence of the inducer. However, those skilled in the art will appreciate that other inducible promoters may also be used. Suitable vectors are also well known in the art. Antisense clones to genes encoding different ribosomal proteins or to genes encoding proteins that are not involved in protein synthesis were utilized to test the effect of antisense transcription on cell sensitivity to the antibiotics known to bind to ribosomal proteins and inhibit protein synthesis. Antisense nucleic acids comprising a nucleotide sequence complementarty to the elaD, atpB&atpE, visC and yohH genes are referred to as AS-elaD, AS-atpB/E, AS-visC, AS-yohH respectively. These genes are not known to be involved in protein synthesis. Antisense nucleic acids to the rplL, rplL&rplJ and rplW genes are referred to as AS-rplL, AS-rplL/J, and AS-rplW respectively. These genes encode ribosomal proteins L7/L12 (rplL) L10 (rplJ) and L23 (rplW). Vectors containing these antisense nucleic acids were introduced into separate E. coli cell populations.

[0700] The cell populations containing vectors producing AS-elaD or AS-rplW were exposed to a range of IPTG concentrations in liquid medium to obtain the growth inhibitory dose curve for each clone (FIG. 1). First, seed cultures were grown to a particular turbidity measured by the optical density (OD) of the growth solution. The OD of the solution is directly related to the number of bacterial cells contained therein. Subsequently, sixteen 200 μl liquid medium cultures were grown in a 96 well microtiter plate at 37° C. with a range of IPTG concentrations in duplicate two-fold serial dilutions from 1600 uM to 12.5 μM (final concentration). Additionally, control cells were grown in duplicate without IPTG. These cultures were started from an inoculum of equal amounts of cells derived from the same initial seed culture of a clone of interest. The cells were grown for up to 15 hours and the extent of growth was determined by measuring the optical density of the cultures at 600 nm. When the control culture reached mid-log phase the percent growth (relative to the control culture) for each of the IPTG containing cultures was plotted against the log concentrations of IPTG to produce a growth inhibitory dose response curve for the IPTG. The concentration of IPTG that inhibits cell growth to 50% (IC₅₀) as compared to the 0 mM IPTG control (0% growth inhibition) was then calculated from the curve. Under these conditions, an amount of antisense RNA was produced that reduced the expression levels of rplW or elaD to a degree such that growth of cells containing their respective antisense vectors was inhibited by 50%.

[0701] Alternative methods of measuring growth are also contemplated. Examples of these methods include measurements of proteins, the expression of which is engineered into the cells being tested and can readily be measured. Examples of such proteins include green fluorescent protein (GFP), luciferase, and various enzymes.

[0702] Cells were pretreated with the selected concentration of IPTG and then used to test the sensitivity of cell populations to tetracycline, erythromycin and other known protein synthesis inhibitors. FIG. 1 is an IPTG dose response curve in E. coli transformed with an IPTG-inducible plasmid containing either an antisense clone to the E. coli rplW gene (AS-rplW) which encodes ribosomal protein L23 which is required for protein synthesis and essential for cell proliferation, or an antisense clone to the elaD (AS-elaD) gene which is not known to be involved in protein synthesis.

[0703] An example of a tetracycline dose response curve is shown in FIGS. 2A and 2B for the rplW and elaD genes, respectively. Cells were grown to log phase and then diluted into medium alone or medium containing IPTG at concentrations which give 20% and 50% growth inhibition as determined by IPTG dose response curves. After 2.5 hours, the cells were diluted to a final OD₆₀₀ of 0.002 into 96 well plates containing (1) +/−IPTG at the same concentrations used for the 2.5 hour pre-incubation; and (2) serial two-fold dilutions of tetracycline such that the final concentrations of tetracycline range from 1 μg/ml to 15.6 ng/ml and 0 μg/ml. The 96 well plates were incubated at 37° C. and the OD₆₀₀ was read by a plate reader every 5 minutes for up to 15 hours. For each IPTG concentration and the no IPTG control, tetracycline dose response curves were determined when the control (absence of tetracycline) reached 0.1 OD₆₀₀.

[0704] To compare tetracycline sensitivity with and without IPTG, tetracycline IC₅₀, were determined from the dose response curves (FIGS. 3A-B). Cells transcribing antisense nucleic acids AS-rplL or AS-rplW to genes encoding ribosomal proteins L7/L 12 and L23 respectively showed increased sensitivity to tetracycline (FIG. 2A) as compared to cells with reduced levels of the elaD gene product (AS-elaD) (FIG. 2B). FIG. 3 shows a summary bar chart in which the ratios of tetracycline IC₅₀s determined in the presence of IPTG which gives 50% growth inhibition versus tetracycline IC50S determined without IPTG (fold increase in tetracycline sensitivity) were plotted. Cells with reduced levels of either L7/L 12 (encoded by genes rplL, rplJ) or L23 (encoded by the rplW gene) showed increased sensitivity to tetracycline (FIG. 3). Cells expressing antisense to genes not known to be involved in protein synthesis (AS-atpB/E, AS-visC, AS-elaD, AS-yohH) did not show the same increased sensitivity to tetracycline, validating the specificity of this assay (FIG. 3).

[0705] In addition to the above, it has been observed in initial experiments that clones transcribing antisense RNA to genes involved in protein synthesis (including genes encoding ribosomal proteins L7/L12 & L10, L7/L12 alone, L22, and L18, as well as genes encoding rRNA and Elongation Factor G) have increased sensitivity to the macrolide, erythromycin, whereas clones transcribing antisense to the non-protein synthesis genes elaD, atpB/E and visC do not. Furthermore, the clone transcribing antisense to rplL and rplJ (AS-rplL/J) does not show increased sensitivity to nalidixic acid and ofloxacin, antibiotics which do not inhibit protein synthesis.

[0706] The results with the ribosomal protein genes rplL, rplJ, and rplW as well as the initial results using various other antisense clones and antibiotics show that limiting the concentration of an antibiotic target makes cells more sensitive to the antimicrobial agents that specifically interact with that protein. The results also show that these cells are sensitized to antimicrobial agents that inhibit the overall function in which the protein target is involved but are not sensitized to antimicrobial agents that inhibit other functions. It will be appreciated that the cell-based assays described above may be implemented using the Staphylococcus aureus, Salmonella typhimurium, Klebsiella pneumoniae, Pseudomonas aeruginosa, Enterococcus faecalis, Escherichia coli, Enterococcus faecalis, Haemophilus influenzae, Helicobacter pylori, or Salmonella typhi antisense nucleotide sequences which inhibit the activity of genes required for proliferation described herein (including the antisense nucleic acids of SEQ ID NOs.: 8-3795) or antisense nucleic acids comprising nucleotide sequences which are complementary to the sequences of SEQ ID NOs.: 3796-3800, 3806-4860, 5916-10012 or portions thereof.

[0707] It will be appreciated that the above cell-based assays may be performed using antisense nucleic acids complementary to any of the proliferation-required nucleic acids from Staphylococcus aureus, Salmonella typhimurium, Klebsiella pneumoniae, Pseudomonas aeruginosa, Enterococcus faecalis, Escherichia coli, Enterococcus faecalis, Haemophilus influenzae, Helicobacter pylori, or Salmonella typhi, or portions thereof, antisense nucleic acids complementary to homologous coding nucleic acids or portions thereof, or homologous antisense nucleic acids. In this way, the level or activity of a target, such as any of the proliferation-required polypeptides from Staphylococcus aureus, Salmonella typhimurium, Klebsiella pneumoniae, Pseudomonas aeruginosa, Enterococcus faecalis, Escherichia coli, Enterococcus faecalis, Haemophilus influenzae, Helicobacter pylori, or Salmonella typhi, or homologous polypeptides may be reduced.

[0708] The cell-based assay described above may also be used to identify the biological pathway in which a proliferation-required nucleic acid or its gene product lies. In such methods, cells transcribing a sub-lethal level of antisense to a target proliferation-required nucleic acid and control cells in which transcription of the antisense has not been induced are contacted with a panel of antibiotics known to act in various pathways. If the antibiotic acts in the pathway in which the target proliferation-required nucleic acid or its gene product lies, cells in which transcription of the antisense has been induced will be more sensitive to the antibiotic than cells in which expression of the antisense has not been induced.

[0709] As a control, the results of the assay may be confirmed by contacting a panel of cells transcribing antisense nucleic acids to many different proliferation-required genes including the target proliferation-required gene. If the antibiotic is acting specifically, heightened sensitivity to the antibiotic will be observed only in the cells transcribing antisense to a target proliferation-required gene (or cells expressing antisense to other proliferation-required genes in the same pathway as the target proliferation-required gene) but will not be observed generally in all cells expressing antisense to proliferation-required genes.

[0710] It will be appreciated that the above cell-based assays may be performed using antisense nucleic acids complementary to any of the proliferation-required nucleic acids from Staphylococcus aureus, Salmonella typhimurium, Klebsiella pneumoniae, Pseudomonas aeruginosa, Enterococcus faecalis, Escherichia coli, Enterococcus faecalis, Haemophilus influenzae, Helicobacter pylori, or Salmonella typhi , (including antisense nucleic acids complementary to SEQ ID NOs: 3796-3800, 3806-4860, 5916-10012, or the antisense nucleic acids of SEQ ID NOs.: 8-3795) or portions thereof, antisense nucleic acids comprising nucleotide sequences complementary to homologous coding nucleic acids or portions thereof, or homologous antisense nucleic acids In this way, the level or activity of a target, such as any of the proliferation-required polypeptides from Staphylococcus aureus, Salmonella typhimurium, Klebsiella pneumoniae, Pseudomonas aeruginosa, Enterococcus faecalis, Escherichia coli, Enterococcus faecalis, Haemophilus influenzae, Helicobacter pylori, or Salmonella typhi (including the polypeptides of SEQ ID NOs.: 3801-3805, 4861-5915, 10013-14110), or homologous polypeptides may be reduced.

[0711] Similarly, the above method may be used to determine the pathway on which a test compound, such as a test antibiotic acts. A panel of cells, each of which transcribes an antisense to a proliferation-required nucleic acid in a known pathway, is contacted with a compound for which it is desired to determine the pathway on which it acts. The sensitivity of the panel of cells to the test compound is determined in cells in which transcription of the antisense has been induced and in control cells in which expression of the antisense has not been induced. If the test compound acts on the pathway on which an antisense nucleic acid acts, cells in which expression of the antisense has been induced will be more sensitive to the compound than cells in which expression of the antisense has not been induced. In addition, control cells in which expression of antisense to proliferation-required genes in other pathways has been induced will not exhibit heightened sensitivity to the compound. In this way, the pathway on which the test compound acts may be determined.

[0712] It will be appreciated that the above cell-based assays may be performed using antisense nucleic acids comprising nucleotide sequences complementary to any of the proliferation-required nucleic acids from Staphylococcus aureus, Salmonella typhimurium, Klebsiella pneumoniae, Pseudomonas aeruginosa, Enterococcus faecalis, Escherichia coli, Enterococcus faecalis, Haemophilus influenzae, Helicobacter pylori, or Salmonella typhi (including antisense nucleic acids complementary to SEQ ID NOs: 3796-3800, 3806-4860, 5916-10012, such as the antisense nucleic acids of SEQ ID NOs.: 8-3795) or portions thereof, antisense nucleic acids complementary to homologous coding nucleic acids or portions thereof, or homologous antisense nucleic acids In this way, the level or activity of a target, such as any of the proliferation-required polypeptides from Staphylococcus aureus, Salmonella typhimurium, Klebsiella pneumoniae, Pseudomonas aeruginosa, Enterococcus faecalis, Escherichia coli, Enterococcus faecalis, Haemophilus influenzae, Helicobacter pylori, or Salmonella typhi (including the polypeptides of SEQ ID NOs.: 3801-3805, 4861-5915, 10013-14110) or homologous polypeptides may be reduced.

[0713] The Example below provides one method for performing such assays.

### Example 10

### Identification of the Pathway in which a Proliferation-Required Gene Lies or the Pathway on which an Antibiotic Acts

[0714] A. Preparation of Bacterial Stocks for Assay

[0715] To provide a consistent source of cells to screen, frozen stocks of host bacteria containing the desired antisense construct are prepared using standard microbiological techniques. For example, a single clone of the microorganism can be isolated by streaking out a sample of the original stock onto an agar plate containing nutrients for cell growth and an antibiotic for which the antisense construct contains a selectable marker which confers resistance. After overnight growth an isolated colony is picked from the plate with a sterile needle and transferred to an appropriate liquid growth medium containing the antibiotic required for maintenance of the plasmid. The cells are incubated at 30° C. to 37° C. with vigorous shaking for 4 to 6 hours to yield a culture in exponential growth. Sterile glycerol is added to 15% (volume to volume) and 100 μL to 500 μL aliquots are distributed into sterile cryotubes, snap frozen in liquid nitrogen, and stored at −80° C. for future assays.

[0716] B. Growth of Bacteria for Use in the Assay

[0717] A day prior to an assay, a stock vial is removed from the freezer, rapidly thawed (37° C. water bath) and a loop of culture is streaked out on an agar plate containing nutrients for cell growth and an antibiotic to which the selectable marker of the antisense construct confers resistance. After overnight growth at 37° C., ten randomly chosen, isolated colonies are transferred from the plate (sterile inoculum loop) to a sterile tube containing 5 mL of LB medium containing the antibiotic to which the antisense vector confers resistance. After vigorous mixing to form a homogeneous cell suspension, the optical density of the suspension is measured at 600 rm (OD₆₀₀) and if necessary an aliquot of the suspension is diluted into a second tube of 5 mL, sterile, LB medium plus antibiotic to achieve an OD₆₀₀≦0.02 absorbance units. The culture is then incubated at 37° C. for 1-2 hrs with shaking until the OD₆₀₀ reaches OD 0.2-0.3. At this point the cells are ready to be used in the assay.

[0718] C. Selection of Media to be Used in Assay

[0719] Two-fold dilution series of the inducer are generated in culture media containing the appropriate antibiotic for maintenance of the antisense construct. Several media are tested side by side and three to four wells are used to evaluate the effects of the inducer at each concentration in each media. For example, LB broth, TBD broth and Muller-Hinton media may be tested with the inducer xylose at the following concentrations, 5 mM, 10 mM, 20 mM, 40 mM, 80 mM, 120 mM and 160 mM. Equal volumes of test media-inducer and cells are added to the wells of a 384 well microtiter plate and mixed. The cells are prepared as described above and diluted 1:100 in the appropriate media containing the test antibiotic immediately prior to addition to the microtiter plate wells. For a control, cells are also added to several wells of each media that do not contain inducer, for example 0 mM xylose. Cell growth is monitored continuously by incubation at 37° C. in a microtiter plate reader monitoring the OD₆₀₀ of the wells over an 18-hour period. The percent inhibition of growth produced by each concentration of inducer is calculated by comparing the rates of logarithmic growth against that exhibited by cells growing in medium without inducer. The medium yielding greatest sensitivity to inducer is selected for use in the assays described below.

[0720] D. Measurement of Test Antibiotic Sensitivity in the Absence of Antisense Construct Induction

[0721] Two-fold dilution series of antibiotics of known mechanism of action are generated in the culture medium selected for further assay development that has been supplemented with the antibiotic used to maintain the construct. A panel of test antibiotics known to act on different pathways is tested side by side with three to four wells being used to evaluate the effect of a test antibiotic on cell growth at each concentration. Equal volumes of test antibiotic and cells are added to the wells of a 384 well microtiter plate and mixed. Cells are prepared as described above using the medium selected for assay development supplemented with the antibiotic required to maintain the antisense construct and are diluted 1:100 in identical medium immediately prior to addition to the microtiter plate wells. For a control, cells are also added to several wells that lack antibiotic, but contain the solvent used to dissolve the antibiotics. Cell growth is monitored continuously by incubation at 37° C. in a microtiter plate reader monitoring the OD₆₀₀ of the wells over an 18-hour period. The percent inhibition of growth produced by each concentration of antibiotic is calculated by comparing the rates of logarithmic growth against that exhibited by cells growing in medium without antibiotic. A plot of percent inhibition against log[antibiotic concentration] allows extrapolation of an IC₅₀ value for each antibiotic.

[0722] E. Measurement of Test Antibiotic Sensitivity in the Presence of Antisense Construct Inducer

[0723] The culture medium selected for use in the assay is supplemented with inducer at concentrations shown to inhibit cell growth by 50% and 80% as described above, as well as the antibiotic used to maintain the construct. Two-fold dilution series of the panel of test antibiotics used above are generated in each of these media. Several antibiotics are tested side by side in each medium with three to four wells being used to evaluate the effects of an antibiotic on cell growth at each concentration. Equal volumes of test antibiotic and cells are added to the wells of a 384 well microtiter plate and mixed. Cells are prepared as described above using the medium selected for use in the assay supplemented with the antibiotic required to maintain the antisense construct. The cells are diluted 1:100 into two 50 mL aliquots of identical medium containing concentrations of inducer that have been shown to inhibit cell growth by 50% and 80% respectively and incubated at 37° C. with shaking for 2.5 hours. Immediately prior to addition to the microtiter plate wells, the cultures are adjusted to an appropriate OD₆₀₀ (typically 0.002) by dilution into warm (37° C.) sterile medium supplemented with identical concentrations of the inducer and antibiotic used to maintain the antisense construct. For a control, cells are also added to several wells that contain solvent used to dissolve test antibiotics but which contain no antibiotic. Cell growth is monitored continuously by incubation at 37° C. in a microtiter plate reader monitoring the OD₆₀₀ of the wells over an 18-hour period. The percent inhibition of growth produced by each concentration of antibiotic is calculated by comparing the rates of logarithmic growth against that exhibited by cells growing in medium without antibiotic. A plot of percent inhibition against log[antibiotic concentration] allows extrapolation of an IC₅₀ value for each antibiotic.

[0724] F. Determining the Specificity of the Test Antibiotics

[0725] A comparison of the IC₅₀s generated by antibiotics of known mechanism of action under antisense induced and non-induced conditions allows the pathway in which a proliferation-required nucleic acid lies to be identified. If cells expressing an antisense nucleic acid comprising a nucleotide sequence complementary to a proliferation-required gene are selectively sensitive to an antibiotic acting via a particular pathway, then the gene against which the antisense acts is involved in the pathway on which the antibiotic acts.

[0726] G. Identification of Pathway in which a Test Antibiotic Acts

[0727] As discussed above, the cell-based assay may also be used to determine the pathway against which a test antibiotic acts. In such an analysis, the pathways against which each member of a panel of antisense nucleic acids acts are identified as described above. A panel of cells, each containing an inducible vector which transcribes an antisense nucleic acid comprising a nucleotide sequence complementary to a gene in a known proliferation-required pathway, is contacted with a test antibiotic for which it is desired to determine the pathway on which it acts under inducing and non-inducing conditions. If heightened sensitivity is observed in induced cells transcribing antisense complementary to a gene in a particular pathway but not in induced cells transcribing antisense nucleic acids comprising nucleotide sequences complementary to genes in other pathways, then the test antibiotic acts against the pathway for which heightened sensitivity was observed.

[0728] One skilled in the art will appreciate that further optimization of the assay conditions, such as the concentration of inducer used to induce antisense transcription and/or the growth conditions used for the assay (for example incubation temperature and medium components) may further increase the selectivity and/or magnitude of the antibiotic sensitization exhibited.

[0729] It will be appreciated that the above cell-based assays may be performed using antisense nucleic acids comprising nucleotide sequences complementary to any of the proliferation-required nucleic acids from Staphylococcus aureus, Salmonella typhimurium, Klebsiella pneumoniae, Pseudomonas aeruginosa, Enterococcus faecalis, Escherichia coli, Enterococcus faecalis, Haemophilus influenzae, Helicobacter pylori, or Salmonella typhi, (including antisense nucleic acids comprising nucleotide sequences complemenatary to SEQ ID NOs: 3796-3800, 3806-4860, 5916-10012, such as the antisense nucleic acids of SEQ ID NOs.: 8-3795) or portions thereof, antisense nucleic acids complementary to homologous coding nucleic acids or portions thereof or homologous antisense nucleic acids In this way, the level or activity of a target, such as any of the proliferation-required polypeptides from Staphylococcus aureus, Salmonella typhimurium, Klebsiella pneumoniae, Pseudomonas aeruginosa, Enterococcus faecalis, Escherichia coli, Enterococcus faecalis, Haemophilus influenzae, Helicobacter pylori, or Salmonella typhi (including the polypeptides of SEQ ID NOs.: 3801-3805, 4861-5915, 10013-14110), or homologous polypeptides may be reduced.

[0730] The following example confirms the effectiveness of the methods described above.

### Example 11

### Identification of the Biological Pathway in which a Proliferation-Required Gene Lies

[0731] The effectiveness of the above assays was validated using proliferation-required genes from E. coli which were identified using procedures similar to those described above. Antibiotics of various chemical classes and modes of action were purchased from Sigma Chemicals (St. Louis, Mo.). Stock solutions were prepared by dissolving each antibiotic in an appropriate aqueous solution based on information provided by the manufacturer. The final working solution of each antibiotic contained no more than 0.2% (w/v) of any organic solvent. To determine their potency against a bacterial strain engineered for transcription of an antisense comprising a nucleotide sequence complementary to a proliferation-required 50S ribosomal protein, each antibiotic was serially diluted two- or three- fold in growth medium supplemented with the appropriate antibiotic for maintenance of the antisense construct. At least ten dilutions were prepared for each antibiotic. 25 μL aliquots of each dilution were transferred to discrete wells of a 384-well microplate (the assay plate) using a multi-channel pipette. Quadruplicate wells were used for each dilution of an antibiotic under each treatment condition (plus and minus inducer). Each assay plate contained twenty wells for cell growth controls (growth medium replacing antibiotic), ten wells for each treatment (plus and minus inducer, in this example IPTG). Assay plates were usually divided into the two treatments: half the plate containing induced cells and an appropriate concentrations of inducer (in this example IPTG) to maintain the state of induction, the other half containing non-induced cells in the absence of IPTG.

[0732] Cells for the assay were prepared as follows. Bacterial cells containing a construct, from which transcription of antisense nucleic acid comprising a nucleotide sequence complementary to rplL and rplJ (AS-rplL/J), which encode proliferation-required 50S ribosomal subunit proteins, is inducible in the presence of IPTG, were grown into exponential growth (OD₆₀₀ 0.2 to 0.3) and then diluted 1:100 into fresh medium containing either 400 μM or 0 μM inducer (IPTG). These cultures were incubated at 37° C. for 2.5 hr. After a 2.5 hr incubation, induced and non-induced cells were respectively diluted into an assay medium at a final OD₆₀₀ value of 0.0004. The medium contained an appropriate concentration of the antibiotic for the maintenance of the antisense construct. In addition, the medium used to dilute induced cells was supplemented with 800 μM IPTG so that addition to the assay plate would result in a final IPTG concentration of 400 μM. Induced and non-induced cell suspensions were dispensed (25 μl/well) into the appropriate wells of the assay plate as discussed previously. The plate was then loaded into a plate reader, incubated at constant temperature, and cell growth was monitored in each well by the measurement of light scattering at 595 nm. Growth was monitored every 5 minutes until the cell culture attained a stationary growth phase. For each concentration of antibiotic, a percentage inhibition of growth was calculated at the time point corresponding to mid-exponential growth for the associated control wells (no antibiotic, plus or minus IPTG). For each antibiotic and condition (plus or minus IPTG), a plot of percent inhibition versus log of antibiotic concentration was generated and the IC₅₀ determined. A comparison of the IC₅₀ for each antibiotic in the presence and absence of IPTG revealed whether induction of the antisense construct sensitized the cell to the mechanism of action exhibited by the antibiotic. Cells which exhibited a statistically significant decrease in the IC₅₀ value in the presence of inducer were considered to have an increased sensitivity to the test antibiotic.

[0733] The results are provided in the table below, which lists the classes and names of the antibiotics used in the analysis, the targets of the antibiotics, the IC₅₀ in the absence of IPTG, the IC₅₀ in the presence of IPTG, the concentration units for the IC₅₀s, the fold increase in IC₅₀ in the presence of IPTG, and whether increased sensitivity was observed in the presence of IPTG.

TABLE III
Effect of Expression of Antisense RINA to rylL and rplJ on Antibiotic Sensitivity

| | | | | | Fold | |
|---|---|---|---|---|---|---|
| | | IC₅₀ | IC₅₀ | Conc. | Increase in | Sensitivity |
| ANTIBIOTIC CLASS /Names | TARGET | (−IPTG) | (+IPTG) | Unit | Sensitivity | Increased? |
| PROTEIN SYNTHESIS INHIBITOR | | | | | | |
| AMINOGLYCOSIDES | | | | | | |
| Gentamicin | 30S ribosome function | 2715 | 19.19 | ng/ml | 141 | Yes |
| Streptomycin | 30S ribosome function | 11280 | 161 | ng/ml | 70 | Yes |
| Spectinomycin | 30S ribosome function | 18050 | <156 | ng/ml | Yes | |
| Tobramycin | 30S ribosome function | 3594 | 70.58 | ng/ml | 51 | Yes |
| MACROLIDES | 50S ribosome function | 7467 | 187 | ng/ml | 40 | Yes |
| Erythromycin | | | | | | |
| AROMATIC POYKETIDES | | | | | | |
| Tetracycline | 30S ribosome function | 199.7 | 1.83 | ng/ml | 109 | Yes |
| Minocycline | 30S ribosome function | 668.4 | 3.897 | ng/ml | 172 | Yes |
| Doxycycline | 30S ribosome function | 413.1 | 27.81 | ng/ml | 15 | Yes |
| OTHER PROTEIN SYNTHESIS | | | | | | |
| INHIBITORS | | | | | | |
| Fusidic acid | Elongation Factor G function | 59990 | 641 | ng/ml | 94 | Yes |
| Chloramphenicol | 30S ribosome function | 465.4 | 1.516 | ng/ml | 307 | Yes |
| Lincomycin | 50S ribosome function | 47150 | 324.2 | ng/ml | 145 | Yes |
| OTHER ANTIBIOTIC MECHANISMS | | | | | | |
| B-LACTAMS | | | | | | |
| Cefoxitin | Cell wall biosynthesis | 2782 | 2484 | ng/ml | 1 | No |
| Cefotaxime | Cell wall biosynthesis | 24.3 | 24.16 | ng/ml | 1 | No |
| DNA SYNTHESIS INHIBITORS | | | | | | |
| Nalidixic acid | DNA Gyrase activity | 6973 | 6025 | ng/ml | 1 | No |
| Ofloxacin | DNA Gyrase activity | 49.61 | 45.89 | ng/ml | 1 | No |
| OTHER | | | | | | |
| Bacitracin | Cell membrane function | 4077 | 4677 | mg/ml | 1 | No |
| | Dihydrofolate Reductase | | | | | |
| Trimethoprim | activity | 128.9 | 181.97 | ng/ml | 1 | No |
| Vancomycin | Cell wall biosynthesis | 145400 | 72550 | ng/ml | 2 | No |

[0734] The above results demonstrate that induction of an antisense RNA complementary to genes encoding 50S ribosomal subunit proteins results in a selective and highly significant sensitization of cells to antibiotics that inhibit ribosomal function and protein synthesis. The above results further demonstrate that induction of an antisense to an essential gene sensitizes a cell or microorganism to compounds that interfere with that gene product's biological role. This sensitization is restricted to compounds that interfere with pathways associated with the targeted gene and its product.

[0735] It will be appreciated that the above cell-based assays may be performed using antisense nucleic acids complementary to any of the proliferation-required nucleic acids from Staphylococcus aureus, Salmonella typhimurium, Klebsiella pneumoniae, Pseudomonas aeruginosa, Enterococcus faecalis, Escherichia coli, Enterococcus faecalis, Haemophilus influenzae, Helicobacter pylori, or Salmonella typhi (including antisense nucleic acids complementary to SEQ ID NOs. 3796-3800, 3806-4860, 5916-10012, such as the antisense nucleic acids of SEQ ID NOs.: 8-3795) or portions thereof, antisense nucleic acids complementary to homologous coding nucleic acids or portions thereof or homologous antisense nucleic acids. In this way, the level or activity of a target, such as any of the proliferation-required polypeptides from Staphylococcus aureus, Salmonella typhimurium, Klebsiella pneumoniae, Pseudomonas aeruginosa, Enterococcus faecalis, Escherichia coli, Enterococcus faecalis, Haemophilus influenzae, Helicobacter pylori, or Salmonella typhi, (including the polypeptides of SEQ ID NOs.: 3801-3805, 4861-5915, 10013-14110), or homologous polypeptides may be reduced.

[0736] Example 11A below describes an analysis performed in Staphylococcus aureus.

### Example 11A

### Identification of the Biological Pathway in which a Gene Required for Proliferation of Staphylococcus aureus Lies

[0737] Antibiotics of various chemical classes and modes of action were purchased from chemical suppliers, for example Sigma Chemicals (St. Louis, Mo.). Stock solutions were prepared by dissolving each antibiotic in an appropriate aqueous solution based on information provided by the manufacturer. The final working solution of each antibiotic contained no more than 0.2% (w/v) of any organic solvent.

[0738] To determine its potency against a bacterial strain containing an antisense nucleic acid comprising a nucleotide sequence complementary to the nucleotide sequence encoding the Beta subunit of DNA gyrase (which is required for proliferation) under the control of a xylose inducible promoter, each antibiotic was serially diluted two- or three- fold in growth medium supplemented with the appropriate antibiotic for maintenance of the antisense construct. At least ten dilutions were prepared for each antibiotic.

[0739] Aliquots (25 μL) of each dilution were transferred to discrete wells of a 384-well microplate (the assay plate) using a multi-channel pipette. Quadruplicate wells were used for each dilution of an antibiotic under each treatment condition (plus and minus inducer). Each assay plate contained twenty wells for cell growth controls (growth medium, no antibiotic), ten wells for each treatment (plus and minus inducer, xylose, in this example). Half the assay plate contained induced cells (in this example Staphylococcus aureus cells) and appropriate concentrations of inducer (xylose, in this example) to maintain the state of induction while the other half of the assay plate contained non-induced cells maintained in the absence of inducer.

[0740] Preparation of Bacterial Cells

[0741] Cells of a bacterial clone containing a construct in which transcription of antisense comprising a nucleotide sequence complementary to the sequence encoding the Beta subunit of DNA gyrase under the control of the xylose inducible promoter (S1M10000001F08) were grown into exponential growth (OD₆₀₀ 0.2 to 0.3) and then diluted 1:100 into fresh medium containing either 12 mM or 0 mM inducer (xylose). These cultures were incubated at 37° C. for 2.5 hr. The presence of inducer (xylose) in the medium initiates and maintains production of antisense RNA from the antisense construct. After a 2.5 hr incubation, induced and non-induced cells were respectively diluted into an assay medium containing an appropriate concentration of the antibiotic for the maintenance of the antisense construct. In addition, medium used to dilute induced cells was supplemented with 24 mM xylose so that addition to the assay plate would result in a final xylose concentration of 12 mM. The cells were diluted to a final OD₆₀₀ value of 0.0004.

[0742] Induced and non-induced cell suspensions were dispensed (25 μl/well) into the appropriate wells of the assay plate as discussed previously. The plate was then loaded into a plate reader and incubated at constant temperature while cell growth was monitored in each well by the measurement of light scattering at 595 nm. Growth was monitored every 5 minutes until the cell culture attained a stationary growth phase. For each concentration of antibiotic, a percentage inhibition of growth was calculated at the time point corresponding to mid-exponential growth for the associated control wells (no antibiotic, plus or minus xylose). For each antibiotic and condition (plus or minus xylose), plots of percent inhibition versus Log of antibiotic concentration were generated and IC₅₀s determined.

[0743] A comparison of each antibiotic's IC₅₀ in the presence and absence of inducer ( xylose, in this example) reveals whether induction of the antisense construct sensitized the cell to the antibiotic's mechanism of action. If the antibiotic acts against the β subunit of DNA gyrase, the IC₅₀ of induced cells will be significantly lower than the IC₅₀ of uninduced cells.

[0744] FIG. 4 lists the antibiotics tested, their targets, and their fold increase in potency between induced cells and uninduced cells. As illustrated in FIG. 4, the potency of cefotaxime, cefoxitin, fusidic acid, lincomycin, tobramycin, trimethoprim and vancomycin, each of which act on targets other than the β subunit of gyrase, was not significantly different in induced cells as compared to uninduced cells. However, the potency of novobiocin, which is known to act against the Beta subunit of DNA gyrase, was significantly different between induced cells and uninduced cells.

[0745] Thus, induction of an antisense nucleic acid comprising a nucleotide sequence complementary to the sequence encoding the β subunit of gyrase results in a selective and significant sensitization of Staphylococcus aureus cells to an antibiotic which inhibits the activity of this protein. Furthermore, the results demonstrate that induction of an antisense construct to an essential gene sensitizes a cell or microorganism to compounds that interfere with that gene product's biological role. This sensitization is apparently restricted to compounds that interfere with the targeted gene and its product.

[0746] It will be appreciated that the above cell-based assays may be performed using antisense nucleic acids complementary to any of the proliferation-required nucleic acids from Staphylococcus aureus, Salmonella typhimurium, Klebsiella pneumoniae, Pseudomonas aeruginosa, Enterococcus faecalis, Escherichia coli, Enterococcus faecalis, Haemophilus influenzae, Helicobacter pylori, or Salmonella typhi (including antisense nucleic acids complementary to SEQ ID NOs.: 3796-3800, 3806-4860, 5916-10012, such as the antisense nucleic acids of SEQ ID NOs. 8-3795), or portions thereof, antisense nucleic acids complementary to homologous coding nucleic acids or portions thereof, or homologous antisense nucleic acids. In this way, the level or activity of a target, such as any of the proliferation-required polypeptides from Staphylococcus aureus, Salmonella typhimurium, Klebsiella pneumoniae, Pseudomonas aeruginosa, Enterococcus faecalis Escherichia coli, Enterococcus faecalis, Haemophilus influenzae, Helicobacter pylori, or Salmonella typhi, or homologous polypeptides may be reduced.

[0747] Assays utilizing antisense constructs to essential genes or portions thereof can be used to identify compounds that interfere with the activity of those gene products. Such assays could be used to identify drug leads, for example antibiotics.

[0748] Panels of cells transcribing different antisense nucleic acids can be used to characterize the point of intervention of a compound affecting an essential biochemical pathway including antibiotics with no known mechanism of action.

[0749] Assays utilizing antisense constructs to essential genes can be used to identify compounds that specifically interfere with the activity of multiple targets in a pathway. Such constructs can be used to simultaneously screen a sample against multiple targets in one pathway in one reaction (Combinatorial HTS).

[0750] Furthermore, as discussed above, panels of antisense construct-containing cells may be used to characterize the point of intervention of any compound affecting an essential biological pathway including antibiotics with no known mechanism of action.

[0751] It will be appreciated that the above cell-based assays may be performed using antisense nucleic acids complementary to any of the proliferation-required nucleic acids from Staphylococcus aureus, Salmonella typhimurium, Klebsiella pneumoniae, Pseudomonas aeruginosa, Enterococcus faecalis, Escherichia coli, Enterococcus faecalis, Haemophilus influenzae, Helicobacter pylori, or Salmonella typhi (including antisense nucleic acids comprising nucleotide sequences complementary to SEQ ID NOs.: 3796-3800, 3806-4860, 5916-10012, such as the antisense nucleic acids of SEQ ID NOs. 8-3795), or portions thereof, antisense nucleic acids complementary to homologous coding nucleic acids or portions thereof, or homologous antisense nucleic acids. In this way, the level or activity of a target, such as any of the proliferation-required polypeptides from Staphylococcus aureus, Salmonella typhimurium, Klebsiella pneumoniae, Pseudomonas aeruginosa Enterococcus faecalis, Escherichia coli, Enterococcus faecalis, Haemophilus influenzae, Helicobacter pylori, or Salmonella typhi or homologous polypeptides may be reduced.

[0752] Another embodiment of the present invention is a method for determining the pathway against which a test antibiotic compound is active, in which the activity of target proteins or nucleic acids involved in proliferation-required pathways is reduced by contacting cells with a sub-lethal concentration of a known antibiotic which acts against the target protein or nucleic acid. In one embodiment, the target protein or nucleic acid corresponds to a proliferation-required nucleic acid identified using the methods described above, such as the polypeptides of SEQ ID NOs.: 3801-3805, 4861-5915, 10013-14110, or homologous polypeptides. The method is similar to those described above for determining which pathway a test antibiotic acts against, except that rather than reducing the activity or level of a proliferation-required gene product using a sub-lethal level of antisense to a proliferation-required nucleic acid, the sensitized cell is generated by reducing the activity or level of the proliferation-required gene product using a sub-lethal level of a known antibiotic which acts against the proliferation required gene product. Heightened sensitivity determines the pathway on which the test compound is active.

[0753] Interactions between drugs which affect the same biological pathway have been described in the literature. For example, Mecillinam (Amdinocillin) binds to and inactivates the penicillin binding protein 2 (PBP2, product of the mrdA in E. coli). This antibiotic interacts with other antibiotics that inhibit PBP2 as well as antibiotics that inhibit other penicillin binding proteins such as PBP3 [(Gutmann, L., Vincent, S., Billot-Klein, D., Acar, J. F., Mrena, E., and Williamson, R. (1986) Involvement of penicillin-binding protein 2 with other penicillin-binding proteins in lysis of Escherichia coli by some beta-lactam antibiotics alone and in synergistic lytic effect of amdinocillin (mecillinam). Antimicrobial Agents & Chemotherapy, 30:906-912), the disclosure of which is incorporated herein by reference in its entirety]. Interactions between drugs could, therefore, involve two drugs that inhibit the same target protein or nucleic acid or inhibit different proteins or nucleic acids in the same pathway [(Fukuoka, T., Domon, H., Kakuta, M., Ishii, C., Hirasawa, A., Utsui, Y., Ohya, S., and Yasuda, H. (1997) Combination effect between panipenem and vancomycin on highly methicillin-resistant Staphylococcus aureus. Japan. J. Antibio. 50:411-419; Smith, C. E., Foleno, B. E., Barrett, J. F., and Frosc, M. B. (1997) Assessment of the synergistic interactions of levofloxacin and ampicillin against Enterococcus faecium by the checkerboard agar dilution and time-kill methods. Diagnos. Microbiol. Infect. Disease 27:85-92; den Hollander, J. G., Horrevorts, A. M., van Goor, M. L., Verbrugh, H. A., and Mouton, J. W. (1997) Synergism between tobramycin and ceftazidime against a resistant Pseudomonas aeruginosa strain, tested in an in vitro pharmacokinetic model. Antimicrobial Agents & Chemotherapy. 41:95-110), the disclosure of all of which are incorporated herein by reference in their entireties].

[0754] Two drugs may interact even though they inhibit different targets. For example, the proton pump inhibitor, Omeprazole, and the antibiotic, Amoxycillin, two synergistic compounds acting together, can cure Helicobacter pylori infection [(Gabryelewicz, A., Laszewicz, W., Dzieniszewski, J., Ciok, J., Marlicz, K., Bielecki, D., Popiela, T., Legutko, J., Knapik, Z., Poniewierka, E. (1997) Multicenter evaluation of dual-therapy (omeprazol and amoxycillin) for Helicobacter pylori-associated duodenal and gastric ulcer (two years of the observation). J. Physiol. Pharmacol. 48 Suppl 4:93-105), the disclosure of which is incorporated herein by reference in its entirety].

[0755] The growth inhibition from the sub-lethal concentration of the known antibiotic may be at least about 5%, at least about 8%, at least about 10%, at least about 20%, at least about 30%, at least about 40%, at least about 50%, at least about 60%, or at least about 75%, or more.

[0756] Alternatively, the sub-lethal concentration of the known antibiotic may be determined by measuring the activity of the target proliferation-required gene product rather than by measuring growth inhibition.

[0757] Cells are contacted with a combination of each member of a panel of known antibiotics at a sub-lethal level and varying concentrations of the test antibiotic. As a control, the cells are contacted with varying concentrations of the test antibiotic alone. The IC₅₀ of the test antibiotic in the presence and absence of the known antibiotic is determined. If the IC₅₀s in the presence and absence of the known drug are substantially similar, then the test drug and the known drug act on different pathways. If the IC₅₀s are substantially different, then the test drug and the known drug act on the same pathway.

[0758] It will be appreciated that the above cell-based assays may be performed using a sub-lethal concentration of a known antibiotic which acts against the product of any of the proliferation-required nucleic acids from Staphylococcus aureus, Salmonella typhimurium, Klebsiella pneumoniae, Pseudomonas aeruginosa, Enterococcus faecalis, Escherichia coli, Enterococcus faecalis, Haemophilus influenzae, Helicobacter pylori, or Salmonella typhi (including the products of SEQ ID NOs: 3796-3800, 3806-4860, 5916-10012, or portions thereof, or the products of homologous coding nucleic acids or portions thereof . In this way, the level or activity of a target, such as any of the proliferation-required polypeptides from Staphylococcus aureus, Salmonella typhimurium, Klebsiella pneumoniae, Pseudomonas aeruginosa, Enterococcus faecalis, Escherichia coli, Enterococcus faecalis, Haemophilus influenzae, Helicobacter pylori, or Salmonella typhi (including the polypeptides of SEQ ID NOs.: 3801-3805, 4861-5915, 10013-14110), or homologous polypeptides may be reduced.

[0759] Another embodiment of the present invention is a method for identifying a candidate compound for use as an antibiotic in which the activity of target proteins or nucleic acids involved in proliferation-required pathways is reduced by contacting cells with a sub-lethal concentration of a known antibiotic which acts against the target protein or nucleic acid. In one embodiment, the target protein or nucleic acid is a target protein or nucleic acid corresponding to a proliferation-required nucleic acid identified using the methods described above. The method is similar to those described previously herein for identifying candidate compounds for use as antibiotics except that rather than reducing the activity or level of a proliferation-required gene product using a sub-lethal level of antisense to a proliferation-required nucleic acid, the activity or level of the proliferation-required gene product is reduced using a sub-lethal level of a known antibiotic which acts against the proliferation required gene product.

[0760] The growth inhibition from the sub-lethal concentration of the known antibiotic may be at least about 5%, at least about 8%, at least about 10%, at least about 20%, at least about 30%, at least about 40%, at least about 50%, at least about 60%, or at least about 75%, or more.

[0761] Alternatively, the sub-lethal concentration of the known antibiotic may be determined by measuring the activity of the target proliferation-required gene product rather than by measuring growth inhibition.

[0762] In order to characterize test compounds of interest, cells are contacted with a panel of known antibiotics at a sub-lethal level and one or more concentrations of the test compound. As a control, the cells are contacted with the same concentrations of the test compound alone. The IC₅₀ of the test compound in the presence and absence of the known antibiotic is determined. If the IC₅₀ of the test compound is substantially different in the presence and absence of the known drug then the test compound is a good candidate for use as an antibiotic. As discussed above, once a candidate compound is identified using the above methods its structure may be optimized using standard techniques such as combinatorial chemistry.

[0763] Representative known antibiotics which may be used in each of the above methods are provided in Table IV below. However, it will be appreciated that other antibiotics may also be used.

TABLE IV
Antibiotics and Their Targets

| | | RESISTANT |
|---|---|---|
| ANTIBIOTIC | INHIBITS/TARGET | MUTANTS |
| Inhibitors of Transcription | | |
| Rifamycin, Rifampicin | Inhibits initiation of transcription/β- | rpoB, crp, cyaA |
| Rifabutin Rifaximin | subunit RNA polymerase, rpoB | |
| Streptolydigin | Accelerates transcription chain | rpoB |
| | termination/β-subunit RNA | |
| | polymerase | |
| Streptovaricin | an acyclic ansamycin, inhibits RNA | rpoB |
| | polymerase | |
| Actinomycin D + EDTA | Intercalates between 2 successive G- | pldA |
| | C pairs, rpoB, inhibits RNA | |
| | synthesis | |
| Inhibitors of Nucleic | | |
| Acid Metabolism | | |
| Quinolones, | α subunit gyrase and/or | gyrAorB, icd, sloB |
| Nalidixic acid | topoisomerase IV, gyrA | |
| Oxolinic acid | | |
| Fluoroquinolones | α subunit gyrase, gyrA and/or | gyrA |
| Ciprofloxacin, | topoisomerase IV (probable target in | norA (efflux in |
| Norfloxacin | Staph) | Staph) |
| | | hipQ |
| Coumerins | Inhibits ATPase activity of β-subunit | |
| Novobiocin | gyrase, gyrB | gyrB, cysB, cysE, |
| | | nov, ompA |
| Coumermycin | Inhibits ATPase activity of β-subunit | gyrB, hisW |
| | gyrase, gyrB | |
| Albicidin | DNA synthesis | tsx (nucleoside |
| | | channel) |
| Metronidazole | Causes single-strand breaks in DNA | nar |
| Inhibitors of Metabolic | | |
| Pathways | | |
| Sulfonamides, | blocks synthesis of | folP, gpt, pabA, |
| Sulfanilamide | dihydrofolate,dihydro-pteroate | pabB, pabC |
| | synthesis, folP | |
| Trimethoprim, | Inhibits dihydrofolate reductase, | folA, thyA |
| | folA | |
| Showdomycin | Nucleoside analogue capable of | nupC, pnp |
| | alkylating sulfhydryl groups, inhibito | |
| | of thymidylate synthetase | |
| Thiolactomycin | type II fatty acid synthase inhibitor | emrB |
| | | fadB, emrB due to |
| | | gene dosage |
| Psicofuranine | Adenosine glycoside antibiotic, | guaA,B |
| | target is GMP synthetase | |
| Triclosan | Inhibits fatty acid synthesis | fabI (envM) |
| Diazoborines Isoniazid, | heterocyclic, contain boron, inhibit | fabI (envM) |
| Ethionamide | fatty acid synthesis, enoyl-ACP | |
| | reductase, fabI | |
| Inhibitors of Translation | | |
| Phenylpropanoids | Binds to ribosomal peptidyl transfer | |
| Chloramphenicol, | center preventing peptide | rrn, cm/A, marA, |
| | translocation/binds to S6, L3, L6, | ompF, ompR |
| | L14, L16, L25, L26, L27, but | |
| | preferentially to L16 | |
| Tetracyclines, type II | Binding to 305 ribosomal subunit, “A | clmA (cmr), mar, |
| polyketides | site | ompF |
| Minocycline | on 30S subunit, blocks peptide | |
| Doxycycline | elongation, strongest binding to S7 | |
| Macrolides (type I | Binding to 50 S ribosomal subunit, | |
| polyketides) | 23S rRNA, blocks peptide | |
| Erythromycin, | translocation, L15, L4, L12 | rrn, rplC, rplD, |
| Carbomycin, | | rplV, mac |
| Spiramycin etc | | |
| Aminoglycosides | Irreversible binding to 30S | |
| Streptomycin, | ribosomal subunit, prevents | rpsL, strC,M, ubiF |
| | translation or causes mistranslation | atpA-E, ecfB, |
| Neomycin | of mRNA/16S rRNA | hemAC,D,E,G, |
| | | topA, |
| | | rpsC,D,E, rrn, speB |
| Spectinomycin | | atpA-atpE, cpxA, |
| Kanamycin | | ecfB, hemA,B,L, |
| | | topA |
| Kasugamycin | | ksgA,B,C,D, |
| | | rplB,K, |
| Gentamicin, | | rpsI,N,M,R |
| Amikacin | | rplF, ubiF |
| Paromycin | | cpxA |
| | | rpsL |
| Lincosamides | Binding to 50 S ribosomal subunit, | |
| Lincomycin, | blocks peptide translocation | linB, rplN,O, rpsG |
| Clindamycin | | |
| Streptogramins | 2 components, Streptogramins | |
| Virginiamycin, | A&B, bind to the 50S ribosomal | |
| Pristinamycin | subunit blocking peptide | |
| Synercid: quinupristin/ | translocation and peptide bond | |
| dalfopristin | formation | |
| Fusidanes | Inhibition of elongation factor G | fusA |
| Fusidic Acid | (EF-G) prevents peptide | |
| | translocation | |
| Kirromycin (Mocimycin) | Inhibition of elongation factor TU | tufA,B |
| | (EF-Tu), prevents peptide bond | |
| | formation | |
| Pulvomycin | Binds to and inhibits EF-TU | |
| Thiopeptin | Sulfur-containing antibiotic, inhibits | rplE |
| | protein synthesis,EF-G | |
| Tiamulin | Inhibits protein synthesis | rplC, rplD |
| Negamycin | Inhibits termination process of | prfB |
| | protein synthesis | |
| Oxazolidinones Linezolid | 23S rRNA | |
| Isoniazid | | |
| | | pdx |
| Nitrofurantoin | Inhibits protein synthesis, | nfnA, B |
| | nitroreductases convert | |
| | nitrofurantoin to highly reactive | |
| | electrophilic intermediates which | |
| | attack bacterial ribosomal | |
| | proteins non-specifically | |
| Pseudomonic Acids | Inhibition of isoleucyl tRNA | ileS |
| Mupirocin (Bactroban) | synthetase-used for Staph, topical | |
| | cream, nasal spray | |
| Indolmycin | Inhibits tryptophanyl-tRNA | trpS |
| | synthetase | |
| Viomycin | | rrmA (23S rRNA |
| | | methyltransferase; |
| | | mutant has slow |
| | | growth rate, slow |
| | | chain elongation |
| | | rate, and |
| | | viomycin |
| | | resistance) |
| Thiopeptides | Binds to L11-23S RNA complex | |
| Thiostrepton | Inhibits GTP hydrolysis by EF-G | |
| | Stimulates GTP hydrolysis by EF-G | |
| Micrococcin | | |
| Inhibitors of | | |
| Cell Walls/Membranes | | |
| β-lactams | Inhibition of one or more cell wall | |
| Penicillin, Ampicillin | transpeptidases, endopeptidases, | |
| | and glycosidases (PBPs), of the 12 | ampC, ampD, |
| Methicillin, | PBPs only 2 are essential: mrdA | ampE, envZ, |
| | (PBP2) and ftsI (pbpB, PBP3) | galU, hipA, |
| | hipQ, ompC, | |
| | ompF, ompR, | |
| Cephalosporins, | | ptsI, rfa, tolD, |
| Mecillinam | Binds to and inactivates PBP2 | tolE |
| (amdinocillin) | (mrdA) | tonB |
| | Inactivates PBP3 (ftsl) | alaS, argS, crp, |
| Aztreonam | | cyaA, envB, |
| (Furazlocillin) | mrdA,B, | |
| | | mreB, C,D |
| Bacilysin, Tetaine | Dipeptide, inhib glucosamine | dppA |
| | synthase | |
| Glycopeptides Vancomycin, | Inhib G+ cell wall syn, binds to | |
| | terminal D-ala-D-ala of | |
| | pentapeptide, | |
| Polypeptides Bacitracin | Prevents dephosphorylation and | |
| | regeneration of lipid carrier | rfa |
| Cyclic lipopeptide | Disrupts multiple aspects of | |
| Daptomycin, | membrane function, including | |
| | peptidoglycan synthesis, | |
| | lipoteichoic acid synthesis, and the | |
| | bacterial membrane potential | |
| Cyclic polypeptides | Surfactant action disrupts cell | pmrA |
| Polymixin, | membrane lipids, binds lipid A | |
| | mioety of LPS | |
| Fosfomycin, | Analogue of P-enolpyruvate, | murA, crp, cyaA |
| | inhibits 1^{st} step in peptidoglycan | glpT, hipA, ptsI, |
| | synthesis - UDP-N- | uhpT |
| | acetyiglucosamine enolpyruvyl | |
| | transferase, murA. Also acts as | |
| | Immunosuppressant | |
| Cycloserine | Prevents formation of D-ala dimer, | hipA, cycA |
| | inhibits D-ala ligase, ddlA, B | |
| Alafosfalin | phosphonodipeptide, cell wall | pepA, tpp |
| | synthesis inhibitor, potentiator of | |
| | β-lactams | |
| Inhibitors of Protein | | |
| Processing/Transport | | |
| Globomycin | Inhibits signal peptidase II | lpp, dnaE |
| | (cleaves prolipoproteins | |
| | subsequent to lipid modification, | |
| | lspA | |

[0764] It will be appreciated that the above cell-based assays may be performed using a sub-lethal concentration of a known antibiotic which acts against the product of any of the proliferation-required nucleic acids from Staphylococcus aureus, Salmonella typhimurium, Klebsiella pneumoniae, Pseudomonas aeruginosa, Enterococcus faecalis, Escherichia coli Enterococcus faecalis, Haemophilus influenzae, Helicobacter pylori, or Salmonella typhi, or portions thereof, or homologous nucleic acids. In this way, the level or activity of a target, such as any of the proliferation-required polypeptides from Staphylococcus aureus, Salmonella typhimurium, Klebsiella pneumoniae, Pseudomonas aeruginosa, Enterococcus faecalis, Escherichia coli, Enterococcus faecalis, Haemophilus influenzae, Helicobacter pylori, or Salmonella typhi, or homologous polypeptides may be reduced.

### Example 12

### Transfer of Exogenous Nucleic Acid Sequences to other Bacterial Species

[0765] The ability of an antisense molecule identified in a first organism to inhibit the proliferation of a second organism (thereby confirming that a gene in the second organism which is homologous to the gene from the first organism is required for proliferation of the second organism) was validated using antisense nucleic acids which inhibit the growth of E. coli which were identified using methods similar to those described above. Expression vectors which inhibited growth of E. coli upon induction of antisense RNA expression with IPTG were transformed directly into Enterobacter cloacae, Klebsiella pneumonia or Salmonella typhimurium. The transformed cells were then assayed for growth inhibition according to the method of Example 1. After growth in liquid culture, cells were plated at various serial dilutions and a score determined by calculating the log difference in growth for INDUCED vs. UNINDUCED antisense RNA expression as determined by the maximum 10 fold dilution at which a colony was observed. The results of these experiments are listed below in Table V. If there was no effect of antisense RNA expression in a microorganism, the clone is minus in Table V. In contrast, a positive in Table V means that at least 10 fold more cells were required to observe a colony on the induced plate than on the non-induced plate under the conditions used and in that microorganism.

TABLE V
Sensitivity of Other Microorganisms to Antisense Nucleic Acids
That Inhibit Proliferation in E. coli

| Mol. No. | S. typhimurium | E. cloacae | K. pneumoniae |
|---|---|---|---|
| EcXA001 | + | + | − |
| EcXA004 | + | − | − |
| EcXA005 | + | + | + |
| EcXA006 | − | − | − |
| EcXA007 | − | + | − |
| EcXA008 | + | − | + |
| EcXA009 | − | − | − |
| EcXA010 | + | + | + |
| EcXA011 | − | + | − |
| EcXA012 | − | + | − |
| EcXA013 | + | + | + |
| EcXA014 | + | + | − |
| EcXA015 | + | + | + |
| EcXA016 | + | + | + |
| EcXA017 | + | + | + |
| EcXA018 | + | + | + |
| EcXA019 | + | + | + |
| EcXA020 | + | + | + |
| EcXA021 | + | + | + |
| EcXA023 | + | + | + |
| EcXA024 | + | − | + |
| EcXA025 | − | − | − |
| EcXA026 | + | + | − |
| EcXA027 | + | + | − |
| EcXA028 | + | − | − |
| EcXA029 | − | − | − |
| EcXA030 | + | + | + |
| EcXA031 | + | − | − |
| EcXA032 | + | + | − |
| EcXA033 | + | + | + |
| EcXA034 | + | + | + |
| EcXA035 | − | − | − |
| EcXA036 | + | − | + |
| EcXA037 | + | + | − |
| EcXA038 | + | + | + |
| EcXA039 | + | − | − |
| EcXA041 | + | + | + |
| EcXA042 | − | + | + |
| EcXA043 | − | − | − |
| EcXA044 | − | − | − |
| EcXA045 | + | + | + |
| EcXA046 | − | − | − |
| EcXA047 | + | + | − |
| EcXA048 | − | − | − |
| EcXA049 | + | − | − |
| EcXA050 | − | − | − |
| EcXA051 | + | − | − |
| EcXA052 | + | − | − |
| EcXA053 | + | + | + |
| EcXA054 | − | − | + |
| EcXA055 | + | − | − |
| EcXA056 | + | − | + |
| EcXA057 | + | + | − |
| EcXA058 | − | − | − |
| EcXA059 | + | + | + |
| EcXA060 | − | − | − |
| EcXA061 | − | − | − |
| EcXA062 | − | − | − |
| EcXA063 | + | + | − |
| EcXA064 | − | − | − |
| EcXA065 | + | + | − |
| EcXA066 | − | − | − |
| EcXA067 | − | + | − |
| EcXA068 | − | − | − |
| EcXA069 | − | + | − |
| EcXA070 | − | − | − |
| EcXA071 | + | − | − |
| EcXA072 | + | − | + |
| EcXA073 | + | + | + |
| EcXA074 | + | + | + |
| EcXA075 | + | − | − |
| EcXA076 | − | + | − |
| EcXA077 | + | + | − |
| EcXA079 | + | + | + |
| EcXA080 | + | − | − |
| EcXA082 | − | + | − |
| EcXA083 | − | − | − |
| EcXA084 | − | + | − |
| EcXA086 | − | − | − |
| EcXA087 | − | − | − |
| EcXA088 | − | − | − |
| EcXA089 | − | − | − |
| EcXA090 | − | − | − |
| EcXA091 | − | − | − |
| EcXA092 | − | − | − |
| EcXA093 | − | − | − |
| EcXA094 | + | + | + |
| EcXA095 | + | + | − |
| EcXA096 | − | − | − |
| EcXA097 | + | − | − |
| EcXA098 | + | − | − |
| EcXA099 | − | − | − |
| EcXA100 | − | − | − |
| EcXA101 | − | − | − |
| EcXA102 | − | − | − |
| EcXA103 | − | + | − |
| EcXA104 | + | + | + |
| EcXA106 | + | + | − |
| EcXA107 | − | − | − |
| EcXA108 | − | − | − |
| EcXA109 | − | − | − |
| EcXA110 | + | + | − |
| EcXA111 | − | − | − |
| EcXA112 | − | + | − |
| EcXA113 | + | + | + |
| EcXA114 | − | + | − |
| EcXA115 | − | + | − |
| EcXA116 | + | + | − |
| EcXA117 | + | − | − |
| EcXA118 | − | − | − |
| EcXA119 | + | + | − |
| EcXA120 | − | − | − |
| EcXA121 | − | − | − |
| EcXA122 | + | − | + |
| EcXA123 | + | − | − |
| EcXA124 | − | − | − |
| EcXA125 | − | − | − |
| EcXA126 | − | − | − |
| EcXA127 | + | + | − |
| EcXA128 | − | − | − |
| EcXA129 | − | + | − |
| EcXA130 | + | + | − |
| EcXA132 | − | − | − |
| EcXA133 | − | − | − |
| EcXA136 | − | − | − |
| EcXA137 | − | − | − |
| EcXA138 | + | − | − |
| EcXA139 | − | − | − |
| EcXA140 | + | − | − |
| EcXA141 | + | − | − |
| EcXA142 | − | − | − |
| EcXA143 | − | + | − |
| EcXA144 | + | + | − |
| EcXA145 | − | − | − |
| EcXA146 | − | − | − |
| EcXA147 | − | − | − |
| EcXA148 | − | − | − |
| EcXA149 | + | + | + |
| EcXA150 | − | − | − |
| EcXA151 | + | − | − |
| EcXA152 | − | − | − |
| EcXA153 | + | + | − |
| ExXA154 | − | − | − |
| EcXA155 | − | − | ND |
| EcXA156 | − | + | − |
| EcXA157 | − | − | − |
| EcXA158 | − | − | − |
| EcXA159 | + | − | − |
| EcXA160 | + | − | − |
| EcXA162 | − | − | − |
| EcXA163 | − | − | − |
| EcXA164 | − | − | − |
| EcXA165 | − | − | − |
| EcXA166 | − | − | − |
| EcXA167 | − | − | − |
| EcXA168 | − | − | − |
| EcXA169 | − | + | − |
| EcXA171 | − | − | − |
| EcXA172 | − | − | − |
| EcXA173 | − | − | − |
| EcXA174 | − | − | − |
| EcXA175 | − | − | − |
| EcXA176 | − | − | − |
| EcXA178 | − | − | − |
| EcXA179 | − | − | − |
| EcXA180 | + | − | − |
| EcXA181 | − | − | − |
| EcXA182 | − | − | − |
| EcXA183 | − | − | − |
| EcXA184 | − | − | − |
| EcXA185 | − | − | − |
| EcXA186 | − | − | − |
| EcXA187 | + | + | + |
| EcXA189 | + | − | − |
| EcXA190 | + | + | + |
| EcXA191 | + | + | − |
| EcXA192 | − | + | − |

[0766] Thus, the ability of an antisense nucleic acid which inhibits the proliferation of Staphylococcus aureus, Salmonella typhimurium, Klebsiella pneumoniae, Pseudomonas aeruginosa, Enterococcus faecalis, Escherichia coli, Enterococcus faecalis, Haemophilus influenzae, Helicobacter pylori, or Salmonella typhi to inhibit the growth of other organims may be evaluated by transforming the antisense nucleic acid directly into species other than the organism from which they were obtained. In particular, the ability of the antisense nucleic acid to inhibit the growth of Anaplasma marginale, Aspergillus fumigatus, Bacillus anthracis, Bacterioides fragilis Bordetella pertussis, Burkholderia cepacia, Campylobacter jejuni, Candida albicans, Candida glabrata (also called Torulopsis glabrata), Candida tropicalis, Candida parapsilosis, Candida guilliermondii, Candida krusei, Candida kefyr (also called Candida pseudotropicalis), Candida dubliniensis, Chlamydia pneumoniae, Chlamydia trachomatus, Clostridium botulinum, Clostridium difficile, Clostridium perfringens, Coccidiodes immitis, Corynebacterium diptheriae, Cryptococcus neoformans, Enterobacter cloacae, Enterococcus faecalis, Enterococcus faecium, Escherichia coli, Haemophilus influenzae, Helicobacter pylori, Histoplasma capsulatum, Klebsiella pneumoniae, Listeria monocytogenes, Mycobacterium leprae, Mycobacterium tuberculosis, Neisseria gonorrhoeae, Neisseria meningitidis, Nocardia asteroides, Pasteurella haemolytica, Pasteurella multocida, Pneumocystis carinii, Proteus vulgaris, Pseudomonas aeruginosa, Salmonella bongori, Salmonella cholerasuis, Salmonella enterica, Salmonella paratyphi, Salmonella typhi, Salmonella typhimurium, Staphylococcus aureus, Listeria monocytogenes, Moxarella catarrhalis, Shigella boydii, Shigella dysenteriae, Shigella flexneri, Shigella sonnei, Staphylococcus epidermidis, Streptococcus pneumoniae, Streptococcus mutans, Treponema pallidum, Yersinia enterocolitica, Yersinia pestis or any species falling within the genera of any of the above species. may be evaluated. In some embodiments of the present invention, the ability of the antisense nucleic acid to inhibit the growth of an organism other than E. coli may be evaluated. In such embodiments, the antisense nucleic acids are inserted into expression vectors functional in the organisms in which the antisense nucleic acids are evaluated.

[0767] It will be appreciated that the above methods for evaluating the ability of an antisense nucleic acid to inhibit the proliferation of a heterologous organism may be performed using antisense nucleic acids complementary to any of the proliferation-required nucleic acids from Staphylococcus aureus, Salmonella typhimurium, Klebsiella pneumoniae, Pseudomonas aeruginosa, Enterococcus faecalis, Escherichia coli, Enterococcus faecalis, Haemophilus influenzae, Helicobacter pylori, or Salmonella typhi (including antisense nucleic acids complementary to SEQ ID NOs.: 3796-3800, 3806-4860, 5916-10012, such as the antisense nucleic acids of SEQ ID NOs.: 8-3795) or portions thereof, antisense nucleic acids complementary to homologous coding nucleic acids or portions thereof, or homologous antisense nucleic acids.

[0768] Those skilled in the art will appreciate that a negative result in a heterologous cell or microorganism does not mean that that cell or microorganism is missing that gene nor does it mean that the gene is unessential. However, a positive result means that the heterologous cell or microorganism contains a homologous gene which is required for proliferation of that cell or microorganism. The homologous gene may be obtained using the methods described herein. Those cells that are inhibited by antisense may be used in cell-based assays as described herein for the identification and characterization of compounds in order to develop antibiotics effective in these cells or microorganisms. Those skilled in the art will appreciate that an antisense molecule which works in the microorganism from which it was obtained will not always work in a heterologous cell or microorganism.

### Example 12A

### Transfer of Exogenous Nucleic Acid Sequences to other Bacterial Species Using the Staphylococcus aureus, Salmonella typhimurium, Klebsiella pneumoniae, Pseudomonas aeruginosa, Enterococcus faecalis, Escherichia coli, Enterococcus faecalis, Haemophilus influenzae, Helicobacter pylori, or Salmonella typhi Expression Vectors or Expression Vectors Functional in Bacterial Species other than Staphylococcus aureus, Salmonella typhimurium, Klebsiella pneumoniae, Pseudomonas aeruginosa, Enterococcus faecalis, Escherichia coli, Enterococcus faecalis, Haemophilus influenzae, Helicobacter pylori, or Salmonella typhi.

[0769] The antisense nucleic acids that inhibit the growth of Staphylococcus aureus, Salmonella typhimurium, Klebsiella pneumoniae, Pseudomonas aeruginosa, Enterococcus faecalis, Escherichia coli, Enterococcus faecalis, Haemophilus influenzae, Helicobacter pylori, or Salmonella typhi, or portions thereof, may also be evaluated for their ability to inhibit the growth of cells or microorganisms other than Staphylococcus aureus, Salmonella typhimurium, Klebsiella pneumoniae, Pseudomonas aeruginosa, Enterococcus faecalis, Escherichia coli, Enterococcus faecalis, Haemophilus influenzae, Helicobacter pylori, or Salmonella typhi. For example, the antisense nucleic acids that inhibit the growth of Staphylococcus aureus, Salmonella typhimurium, Klebsiella pneumoniae, Pseudomonas aeruginosa, Enterococcus faecalis, Escherichia coli, Enterococcus faecalis, Haemophilus influenzae, Helicobacter pylori, or Salmonella typhi may be evaluated for their ability to inhibit the growth of other organisms. In particular, the ability of the antisense nucleic acid to inhibit the growth of Anaplasma marginale, Aspergillus fumigatus, Bacillus anthracis, Bacterioides fragilis Bordetella pertussis, Burkholderia cepacia, Campylobacter jejuni, Candida albicans, Candida glabrata (also called Torulopsis glabrata), Candida tropicalis, Candida parapsilosis, Candida guilliermondii, Candida krusei, Candida kefyr (also called Candida pseudotropicalis), Candida dubliniensis, Chlamydia pneumoniae, Chlamydia trachomatus, Clostridium botulinum, Clostridium difficile, Clostridium perfringens, Coccidiodes immitis, Corynebacterium diptheriae, Cryptococcus neoformans, Enterobacter cloacae, Enterococcus faecalis, Enterococcus faecium, Escherichia coli, Haemophilus influenzae, Helicobacter pylori, Histoplasma capsulatum, Klebsiella pneumoniae, Listeria monocytogenes, Mycobacterium leprae, Mycobacterium tuberculosis, Neisseria gonorrhoeae, Neisseria meningitidis, Nocardia asteroides, Pasteurella haemolytica, Pasteurella multocida, Pneumocystis carinii Proteus vulgaris, Pseudomonas aeruginosa, Salmonella bongori, Salmonella cholerasuis, Salmonella enterica, Salmonella paratyphi, Salmonella typhi, Salmonella typhimurium, Staphylococcus aureus, Listeria monocytogenes, Moxarella catarrhalis, Shigella boydii, Shigella dysenteriae, Shigella flexneri, Shigella sonnei, Staphylococcus epidermidis, Streptococcus pneumoniae, Streptococcus mutans, Treponema pallidum, Yersinia enterocolitica, Yersinia pestis or any species falling within the genera of any of the above species may be evaluated. In some embodiments of the present invention, the ability of the antisense nucleic acid to inhibit the growth of an organism other than E. coli may be evaluated.

[0770] In such methods, expression vectors in which the expression of an antisense nucleic acid that inhibits the growth of Staphylococcus aureus, Salmonella typhimurium, Klebsiella pneumoniae, Pseudomonas aeruginosa, Enterococcus faecalis, Escherichia coli, Enterococcus faecalis, Haemophilus influenzae, Helicobacter pylori, or Salmonella typhi is under the control of an inducible promoter are introduced into the cells or microorganisms in which they are to be evaluated. In some embodiments, the antisense nucleic acids may be evaluated in cells or microorganisms which are closely related to Staphylococcus aureus, Salmonella typhimurium, Klebsiella pneumoniae, Pseudomonas aeruginosa, Enterococcus faecalis, Escherichia coli, Enterococcus faecalis, Haemophilus influenzae, Helicobacter pylori, or Salmonella typhi. The ability of these antisense nucleic acids to inhibit the growth of the related cells or microorganisms in the presence of the inducer is then measured.

[0771] For example, thirty-nine antisense nucleic acids which inhibited the growth of Staphylococcus aureus were identified using methods such as those described herein and were inserted into an expression vector such that their expression was under the control of a xylose-inducible Xyl-T5 promoter. A vector with Green Fluorescent Protein (GFP) under control of the Xyl-T5 promoter was used to show that expression from the Xyl-T5 promoter in Staphylococcus epidermidis was comparable to that in Staphylococcus aureus.

[0772] The vectors were introduced into Staphylococcus epidermidis by electroporation as follows: Staphylococcus epidermidis was grown in liquid culture to mid-log phase and then harvested by centrifugation. The cell pellet was resuspended in 1/3 culture volume of ice-cold EP buffer (0.625 M sucrose, 1 mM MgCl₂, pH=4.0), and then harvested again by centrifugation. The cell pellet was then resuspended with 1/40 volume EP buffer and allowed to incubate on ice for 1 hour. The cells were then frozen for storage at −80° C. For electroporation, 50 μl of thawed electrocompetent cells were combined with 0.5 μg plasmid DNA and then subjected to an electrical pulse of 10 kV/cm, 25 uFarads, 200 ohm using a biorad gene pulser electroporation device. The cells were immediately resuspended with 200 μl outgrowth medium and incubated for 2 hours prior to plating on solid growth medium with drug selection to maintain the plasmid vector. Colonies resulting from overnight growth of these platings were selected, cultured in liquid medium with drug selection, and then subjected to dilution plating analysis as described for Staphylococcus aureus in Example 10 above to test growth sensitivity in the presence of the inducer xylose.

[0773] The results are shown in Table VI below. The first column indicates the Molecule Number of the Staphylococcus aureus antisense nucleic acid which was introduced into Staphylococcus epidermidis. The second column indicates whether the antisense nucleic acid inhibited the growth of Staphylococcus epidermidis, with a indicating that growth was inhibited. Of the 39 Staphylococcus aureus antisense nucleic acids evaluated, 20 inhibited the growth of Staphylococcus epidermidis.

TABLE VI
Sensitivity of Other Microorganisms to Antisense Nucleic Acids
That Inhibit Proliferation of Staphylococcus aureus

| Mol. No. | S. epidermidis |
|---|---|
| SaXA005 | + |
| SaXA007 | + |
| SaXA008 | + |
| SaXA009 | + |
| SaXA010 | − |
| SaXA011 | − |
| SaXA012 | − |
| SaXA013 | − |
| SaXA015 | + |
| SaXA017 | − |
| SaXA022 | + |
| SaXA023 | − |
| SaXA024 | − |
| SaXA025 | + |
| SaXA026 | + |
| SaXA027 | − |
| SaXA027b | − |
| SaXA02c | − |
| SaXA028 | − |
| SaXA029 | + |
| SaXA030 | − |
| SaXA032 | + |
| SaXA033 | + |
| SaXA034 | − |
| SaXA035 | + |
| SaXA037 | − |
| SaXA039 | − |
| SaXA042 | − |
| SaXA043 | − |
| SaXA044 | − |
| SaXA045 | + |
| SaXA051 | + |
| SaXA053 | − |
| SaXA056b | − |
| SaXA059a | + |
| SaXA060 | − |
| SaXA061 | + |
| SaXA062 | + |
| SaXA063 | − |
| SaXA065 | − |

[0774] Although the results shown above were obtained using a subset of the nucleic acids of the present invention, it will be appreciated that similar analyses may be performed using the other nucleic acids of the present invention to determine whether they inhibit the proliferation of cells or microorganisms other than Staphylococcus aureus, Salmonella typhimurium, Klebsiella pneumoniae, Pseudomonas aeruginosa, Enterococcus faecalis, Escherichia coli, Enterococcus faecalis, Haemophilus influenzae, Helicobacter pylori, or Salmonella typhi.

[0775] Thus, it will be appreciated that the above methods for evaluating the ability of an antisense nucleic acid to inhibit the proliferation of a heterologous organism may be performed using antisense nucleic acids complementary to any of the proliferation-required nucleic acids from Staphylococcus aureus, Salmonella typhimurium, Klebsiella pneumoniae, Pseudomonas aeruginosa, Enterococcus faecalis, Escherichia coli, Enterococcus faecalis, Haemophilus influenzae, Helicobacter pylori, or Salmonella typhi, (including antisense nucleic acids complementary to SEQ ID NOs.: 3796-3800, 3806-4860, 5916-10012, such as the antisense nucleic acids of SEQ ID NOs.: 8-3795) or portions thereof, antisense nucleic acids complementary to homologous coding nucleic acids or portions thereof, or homologous antisense nucleic acids.

### Example 12C

[0776] As a demonstration of the methodology required to find homologues to an essential gene, nine prokaryotic organisms were analyzed and compared in detail. First, the most reliable source of gene sequences for each organism was assessed by conducting a survey of the public and private data sources. The nine organisms studied are Escherichia coli, Haemophilus influenzae, Helicobacter pylori, Klebsiella pneumoniae, Pseudomonas aeruginosa, Staphylococcus aureus, Streptococcus pneumoniae and Salmonella typhi. Full-length gene protein and nucleotide sequences for these organisms were assembled from various sources. For Escherichia coli, Haemophilus influenzae and Helicobacter pylori, gene sequences were adopted from the public sequencing projects, and derived from the GenPept 115 database (available from NCBI). For Pseudomonas aeruginosa, gene sequences were adopted from the Pseudomonas genome sequencing project (downloaded from http://www.pseudomonas.com). For Klebsiella pneumoniae, Staphylococcus aureus, Streptococcus pneumoniae and Salmonella typhi, genomic sequences from PathoSeq v 4.1 (Mar 2000 release) was reanalyzed for ORFs using the gene finding software GeneMark v 2.4a, which was purchased from GenePro Inc. 451 Bishop St., N.W., Suite B, Atlanta, Ga., 30318, USA.

[0777] Subsequently, the essential genes found by the antisense methodology were compared to the derived proteomes of interest, in order to find all the homologous genes to a given gene. This comparison was done using the FASTA program v3.3. Genes were considered homologues if they were greater than 25% identical and the alignment between the two genes covered more than 70% of the length of one of the genes. The best homologue for each of the nine organisms, defined as the most significantly scoring match which also fulfilled the above criteria, was reported in Table VIIA. Table VIIA lists the best ORF identified as described above (column labelled LOCUSID), the SEQ ID, % identity, and the amount of the protein which aligns well with the query sequence (coverage) for the gene identified in each of the nine organisms evaluated as described above.

[0778] Table VIIB lists the PathoSeq cluster ID for genes identified as being required for proliferation in Enterococcus faecalis, Escherichia coli, Pseudomonas aeruginosa, and Staphylococcus aureus using the methods described herein. As indicated in the column labelled PathoSeq cluster ID, these sequences share homology to one another and were consequently grouped within the same PathoSeq cluster. Thus, the methods described herein identified genes required for proliferation in several species which share homology.

TABLE VIIA

| | | Escherichia | Enterococcus | Haemophilus | Helicobacter | Klebsiella | Pseudomonas | Staphylococcus | Streptococcus | Salmonella | | | |
|---|---|---|---|---|---|---|---|---|---|---|---|---|---|
| LOCUSID | Data | coli | faecalis | influenzae | pylori | pneumoniae | aeruginosa | aureus | pneumoniae | typhi | | | |
| EFA100001 | SeqID | 10430 | 10618 | 10998 | 11603 | 11739 | | 12309 | 13524 | 14040 | | | |
| | IDENTITY | 27% | 100% | 28% 28% | 29% | | 52% | 55% | 28% | | | | |
| | COVERAGE | 99% | 100% | 101% | 79% | 77% | | 98% | 98% | 98% | | | |
| EFA100023 | SeqID | | 10505 | | | | | 12860 | 13392 | | | | |
| | IDENTITY | | 100% | | | | | 27% | 39% | | | | |
| | COVERAGE | | 100% | | | | | 95% | 101% | | | | |
| EFA100065 | SeqID | 10322 | 10813 | 11177 | 11351 | | 12018 | 12820 | 13186 | 13733 | | | |
| | IDENTITY | 49% | 100% | 49% | 44% | | 48% | 59% | 65% | 48% | | | |
| | COVERAGE | 96% | 100% | 95% | 96% | | 97% | 97% 98% | 96% | | | | |
| EFA100151 | SeqID | 10128 | 10516 | 11247 | 11340 | | 11891 | 12529 | 13362 | | | | |
| | IDENTITY | 50% | 100% | 37% | 46% | | 49% | 54% | 51% | | | | |
| | COVERAGE | 99% | 100% | 100% | 100% | | 100% | 99% | 100% | | | | |
| EFA100157 | SeqID | | 10673 | | 11448 | 12352 | 13176 | | | | | | |
| | IDENTITY | | 100% | | 39% | 64% | 74% | | | | | | |
| | COVERAGE | | 100% | | 98% | 98% | 99% | | | | | | |
| EFA100165 | SeqID | 10031 | 10637 | 11189 | 11564 | | 12009 | 12614 | 13399 | 14078 | | | |
| | IDENTITY | 31% | 100% | 33% | 28% | | 32% | 29% | 27% | 29% | | | |
| | COVERAGE | 97% | 100% | 98% | 100% | | 96% | 90% | 96% | 97% | | | |
| EFA100190 | SeqID | 10364 | 10480 | 11061 | 11408 | 11659 | 11996 | 12444 | 13232 | 13966 | | | |
| | IDENTITY | 54% | 100% | 57% | 55% | 55% | 54% | 78% | 80% | 54% | | | |
| | COVERAGE | 100% | 101% | 100% | 99% | 90% | 100% | 101% | 101% | 101% | | | |
| EFA100194 | SeqID | 10336 | 10540 | 11120 | 11426 | | 11989 | 12230 | 13222 | 14096 | | | |
| | IDENTITY | 60% | 100% | 62% | 62% | | 60% | 85% | 86% | 61% | | | |
| | COVERAGE | 100% | 101% | 100% | 102% | 100% | 101% | 92% | 101% | | | | |
| EFA100200 | SeqID | 10323 | 10798 | 11193 | | | 12020 | 12527 | 13561 | 13731 | | | |
| | IDENTITY | 39% | 100% | 38% | | | 40% | 50% | 59% | 39% | | | |
| | COVERAGE | 85% | 100% | 87% | | | 85% | 85% | 88% | 85% | | | |
| EFA100210 | SeqID | 10352 | 10560 | 11104 | 11439 | | 5171 | 12260 | 13204 | 13968 | | | |
| | IDENTITY | 53% | 100% | 53% | 53% | | 54% | 74% | 93% | 53% | | | |
| | COVERAGE | 95% | 101% | 95% | 94% | | 95% | 101% | 94% | 95% | | | |
| EFA100211 | SeqID | 10351 | 10523 | 11105 | 11438 | | 11992 | 12214 | 13205 | | | | |
| | IDENTITY | 46% | 100% | 46% | 39% | | 43% | 69% | 63% | | | | |
| | COVERAGE | 87% | 101% | 87% | 81% | | 87% | 97% | 81% | _______ | | | |
| EFA100289 | SeqID | 10284 | 10810 | | | | 11827 | | 13245 | | | | |
| | IDENTITY | 30% | 100% | | | | 31% | | 25% | | | | |
| | COVERAGE | 85% | 100% | | | | 90% | | 84% | | | | |
| EFA100295 | SeqID | 10045 | 10517 | 11174 | 11601 | | 11937 | 12390 | 13616 | 13911 | | | |
| | IDENTITY | 43% | 100% | 41% | 41% | | 45% | 44% | 45% | 43% | | | |
| | COVERAGE | 92% | 101% | 95% | 97% | | 97% | 99% | 94% | 72% | | | |
| EFA100312 | SeqID | | 10641 | | | | | 12178 | | | | | |
| | IDENTITY | | 100% | | | | | 33% | | | | | |
| | COVERAGE | | 100% | | | | | 88% | | | | | |
| EFA100329 | SeqID | | 10782 | | | | | | | | | | |
| | IDENTITY | | 100% | | | | | | | | | | |
| | COVERAGE | | 100% | | | | | | | | | | |
| EFA100394 | SeqID | 10465 | 10675 | 11238 | 11563 | | 11961 | 13003 | 13684 | 13853 | | | |
| | IDENTITY | 43% | 100% | 43% | 42% | | 44% | 66% | 72% | 44% | | | |
| | COVERAGE | 108% | 100% | 109% | 101% | | 108% | 99% | 100% | 108% | | | |
| EFA100397 | SeqID | 10027 | 10773 | 11185 | | | 12012 | 12396 | 13478 | 14074 | | | |
| | IDENTITY | 31% | 100% | 29% | | | 29% | 43% | 46% | 31% | | | |
| | COVERAGE | 96% | 100% | 98% | | | 93% | 91% | 97% | 93% | | | |
| EFA100399 | SeqID | 10295 | 10766 | 11196 | 11483 | | 11791 | 12281 | 13413 | 13739 | | | |
| | IDENTITY | 63% | 100% | 59% | 59% | | 58% | 72% | 76% | 63% | | | |
| | COVERAGE | 98% | 100% | 98% | 99% | | 101% | 99% | 100% | 98% | | | |
| EFA100426 | SeqID | 10224 | 10702 | | | 11638 | | 12139 | 13348 | 13957 | | | |
| | IDENTITY | 28% | 100% | | | 29% | | 42% | 41% | 28% | | | |
| | COVERAGE | 99% | 101% | 99% | | 91% | 109% | 99% | | | | | |
| EFA100478 | SeqID | 10486 | 11135 | 11338 | | | 12986 | 13184 | | | | | |
| | IDENTITY | 100% | 29% | 31% | | | 44% | 43% | | | | | |
| | COVERAGE | 100% | 72% | 70% | | | 99% | 98% | | | | | |
| EFA100615 | SeqID | 10501 | 11139 | | | 12028 | 12641 | 13331 | | | | | |
| | IDENTITY | 100% | 44% | | | 47% | 61% | 78% | | | | | |
| | COVERAGE | 100% | 82% | | | 81% | 100% | 100% | | | | | |
| EFA100617 | SeqID | 10314 | 10764 | 11216 | 11391 | | 5198 | 12322 | 13381 | 13765 | | | |
| | IDENTITY | 43% | 100% | 43% | 44% | | 51% | 63% | 69% | 44% | | | |
| | COVERAGE | 95% | 100% | 96% | 78% | | 73% | 84% | 82% | 93% | | | |
| EFA100641 | SeqID | 10205 | 10793 | | | | 11896 | 12862 | 13334 | | | | |
| | IDENTITY | 28% | 100% | | | | 31% | 50% | 32% | | | | |
| | COVERAGE | 79% | 100% | | | | 74% | 85% | 82% | | | | |
| EFA100642 | SeqID | | 10792 | 11520 | 12023 | 12493 | 13367 | | | | | | |
| | IDENTITY | | 100% | 46% | 46% | 73% | 69% | | | | | | |
| | COVERAGE | | 100% | 100% | 101% | 100% | 100% | | | | | | |
| EFA100668 | SeqID | 10026 | 10679 | 11184 | 11613 | | 12013 | 12891 | 13505 | 14073 | | | |
| | IDENTITY | 28% | 100% | 28% | 29% | | 28% | 29% | 50% | 27% | | | |
| | COVERAGE | 83% | 100% | 76% | 78% | | 92% | 82% | 99% | 95% | | | |
| EFA100689 | SeqID | | 10717 | | | | | 12523 | 13698 | | | | |
| | IDENTITY | | 100% | | 33% | 33% | | | | | | | |
| | COVERAGE | | 100% | | | | | 100% | 100% | | | | |
| EFA100704 | SeqID | 10362 | 10482 | 11059 | 11415 | | 11995 | 12442 | 13171 | 13964 | | | |
| | IDENTITY 78% | 100% | 78% | 77% | | 75% | 90% | 78% | 77% | | | | |
| | COVERAGE | 100% | 100% | 100% | 101% | | 101% | 100% | 101% | 100% | | | |
| EFA100739 | SeqID | 10111 | 10537 | 11052 | 11429 | 11651 | 11876 | 12228 | 13220 | 14010 | | | |
| | IDENTITY 71% | 100% | 69% | 63% | 70% | 71% | 84% | 84% | 70% | | | | |
| | COVERAGE | 83% | 101% | 83% | 86% | 87% | 83% | 87% | 87% | 87% | | | |
| EFA100740 | SeqID | 10075 | 10536 | 11008 | 11348 | 11633 | 11942 | 12227 | 13219 | 13717 | | | |
| | IDENTITY 45% | 100% | 47% | 30% | 45% | 48% | 64% | 60% | 44% | | | | |
| | COVERAGE | 94% | 100% | 94% | 93% | 94% | 82% | 94% | 93% | 94% | | | |
| EFA100741 | SeqID | 10339 | 10535 | 11118 | 11430 | | 11991 | 12226 | 13218 | 14098 | | | |
| | IDENTITY 40% | 100% | 37% | 34% | | 39% | 48% | 60% | 40% | | | | |
| | COVERAGE | 103% | 100% | | 102% | 101% | 102% | 101% | 100% | 103% | | | |
| EFA100742 | SeqID | 10340 | 10534 | 11116 | 11431 | | 5160 | 12225 | 13217 | 14099 | | | |
| | IDENTITY 52% | 100% | 52% | 39% | | 46% | 79% | 88% | 52% | | | | |
| | COVERAGE | 99% | 101% | 99% | 92% | | 99% | 101% | 101% | 99% | | | |
| EFA100748 | SeqID | 10287 | 10483 | 11004 | 11523 | 11690 | 11944 | 12595 | | 13868 | | | |
| | IDENTITY 41% | 100% | 39% | 29% | 42% | 44% | 52% | | 41% | | | | |
| | COVERAGE | 99% | 100% | 99% | 94% | 98% | 100% | 100% | | 100% | | | |
| EFA100756 | SeqID | 10112 | 10575 | | 11396 | | 11875 | 12327 | 13343 | 14009 | | | |
| | IDENTITY 49% | 100% | 43% | | 45% | 64% | 62% | 47% | | | | | |
| | COVERAGE | 75% | 102% | | 75% | | 81% | 94% | 94% | 75% | | | |
| EFA100757 | SeqID | 10155 | 10897 | | | | | | | | | | |
| | IDENTITY | 27% | 100% | | | | | | | | | | |
| | COVERAGE | 85% | 100% | | | | | | | | | | |
| EFA100783 | SeqID | 10035 | 10811 | 10986 | | 11543 | 11953 | 12738 | 13261 | 13914 | | | |
| | IDENTITY | 32% | 100% | 34% | 86% | | 37% | 77% | 75% | 31% | | | |
| | COVERAGE | 104% | 100% | 83% | 100% | | 78% | 100% | 99% | 99% | | | |
| EFA100795 | SeqID | 10863 | | | | | | 13416 | | | | | |
| | IDENTITY | 100% | | | | | | 50% | | | | | |
| | COVERAGE | 101% | | | | | | 101% | | | | | |
| EFA100798 | SeqID | 10382 | 10818 | 11153 | 11550 | | 11775 | | 13641 | | | | |
| | IDENTITY | 62% | 100% | 61% | 56% | | 63% | | 85% | | | | |
| | COVERAGE | 95% | 100% | 95% | 89% | | 92% | | 96% | | | | |
| EFA100811 | SeqID | | 10546 | | | | | 12236 | 13439 | | | | |
| | IDENTITY | | 100% | | | | | 48% | 58% | | | | |
| | COVERAGE | | 101% | | | | | 98% | 99% | | | | |
| EFA100870 | SeqID | 10439 | 10627 | 11036 | 11410 | | 5179 | 12446 | 13646 | 14042 | | | |
| | IDENTITY | 47% | 100% | 46% | 52% | | 46% | 72% | 78% | 46% | | | |
| | COVERAGE | 114% | 100% | 117% | 79% | | 116% | 99% | 98% | 114% | | | |
| EFA100914 | SeqID | 10399 | 10579 | 11018 | 11617 | 11758 | 12111 | 12368 | 13230 | 14065 | | | |
| | IDENTITY | 40% | 100% | 40% | 34% | 40% | 40% | 59% | 63% | 40% | | | |
| | COVERAGE | 102% | 100% | 102% | 101% | 102% | 102% | 101% | 95% | 102% | | | |
| EFA100919 | SeqID | 10269 | 10491 | 11127 | 11419 | | 11809 | 12556 | 13594 | 13874 | | | |
| | IDENTITY | 44% | 100% | 45% | 40% | | 46% | 55% | 63% | 45% | | | |
| | COVERAGE | 101% | 100% | 101% | 99% | | 101% | 101% | 100% | 101% | | | |
| EFA100955 | SeqID | 10333 | 10542 | 11123 | 11582 | 11627 | 5158 | 12232 | 13224 | 14093 | | | |
| | IDENTITY | 48% | 100% | 48% | 42% | 49% | 43% | 65% | 76% | 48% | | | |
| | COVERAGE | 98% | 101% | 98% | 98% | 79% | 98% | 99% | 101% | 98% | | | |
| EFA100970 | SeqID | | 10906 | | | | | | | | | | |
| | IDENTITY | | 100% | | | | | | | | | | |
| | COVERAGE | | 100% | | | | | | | | | | |
| EFA100978 | SeqID | 10334 | 10541 | 11122 | 11583 | | 11987 | 12231 | 13223 | 14094 | | | |
| | IDENTITY | 46% | 100% | 46% | 35% | | 45% | 71% | 70% | 46% | | | |
| | COVERAGE | 100% | 100% | 99% | 98% | | 102% | 101% | 100% | 100% | | | |
| EFA100991 | SeqID | 10221 | 10681 | 11210 | 11607 | 11668 | 11801 | 12289 | 13191 | 14027 | | | |
| | IDENTITY | 42% | 100% | 40% | 29% | 42% | 39% | 49% | 56% | 30% | | | |
| | COVERAGE | 91% | 100% | 93% | 98% | 94% | 91% | 93% | 92% | 93% | | | |
| EFA101022 | SeqID | 10260 | 10875 | 10982 | 11401 | | 11945 | 12715 | 13251 | 14086 | | | |
| | IDENTITY | 59% | 100% | 58% | 50% | | 61% | 76% | 86% | 56% | | | |
| | COVERAGE | 85% | 101% | 85% | 88% | | 85% | 85% | 89% | 89% | | | |
| EFA101060 | SeqID | | 10722 | | 11575 | 11646 | 11957 | 12504 | 13554 | | | | |
| | IDENTITY | | 100% | | 35% | 37% | 34% | 71% | 67% | | | | |
| | COVERAGE | | 101% | 83% | 77% | 97% | 100% | 101% | | | | | |
| EFA101086 | SeqID | 10315 | 10763 | 11215 | 11454 | 11716 | 12052 | 12953 | 13662 | 13764 | | | |
| | IDENTITY | 37% | 100% | 37% | 27% | 38% | 35% | 57% | 55% | 36% | | | |
| | COVERAGE | 91% | 100% | 89% | 98% | 91% | 92% | 98% | 95% | 93% | | | |
| EFA101120 | SeqID | 10017 | 10687 | 11219 | 11331 | | 12057 | 12505 | 13498 | 14012 | | | |
| | IDENTITY | 30% | 100% | 31% | 27% | | 29% | 26% | 64% | 29% | | | |
| | COVERAGE | 102% | 100% | 102% | 74% | | 103% | 99% | 98% | 103% | | | |
| EFA101121 | SeqID | | 10686 | | | | | 12606 | 13600 | | | | |
| | IDENTITY | | 100% | | 38% | 50% | | | | | | | |
| | COVERAGE | | 100% | | 98% | 99% | | | | | | | |
| EFA101123 | SeqID | 10420 | 10748 | 11131 | 11478 | 11629 | 11820 | 12674 | 13265 | 13783 | | | |
| | IDENTITY | 43% | 100% | 39% | 33% | 43% | 40% | 70% | 70% | 42% | | | |
| | COVERAGE | 98% | 100% | 97% | 97% | 94% | 96% | 99% | 100% | 98% | | | |
| EFA101141 | SeqID | 10436 | 10614 | 11071 | 11573 | | 5181 | 12450 | 13246 | 14045 | | | |
| | IDENTITY | 35% | 100% | 40% | 35% | | 40% | 60% | 70% | 31% | | | |
| | COVERAGE | 94% | 101% | 96% | 95% | 95% | | 98% | 101% | 96% | | | |
| EFA101150 | eqID | 10174 | 10719 | 11221 | 11556 | | 11880 | 12985 | 13385 | 13943 | | | |
| | IDENTITY | 35% | 100% | 36% | 26% | | 33% | 45% | 58% | 36% | | | |
| | COVERAGE | 100% | 100% | 100% | 102% | 100% | 100% | 100% | 73% | | | | |
| EFA101159 | SeqID | 10359 | 10543 | 11097 | 11442 | | 5176 | 12235 | 13197 | 13974 | | | |
| | IDENTITY | 55% | 100% | 52% | 48% | 49% | 58% | 89% | 53% | | | | |
| | COVERAGE | 100% | 101% | 100% | 81% | | 101% | 99% | 99% | 100% | | | |
| EFA101160 | SeqID | 10358 | 10549 | 11098 | 11595 | | 5175 | 12240 | 13198 | 13973 | | | |
| | IDENTITY | 43% | 100% | 43% | 33% | | 45% | 62% | 74% | 43% | | | |
| | COVERAGE | 92% | 100% | 92% | 96% | | 92% | 100% | 100% | 93% | | | |
| EFA101161 | SeqID | 10357 | 10551 | 11099 | | | 11994 | 12242 | 13199 | 13972 | | | |
| | IDENTITY | 39% | 100% | 35% | | | 37% | 69% | 66% | 36% | | | |
| | COVERAGE | 86% | 101% | 99% | | | 96% | 93% | 103% | 100% | | | |
| EFA101162 | SeqID | 10356 | 10555 | 11100 | 11441 | 11679 | 11993 | 12249 | 13200 | 13971 | | | |
| | IDENTITY | 58% | 100% | 58% | 59% | 59% | 57% | 78% | 84% | 58% | | | |
| | COVERAGE | 100% | 100% | 100% | 100% | 100% | 99% | 100% | 100% | 100% | | | |
| EFA101163 | SeqID | 10355 | 10557 | 11101 | 11594 | | 5174 | 12255 | 13201 | | | | |
| | IDENTITY | 66% | 100% | 68% | 60% | | 70% | 84% | 90% | | | | |
| | COVERAGE | 100% | 101% | 99% | 97% | | 100% | 101% | 100% | | | | |
| EFA101164 | SeqID | 10354 | 10558 | 11102 | 11593 | | 5173 | 12258 | 13202 | 13970 | | | |
| | IDENTITY | 55% | 100% | 58% | 47% | | 57% | 66% | 81% | 55% | | | |
| | COVERAGE | 91% | 101% | 91% | 91% | | 85% | 91% | 97% | 91% | | | |
| EFA101165 | SeqID | 10353 | 10559 | 11103 | 11592 | | 517212259 | 13203 13969 | | | | | |
| | IDENTITY | 59% | 100% | 60% | 52% | | 61% | 78% | 88% | 59% | | | |
| | COVERAGE | 95% | 100% | 95% | 99% | | 95% | 100% | 100% | 95% | | | |
| EFA101169 | SeqID | 10133 | 10574 | 11091 | | | 12025 | 12516 | | 13849 | | | |
| | IDENTITY | 27% | 100% | 28% | | | 26% | 41% | | 27% | | | |
| | COVERAGE | 93% | 100% | 97% | | | 94% | 100% | | 93% | | | |
| EFA101253 | SeqID | 10389 | 10852 | 11065 | 11551 | | 11838 | 13072 | 13457 | | | | |
| | IDENTITY | 43% | 100% | 42% | 31% | | 39% | 54% | 67% | | | | |
| | COVERAGE | 97% | 100% | 97% | 96% | | 99% | 97% | 99% | | | | |
| EFA101257 | SeqID | 10124 | 10917 | 10976 | 11484 | | 11914 | 12528 | 13357 | 14037 | | | |
| | IDENTITY | 40% | 100% | 39% | 39% | | 37% | 39% | 58% | 38% | | | |
| | COVERAGE | 99% | 100% | 99% | 101% | 97% | 97% | 100% | 101% | | | | |
| EFA101258 | SeqID | 10127 | 10918 | 10973 | 11513 | | 11892 | 12802 | 13358 | 13871 | | | |
| | IDENTITY | 40% | 100% | 40% | 39% | | 36% | 41% | 66% | 29% | | | |
| | COVERAGE | 97% | 101% | 96% | 95% | | 96% | 92% | 95% | 92% | | | |
| EFA101322 | SeqID | | 10620 | | | | | 12534 | 13328 | | | | |
| | IDENTITY | | 100% | | 66% | 65% | | | | | | | |
| | COVERAGE | | 100% | | | | | 86% | 86% | | | | |
| EFA101339 | SeqID | | 10743 | 11448 | | | 12326 | 13391 | | | | | |
| | IDENTITY | | 100% | 33% | | | 46% | 60% | | | | | |
| | COVERAGE | | 100% | | 97% | | | 98% | 98% | | | | |
| EFA101340 | SeqID | | 10745 | | | | | | | | | | |
| | IDENTITY | | 100% | | | | | | | | | | |
| | COVERAGE | | 102% | | | | | | | | | | |
| EFA101354 | SeqID | 10047 | 10648 | 11089 | 11608 | | 11935 | 12617 13345 | 13913 | | | | |
| | IDENTITY | 33% | 100% | 33% | 32% | | 34% | 38% | 36% | 32% | | | |
| | COVERAGE | 101% | 100% | 104% | 101% | 104% | 97% | 100% | 101% | | | | |
| EFA101370 | SeqID | | 10738 | | | | | 13126 | | | | | |
| | IDENTITY | | 100% | | | | | 31% | | | | | |
| | COVERAGE | | 101% | | | | | 98% | | | | | |
| EFA101403 | SeqID | | 10662 | | | | | 12941 | | | | | |
| | IDENTITY | | 100% | | | | | 34% | | | | | |
| | COVERAGE | | 100% | | | | | 100% | | | | | |
| EFA101404 | SeqID | 10210 | 10663 | 11214 | 11554 | | 11921 | 12135 13418 | 13925 | | | | |
| | IDENTITY | 29% | 100% | 28% | 39% | | 27% | 59% | 64% | 30% | | | |
| | COVERAGE | 99% | 100% | 102% | 98% | | 100% | 99% | 99% | 99% | | | |
| EFA101409 | SeqID | 10350 | 10524 | 11106 | 11437 | | 5170 | 12215 | 13207 | | | | |
| | IDENTITY | 54% | 100% | 58% | 44% | | 53% | 81% | 87% | | | | |
| | COVERAGE | 83% | 101% | 80% | 86% | | 91% | 91% | 91% | _______ | | | |
| EFA101410 | SeqID | 10349 | 10525 | 11107 | 11436 | | 5169 | 12216 | 13208 | 14108 | | | |
| | IDENTITY | 62% | 100% | 64% | 63% | | 66% | 90% | 90% | 62% | | | |
| | COVERAGE | 101% | 101% | 101% | 100% | 100% | 101% | 101% | 102% | | | | |
| EFA101411 | SeqID | 10348 | 10526 | 11108 | | | 5168 | 12217 | 13209 | 14107 | | | |
| | IDENTITY | 50% | 100% | 43% | | | 49% | 66% | 71% | 46% | | | |
| | COVERAGE | 97% | 101% | 97% | | | 93% | 96% | 99% | 97% | | | |
| EFA101412 | SeqID | 10347 | 10527 | 11109 | 11589 | 11654 | 5167 | 12218 | 13210 | 14106 | | | |
| | IDENTITY | 60% | 100% | 59% | 52% | 61% | 58% | 85% | 83% | 60% | | | |
| COVERAGE | 100% | 101% | 100% | 98% | 101% | 99% | 92% | 100% | 101% | | | | |
| EFA101414 | SeqID | 10345 | 10528 | 11111 | 11435 | | 5165 | 12219 | 13212 | 14104 | | | |
| | IDENTITY | 49% | 100% | 47% | 42% | | 46% | 79% | 81% | 49% | | | |
| | COVERAGE | 99% | 101% | 99% | 99% | | 100% | 101% | 101% | 101% | | | |
| EFA101415 | SeqID | 10344 | 10529 | 11112 | 11434 | | 5164 | 12220 | 13213 | 14103 | | | |
| IDENTITY | 47% | 100% | 50% | 39% | | 49% | 63% | 74% | 47% | | | | |
| COVERAGE | 98% | 101% | 98% | 100% | 98% | 101% | 101% | 98% | | | | | |
| EFA101416 | SeqID | 10343 | 10530 | 11113 | 11433 | | 5163 | 12221 | 13214 | 14102 | | | |
| | IDENTITY | 50% | 100% | 48% | 42% | | 52% | 68% | 82% | 51% | | | |
| | COVERAGE | 97% | 101% | 97% | 91% | | 94% | 99% | 101% | 98% | | | |
| EFA101417 | SeqID | 10342 | 10531 | 11114 | 11432 | | 5162 | 12222 | 13215 | 14101 | | | |
| | IDENTITY | 55% | 100% | 56% | 61% | | 52% | 72% | 85% | 55% | | | |
| | COVERAGE | 100% | 101% | 95% | 84% | | 92% | 95% | 94% | 100% | | | |
| EFA101424 | SeqID | 10220 | 10784 | 11276 | | 11765 | 11950 | 12350 | 13280 | 13934 | | | |
| | IDENTITY | 44% | 100% | 38% | | 34% | 36% | 65% | 79% | 41% | | | |
| | COVERAGE | 99% | 101% | 97% | | 73% | 78% | 101% | 99% | 99% | | | |
| EFA101425 | SeqID | 10240 | 10785 | 11275 | | | 11925 | 12351 13281 | 13863 | | | | |
| | IDENTITY | 49% | 100% | 50% | | | 39% | 63% | 78% | 47% | | | |
| | COVERAGE | 99% | 100% | 99% | | | 99% | 100% | 100% | 84% | | | |
| EFA101477 | SeqID | 10263 | 10861 | 10965 | 11562 | | 11948 | 13066 | 13525 | 14089 | | | |
| | IDENTITY | 52% | 100% | 50% | 41% | | 49% | 59% | 72% | 50% | | | |
| | COVERAGE | 91% | 100% | 95% | 91% | | 95% | 94% | 91% | 91% | | | |
| EFA101536 | SeqID | 10281 | 10823 | | | | | | | | | | |
| | IDENTITY | 30% | 100% | | | | | | | | | | |
| | COVERAGE | 86% | 100% | | | | | | | | | | |
| EFA101540 | SeqID | 10041 | 10487 | 11149 | 11456 | | 11941 | 12314 | 13438 | 13907 | | | |
| | IDENTITY | 51% | 100% | 50% | 50% | | 49% | 73% | 76% | 51% | | | |
| | COVERAGE | 92% | 100% | 90% | 86% | | 92% | 92% | 99% | 92% | | | |
| EFA101541 | SeqID | 10042 | 10488 | 11150 | 11620 | | 11940 | 12742 | 13437 | 13908 | | | |
| | IDENTITY | 41% | 100% | 45% | 35% | | 44% | 63% | 44% | 41% | | | |
| | COVERAGE | 100% | 100% | 98% | 121% | | 101% | 100% | 116% | 100% | | | |
| EFA101583 | SeqID | | 10593 | | | | | | | | | | |
| | IDENTITY | | 100% | | | | | | | | | | |
| | COVERAGE | | 100% | | | | | | | | | | |
| EFA101670 | SeqID | | 10511 | | | | | | | | | | |
| | IDENTITY | | 100% | | | | | | | | | | |
| | COVERAGE | | 100% | | | | | | | | | | |
| EFA101682 | SeqID | 10238 | 10789 | 11178 | 11517 | | 11829 | 12811 | 13673 | 13864 | | | |
| | IDENTITY | 45% | 100% | 45% | 40% | | 44% | 57% | 57% | 45% | | | |
| | COVERAGE | 97% | 100% | 98% | 95% | | 91% | 96% | 95% | 97% | | | |
| EFA101685 | SeqID | | 10791 | | 11369 | | 12022 | 12492 | 13368 | | | | |
| | IDENTITY | | 100% | | 47% | | 51% | 62% | 69% | | | | |
| | COVERAGE | | 100% | | 92% | | 98% | 97% | 99% | | | | |
| EFA101686 | SeqID | 10237 | 10940 | 10999 | 11325 | | 11901 | 12456 | 13455 | 13956 | | | |
| | IDENTITY | 39% | 100% | 37% | 37% | | 36% | 64% | 63% | 38% | | | |
| | COVERAGE | 99% | 100% | 99% | 99% | | 99% | 99% | 99% | 99% | | | |
| EFA101695 | SeqID | 10204 | 10629 | 11017 | 11479 | 11715 | 12106 | 12560 | 13284 | 13928 | | | |
| | IDENTITY | 34% | 100% | 32% | 34% | 31% | 35% | 51% | 75% | 34% | | | |
| | COVERAGE | 104% | 100% | 106% | 76% | 93% | 101% | 100% | 99% | 105% | | | |
| EFA101736 | SeqID | 10219 | 10775 | 11024 | | | 11924 | 12300 | 13340 | 13976 | | | |
| | IDENTITY | 33% | 100% | 29% | | | 27% | 35% | 32% | 28% | | | |
| | COVERAGE | 100% | 100% | 100% | | | 99% | 98% | 99% | 100% | | | |
| EFA101737 | SeqID | 10218 | 10778 | 11023 | | | 11923 | 12301 | 13341 | 13774 | | | |
| | IDENTITY | 39% | 100% | 37% | | | 42% | 43% | 43% | 58% | | | |
| | COVERAGE | 98% | 100% | 98% | | | 98% | 100% | 103% | 96% | | | |
| EFA101753 | SeqID | 10134 | 10552 | 11211 | | | 11895 | 12151 | 13693 | 13826 | | | |
| | IDENTITY | 36% | 100% | 37% | | | 36% | 50% | 50% | 37% | | | |
| | COVERAGE | 91% | 100% | 89% | | | 90% | 94% | 99% | 91% | | | |
| EFA101765 | SeqID | | 10587 | | | | | 13010 | 13353 | | | | |
| | IDENTITY | | 100% | | | | | 28% | 35% | | | | |
| | COVERAGE | | 100% | | 98% | 97% | | | | | | | |
| EFA101790 | SeqID | 10414 | 10803 | 11085 | | | 11915 | 12306 | | 13747 | | | |
| | IDENTITY | 42% | 100% | 41% | | | 39% | 46% | | 41% | | | |
| | COVERAGE | 101% | 100% | 101% | 101% | 101% | | 101% | | | | | |
| EFA101791 | SeqID | 10804 | | | | | 12359 | | | | | | |
| | IDENTITY | 100% | | | | | 37% | | | | | | |
| | COVERAGE | 101% | | | | | 77% | | | | | | |
| EFA101792 | SeqID | 10030 | 10805 | 11188 | 11458 | | 5187 | 12360 | 13333 | 14077 | | | |
| | IDENTITY | 31% | 100% | 32% | 27% | | 33% | 34% | 47% | 31% | | | |
| | COVERAGE | 98% | 100% | 96% | 98% | | 99% | 101% | 100% | 98% | | | |
| EFA101795 | SeqID | 10329 | 10922 | 11159 | 11322 | | 12062 | 12581 | 13363 | 13886 | | | |
| | IDENTITY | 34% | 100% | 36% | 36% | | 37% | 36% | 47% | 32% | | | |
| | COVERAGE | 98% | 101% | 98% | 99% | | 98% | 98% | 99% | 97% | | | |
| EFA101797 | SeqID | 10330 | 10924 | 11160 | 11321 | | 12063 | 13127 | 13364 | 13885 | | | |
| | IDENTITY | 53% | 100% | 52% | 49% | | 55% | 59% | 74% | 53% | | | |
| | COVERAGE | 98% | 100% | 98% | 98% | | 98% | 98% | 99% | 98% | | | |
| EFA101799 | SeqID | 10048 | 10926 | 11014 | 11339 | | 11934 | 12908 | 13366 | 13897 | | | |
| | IDENTITY | 53% | 100% | 55% | 49% | | 55% | 54% | 66% | 54% | | | |
| | COVERAGE | 97% | 100% | 97% | 94% | | 97% | 97% | 97% | 97% | | | |
| EFA101833 | SeqID | 10429 | 10720 | | 11335 | | 12039 | 12340 | 13451 | 14072 | | | |
| | IDENTITY | 31% | 100% | | 36% | | 35% | 51% | 59% | 31% | | | |
| | COVERAGE | 79% | 100% | | 92% | | 89% | 92% | 91% | 79% | | | |
| EFA101868 | SeqID | | 10829 | | | | | | | | | | |
| | IDENTITY | | 100% | | | | | | | | | | |
| | COVERAGE | | 100% | | | | | | | | | | |
| EFA101872 | SeqID | 10305 | 10815 | 11044 | 11343 | 11639 | 11797 | 12568 | 13288 | 13779 | | | |
| | IDENTITY | 62% | 100% | 62% | 38% | 61% | 60% | 93% | 92% | 62% | | | |
| | COVERAGE | 86% | 102% | 86% | 86% | 79% | 95% | 97% | 102% | 86% | | | |
| EFA101873 | SeqID | | 10816 | | | | 11796 | | | | | | |
| | IDENTITY | | 100% | | | | 36% | | | | | | |
| | COVERAGE | | 101% | | | | 94% | | | | | | |
| EFA101892 | SeqID | 10454 | 10506 | 11048 | 11281 | | 12005 | 12142 | 13190 | 14021 | | | |
| | IDENTITY | 47% | 100% | 47% | 41% | | 53% | 49% | 46% | 47% | | | |
| | COVERAGE | 100% | 101% | 100% | 97% | | 100% | 101% | 100% 100% | | | | |
| EFA101924 | SeqID | | 10891 | | 11532 | | | 12331 | 13463 | | | | |
| | IDENTITY | | 100% | | 36% | | | 65% | 65% | | | | |
| | COVERAGE | | 100% | | 101% | | | 100% | 94% | | | | |
| EFA101925 | SeqID | | 10893 | | | | | 12332 | | | | | |
| | IDENTITY | | 100% | | | | | 59% | | | | | |
| | COVERAGE | | 100% | | | | | 99% | | | | | |
| EFA101963 | SeqID | 10034 | 10848 | 11148 | 11536 | | 12006 | 12552 | 13648 | 13901 | | | |
| | IDENTITY | 48% | 100% | 47% | 49% | | 47% | 57% | 69% | 48% | | | |
| | COVERAGE | 105% | 100% | 105% | 99% | | 108% | 101% | 100% | 105% | | | |
| EFA102006 | SeqID | | 10580 | | | | 11830 | 12804 | 13315 | | | | |
| | IDENTITY | | 100% | | | | 33% | 42% | 43% | | | | |
| | COVERAGE | | 100% | 84% | 99% | 95% | | | | | | | |
| EFA102022 | SeqID | 10313 | 10881 | 11224 | 11502 | 11754 | 12051 | 12324 | 13485 | 13767 | | | |
| | IDENTITY | 53% | 100% | 53% | 51% | 54% | 55% | 78% | 78% | 52% | | | |
| | COVERAGE | 88% | 101% | 88% | 87% | 89% | 88% | 89% | 89% | 89% | | | |
| EFA102023 | SeqID | 10312 | 10882 | 10989 | 11576 | 11755 | 12050 | 12325 | 13699 | 13768 | | | |
| | IDENTITY | 51% | 100% | 50% | 38% | 50% | 50% | 63% | 70% | 50% | | | |
| | COVERAGE | 98% | 100% | 99% | 99% | 84% | 97% | 99% | 99% | 97% | | | |
| EFA102091 | SeqID | 10363 | 10481 | 11060 | 11568 | | 11858 | 12443 | 13233 | 13965 | | | |
| | IDENTITY | 60% | 100% | 61% | 63% | | 62% | 75% | 86% | 59% | | | |
| | COVERAGE | 101% | 100% | 101% | 100% | 101% | 100% | 100% | 101% | | | | |
| EFA102110 | SeqID | 10193 | 10841 | 11255 | | | 12082 | | 13430 | 13752 | | | |
| | IDENTITY | 32% | 100% | 34% | | | 34% | | 62% | 32% | | | |
| | COVERAGE | 103% | 100% | 94% | | | 100% | | 100% | 99% | | | |
| EFA102183 | SeqID | 10393 | 10952 | 11057 | 11330 | | 11774 | 12695 | 13420 | 13920 | | | |
| | IDENTITY | 55% | 100% | 54% | 50% | | 54% | 67% | 78% | 55% | | | |
| | COVERAGE | 84% | 100% | 86% | 85% | | 86% | 98% | 100% | 84% | | | |
| EFA102185 | SeqID | 10458 | 10950 | 11051 | 11421 | 11632 | 12075 | 12413 | 13501 | 13858 | | | |
| | IDENTITY | 27% | 100% | 29% | 29% | 28% | 29% | 63% | 73% | 27% | | | |
| | COVERAGE | 93% | 101% | 90% | 94% | 93% | 91% | 91% | 96% | 93% | | | |
| EFA102186 | SeqID | 10448 | 10949 | 10995 | 11579 | | | 12412 | 13543 | 13817 | | | |
| | IDENTITY | 29% | 100% | 29% | 27% | | | 53% | 60% | 30% | | | |
| | COVERAGE | 92% | 101% | 90% | 94% | | | 101% | 92% | 90% | | | |
| EFA102205 | SeqID | 10108 | 10769 | 10985 | 11375 | | | | 13375 | 13997 | | | |
| | IDENTITY | 46% | 100% | 38% | 56% | | | | 55% | 37% | | | |
| | COVERAGE | 71% | 102% | 82% | 73% | | | | 96% | 104% | | | |
| EFA102253 | SeqID | 10275 | 10727 | 11175 | 11320 | | 11933 | 12372 | 13376 | 13865 | | | |
| | IDENTITY | 53% | 100% | 55% | 48% | | 53% | 67% | 80% | 54% | | | |
| | COVERAGE | 100% | 100% | 101% | 101% | | 101% | 100% | 99% | 96% | | | |
| EFA102282 | SeqID | | 10729 | | | | | 12607 | 13424 | | | | |
| | IDENTITY | | 100% | | | | | 40% | 46% | | | | |
| | COVERAGE | | 101% | | | | | 81% | 76% | | | | |
| EFA102338 | SeqID | 10250 | 10651 | 11012 | 11488 | | 11954 | 12940 | 13272 | 13705 | | | |
| | IDENTITY | 39% | 100% | 38% | 35% | | 39% | 42% | 50% | 38% | | | |
| | COVERAGE | 95% | 100% | 92% | 86% | | 98% | 99% | 99% | 99% | | | |
| EFA102350 | SeqID | | 10632 | | | | | | | | | | |
| | IDENTITY | | 100% | | | | | | | | | | |
| | COVERAGE | | 101% | | | | | | | | | | |
| EFA102351 | SeqID | | 10634 | | | | | 12795 | 13406 | | | | |
| | IDENTITY | | 100% | | | | | 33% | 38% | | | | |
| | COVERAGE | | 100% | | | | | 97% | 101% | | | | |
| EFA102352 | SeqID | 10028 | 10635 | 11186 | 11328 | 11691 | 12011 | 12347 | 13409 | 14075 | | | |
| | IDENTITY | 40% | 100% | 39% | 35% | 40% | 39% | 51% | 55% | 40% | | | |
| | COVERAGE | 101% | 100% | 101% | 101% | 101% | 101% | 99% | 100% | 101% | | | |
| EFA102353 | SeqID | 10029 | 10636 | 11187 | 11329 | | 12010 | 12348 | 13398 | 14076 | | | |
| | IDENTITY | 32% | 100% | 34% | 28% | | 32% | 50% | 61% | 31% | | | |
| | COVERAGE | 99% | 100% | 99% | 83% | | 98% | 98% | 99% | 99% | | | |
| EFA102389 | SeqID | 10378 | 10904 | 11094 | | | 11781 | 12126 | 13263 | | | | |
| | IDENTITY | 41% | 100% | 42% | | | 40% | 54% | 52% | | | | |
| | COVERAGE | 97% | 100% | 83% | | | 98% | 82% | 100% | | | | |
| EFA102453 | SeqID | 10931 | 10995 | 11579 | 11762 | | 12412 | 13502 | 13819 | | | | |
| | IDENTITY | 100% | 29% | 33% | 33% | | 54% | 54% | 29% | | | | |
| | COVERAGE | 101% | 101% | 88% | 105% | | 101% | 101% | 96% | | | | |
| EFA102501 | SeqID | 10438 | 10626 | 11037 | 11410 | | 11997 | 12447 | 13187 | 14043 | | | |
| | IDENTITY | 45% | 100% | 44% | 40% | | 44% | 75% | 76% | 45% | | | |
| | COVERAGE | 112% | 100% | 111% | 114% | | 113% | 93% | 96% | 112% | | | |
| EFA102502 | SeqID | 10439 | 10627 | 11036 | 11410 | | 5179 | 12446 | 13646 | 14042 | | | |
| | IDENTITY | 47% | 100% | 46% | 52% | | 46% | 72% | 78% | 46% | | | |
| | COVERAGE | 114% | 100% | 117% | 79% | | 116% | 99% | 98% | 114% | | | |
| EFA102503 | SeqID | 10016 | 10643 | | 11446 | | 12027 | 12995 | 13481 | 13947 | | | |
| | IDENTITY | 45% | 100% | | 37% | | 43% | 61% | 65% | 41% | | | |
| | COVERAGE | 99% | 100% | | 101% | | 101% | 98% | 100% | 85% | | | |
| EFA102518 | SeqID | 10288 | 10647 | | | 11681 | | 12248 | 13229 | 13881 | | | |
| | IDENTITY | 33% | 100% | | | 50% | | 34% | 54% | 32% | | | |
| | COVERAGE | 105% | 100% | | | 71% | | 102% | 100% | 105% | | | |
| EFA102541 | SeqID | 10327 | 10602 | 11241 | 11471 | | 5188 | 12237 | 13356 | 13729 | | | |
| | IDENTITY | 59% | 100% | 59% | 49% | | 59% | 69% | 82% | 56% | | | |
| | COVERAGE | 77% | 101% | 77% | 73% | | 77% | 77% | 81% | 77% | | | |
| EFA102542 | SeqID | 10326 | 10603 | 11240 | 11288 | | 12016 | 12238 | 13361 | 13732 | | | |
| | IDENTITY | 75% | 100% | 70% | 67% | | 75% | 77% | 100% | 76% | | | |
| | COVERAGE | 95% | 105% | 95% | 100% | | 95% | 105% | 100% | 100% | | | |
| EFA102549 | SeqID | 10338 | 10538 | 11117 | 11428 | | 5159 | | | | | | |
| | IDENTITY | 63% | 100% | 63% | 71% | | 68% | | | | | | |
| | COVERAGE | 100% | 103% | 100% | 100% | | 100% | | | | | | |
| EFA102551 | SeqID | 10337 | 10539 | 11119 | 11427 | 11688 | 11990 | 12229 | 13221 | 14097 | | | |
| | IDENTITY | 59% | 100% | 61% | 58% | 30% | 62% | 75% | 81% | 58% | | | |
| | COVERAGE | 96% | 101% | 91% | 99% | 74% | 96% | 101% | 101% | 96% | | | |
| EFA102554 | SeqID | 10341 | 10532 | 11115 | | | 5161 | 12223 | 13216 | | | | |
| | IDENTITY | 45% | 100% | 40% | | | 42% | 62% | 63% | | | | |
| | COVERAGE | 93% | 102% | 93% | | | 97% | 102% | 100% | | | | |
| EFA102655 | SeqID | 10049 | 10733 | 11086 | 11305 | | 11813 | 12952 | 13228 | 13898 | | | |
| | IDENTITY | 47% | 100% | 47% | 42% | | 48% | 57% | 60% | 47% | | | |
| | COVERAGE | 97% | 100% | 99% | 99% | | 99% | 98% | 108% | 97% | | | |
| EFA102656 | SeqID | | 10734 | | | | | 12321 | 13668 | | | | |
| | IDENTITY | | 100% | | | | | 55% | 55% | | | | |
| | COVERAGE | | 100% | | | | | 100% | 100% | | | | |
| EFA102698 | SeqID | 10082 | 10909 | 10956 | | | 11807 | | | 14011 | | | |
| | IDENTITY | 56% | 100% | 60% | | | 31% | | | 55% | | | |
| | COVERAGE | 96% | 100% | 96% | | | 96% | | | 96% | | | |
| EFA102728 | SeqID | 10459 | 10948 | 11050 | 11420 | | 12074 | 12411 | 13503 | 13859 | | | |
| | IDENTITY | 51% | 100% | 53% | 52% | | 54% | 76% | 81% | 52% | | | |
| | COVERAGE | 89% | 101% | 89% | 73% | | 82% | 96% | 100% | 90% | | | |
| EFA102736 | SeqID | 10285 | 10556 | 11205 | 11300 | | 11943 | | 13401 | | | | |
| | IDENTITY | 53% | 100% | 52% | 44% | | 51% | | 71% | | | | |
| | COVERAGE | 98% | 100% | 100% | 98% | | 100% | | 99% | | | | |
| EFA102764 | SeqID | 10201 | 10478 | 11054 | | | | 12590 | 13425 | 13822 | | | |
| | IDENTITY | 72% | 100% | 56% | | | | 68% | 80% | 71% | | | |
| | COVERAGE | 99% | 100% | 99% | | | | 99% | 100% | 99% | | | |
| EFA102774 | SeqID | 10142 | 10896 | 11261 | 11362 | | 12040 | 12150 | 13235 | 13978 | | | |
| | IDENTITY | 50% | 100% | 52% | 52% | | 51% | 68% | 74% | 50% | | | |
| | COVERAGE | 96% | 100% | 96% | 94% | | 95% | 98% | 97% | 96% | | | |
| EFA102780 | SeqID | 10395 | 10908 | 11167 | 11616 | | 11772 | 12701 | 13552 | | | | |
| | IDENTITY | 49% | 100% | 46% | 37% | | 51% | 51% | 46% | | | | |
| | COVERAGE | 77% | 100% | 76% | 77% | | 75% | 101% | 98% | | | | |
| EFA102788 | SeqID | 10176 | 10661 | 11223 | 11297 | | 11882 | 12630 | 13303 | 13941 | | | |
| | IDENTITY | 59% | 100% | 61% | 54% | | 63% | 70% | 81% | 59% | | | |
| | COVERAGE | 94% | 101% | 93% | 97% | | 94% | 93% | 96% | 94% | | | |
| EFA102802 | SeqID | 10274 | 10854 | 11154 | 11298 | | 11932 | 13128 | 13313 | 13866 | | | |
| | IDENTITY | 66% | 100% | 64% | 58% | | 64% | 74% | 83% | 65% | | | |
| | COVERAGE | 99% | 100% | 100% | 96% | | 100% | 100% | 100% | 99% | | | |
| EFA102813 | SeqID | 10191 | 10878 | 11005 | 11347 | | 11815 | 12816 | 13492 | 13754 | | | |
| | IDENTITY | 54% | 100% | 53% | 51% | | 52% | 64% | 65% | 53% | | | |
| | COVERAGE | 100% | 100% | 100% | 99% | | 99% | 99% | 99% | 100% | | | |
| EFA102915 | SeqID | 10297 | 10640 | 10964 | 11323 | | 11783 | 13090 | 13664 | 13737 | | | |
| | IDENTITY | 27% | 100% | 32% | 30% | | 31% | 50% | 52% | 28% | | | |
| | COVERAGE | 100% | 100% | 100% | 90% | | 100% | 98% | 99% | 100% | | | |
| EFA103021 | SeqID | 10434 | 10612 | 11039 | 11413 | | 11999 | 12451 | 13517 | | | | |
| | IDENTITY | 65% | 100% | 66% | 60% | | 62% | 86% | 86% | | | | |
| | COVERAGE | 101% | 101% | 101% | 99% | | 101% | 101% | 99% | | | | |
| EFA103033 | SeqID | 10221 | 10681 | 11210 | 11607 | 11668 | 11801 | 12289 | 13191 | 14027 | | | |
| | IDENTITY | 42% | 100% | 40% | 29% | 42% | 39% | 49% | 56% | 30% | | | |
| | COVERAGE | 91% | 100% | 93% | 98% | 94% | 91% | 93% | 92% | 93% | | | |
| EFA103038 | SeqID | 10435 | 10613 | 11038 | 11412 | | 11998 | 12784 | 13397 | 14046 | | | |
| | IDENTITY | 54% | 100% | 52% | 56% | | 51% | 73% | 73% | 53% | | | |
| | COVERAGE | 99% | 100% | 100% | 99% | | 100% | 100% | 100% | 99% | | | |
| EFA103039 | SeqID | 10293 | 10850 | 11041 | 11482 | 11728 | 11793 | 12541 | 13377 | 13741 | | | |
| | IDENTITY | 45% | 100% | 46% | 44% | 40% | 46% | 73% | 69% | 45% | | | |
| | COVERAGE | 99% | 100% | 101% | 98% | 99% | 99% | 102% | 101% | 99% | | | |
| EFA103062 | SeqID | 10437 | 10615 | 11072 | 11572 | | 5180 | 12449 | 13247 | 14044 | | | |
| | IDENTITY | 59% | 100% | 64% | 54% | | 65% | 64% | 68% | 59% | | | |
| | COVERAGE | 101% | 101% | 102% | 102% | | 101% | 99% | 101% | 102% | | | |
| EFA103081 | SeqID | 10262 | 10862 | 10984 | 11403 | | 11947 | | 13415 | 14090 | | | |
| | IDENTITY | 41% | 100% | 41% | 40% | | 41% | | 74% | 40% | | | |
| | COVERAGE | 85% | 101% | 83% | 82% | | 80% | | 95% | 85% | | | |
| EFA103174 | SeqID | 10251 | 10689 | 10969 | 11370 | | 11955 | 12600 | 13518 | 13703 | | | |
| | IDENTITY | 32% | 100% | 32% | 37% | | 33% | 63% | 77% | 33% | | | |
| | COVERAGE | 93% | 100% | 94% | 95% | | 96% | 100% | 100% | 92% | | | |
| EFA103210 | SeqID | 10071 | 10688 | 11019 | 11371 | | 11850 | 12601 | 13319 | 13945 | | | |
| | IDENTITY | 56% | 100% | 63% | 39% | | 57% | 79% | 76% | 57% | | | |
| | COVERAGE | 97% | 101% | 98% | 99% | | 97% | 99% | 101% | 99% | | | |
| EFA103268 | SeqID | 10365 | 10479 | 11062 | 11409 | | 5178 | 12445 | 13231 | 13967 | | | |
| | IDENTITY | 69% | 100% | 70% | 68% | | 70% | 83% | 93% | 70% | | | |
| | COVERAGE | 100% | 101% | 100% | 100% | 99% | 101% | 101% | 101% | | | | |
| EFA103295 | SeqID | 10319 | 10633 | 11140 | 11493 | | 12029 | 12640 | 13320 | 13771 | | | |
| | IDENTITY | 66% | 100% | 58% | 58% | | 70% | 79% | 86% | 60% | | | |
| | COVERAGE | 77% | 101% | 85% | 85% | | 77% | 100% | 96% | 92% | | | |
| EFA103348 | SeqID | | 10873 | 10983 | 11402 | | 11946 | | | | | | |
| | IDENTITY | | 100% | 39% | 59% | | 39% | | | | | | |
| | COVERAGE | | 103% | 82% | 85% | | 82% | | | | | | |
| EFA103365 | SeqID | 10360 | 10533 | 11096 | 11443 | 11643 | 5177 | 12224 | 13196 | 13975 | | | |
| | IDENTITY | 57% | 100% | 58% | 53% | 58% | 58% | 82% | 82% | 58% | | | |
| | COVERAGE | 100% | 101% | 100% | 97% | 100% | 100% | 88% | 101% | 100% | | | |
| EFA103375 | SeqID | 10177 | 10660 | 11222 | 11296 | | 5120 | 12628 | 13302 | | | | |
| | IDENTITY | 50% | 100% | 52% | 36% | | 50% | 66% | 78% | | | | |
| | COVERAGE | 82% | 102% | 82% | 97% | | 94% | 102% | 102% | | | | |
| EFA103504 | SeqID | 10320 | 10671 | 11141 | 11492 | | 12030 | 12638 | 13322 | 13766 | | | |
| | IDENTITY | 42% | 100% | 45% | 41% | | 48% | 63% | 81% | 41% | | | |
| | COVERAGE | 97% | 101% | 97% | 96% | | 97% | 98% | 100% | 100% | | | |
| EFA103508 | SeqID | | 10672 | | | | | | 13321 | | | | |
| | IDENTITY | | 100% | | | | | | 30% | | | | |
| | COVERAGE | | 100% | | | | | | 80% | | | | |
| EFA103571 | SeqID | 10335 | 10879 | 11121 | 11425 | | 11988 | 12578 | 13240 | 14095 | | | |
| | IDENTITY | 45% | 100% | 47% | 48% | | 47% | 67% | 68% | 45% | | | |
| | COVERAGE | 102% 100% | 102% | 103% | | 102% | 99% | 100% | 102% | | | | |
| EFA103786 | SeqID | | 10806 | | | | | 12361 | | | | | |
| | IDENTITY | | 100% | | | | | 59% | | | | | |
| | COVERAGE | | 100% | | | | | 94% | | | | | |
| SAU100040 | SeqID | | | | | | | 12533 | | | | | |
| | IDENTITY | | | | | | | 100% | | | | | |
| | COVERAGE | | | | | | | 101% | | | | | |
| SAU100053 | SeqID | 10366 | 10504 | 11075 | 11376 | 11723 | 11855 | 12143 | 13318 | 13814 | | | |
| | IDENTITY | 32% | 46% | 30% | 32% | 33% | 33% | 100% | 48% | 32% | | | |
| | COVERAGE | 97% | 100% | 99% | 81% | 84% | 81% | 100% | 100% | 97% | | | |
| SAU100056 | SeqID | | 10930 | | | | | 12577 | 13477 | | | | |
| | IDENTITY | | 39% | | | | | 100% | 33% | | | | |
| | COVERAGE | | 98% | | | | | 100% | 100% | | | | |
| SAU100059 | SeqID | 10213 | 10598 | 11161 | 11528 | 11750 | 12064 | 12652 | 13433 | 13929 | | | |
| | IDENTITY | 28% | 70% | 26% | 26% | 27% | 28% | 100% | 25% | 28% | | | |
| | COVERAGE | 71% | 97% | 95% | 95% | 71% | 96% | 100% | 95% | 71% | | | |
| SAU100062 | SeqID | 10430 | 10618 | 10998 | 11603 | 11739 | | 12309 | 13294 | 14040 | | | |
| | IDENTITY | 27% | 52% | 29% | 29% | 31% | | 100% | 53% | 28% | | | |
| | COVERAGE | 103% | 96% | 103% | 77% | 76% | | 100% | 97% | 102% | | | |
| SAU100077 | SeqID | | 10565 | | | | | 12520 | 13464 | | | | |
| | IDENTITY | | 64% | | | | | 100% | 62% | | | | |
| | COVERAGE | | 102% | | | | | 100% | 102% | | | | |
| SAU100112 | SeqID | 10059 | | | 11477 | 11702 | 12096 | 12634 | | 13895 | | | |
| | IDENTITY | 49% | | | 52% | 53% | 46% | 100% | | 49% | | | |
| | COVERAGE | 97% | | | 100% | 77% | 100% | 100% | | 97% | | | |
| SAU100114 | SeqID | 10152 | 10515 | 11279 | 11302 | | 11851 | 12535 | 13387 | 13824 | | | |
| | IDENTITY | 44% | 51% | 43% | 45% | | 43% | 100% | 25% | 43% | | | |
| | COVERAGE | 98% | 98% | 98% | 98% | | 98% | 100% | 102% | 98% | | | |
| SAU100118 | SeqID | | 10903 | | | | 11828 | 12125 | 13262 | | | | |
| | IDENTITY | | 41% | | | | 27% | 100% | 37% | | | | |
| | COVERAGE | | 101% | | | | 100% | 100% | 101% | | | | |
| SAU100123 | SeqID | 10258 | 10628 | 11134 | 11489 | | 5192 | 12526 | 13421 | 14088 | | | |
| | IDENTITY | 52% | 43% | 53% | 47% | | 52% | 100% | 45% | 52% | | | |
| | COVERAGE | 98% | 100% | 97% | 96% | | 98% | 100% | 82% | 98% | | | |
| SAU100131 | SeqID | 10466 | | 11274 | | | 11960 | 12517 | | 13854 | | | |
| | IDENTITY | 35% | | 33% | | | 40% | 100% | | 35% | | | |
| | COVERAGE | 71% | | 97% | | | 70% | 100% | | 71% | | | |
| SAU100133 | SeqID | 10311 | 10493 | 10990 | 11308 | 11703 | 11885 | 12574 | 13412 | 13769 | | | |
| | IDENTITY | 34% | 44% | 34% | 33% | 30% | 31% | 100% | 43% | 34% | | | |
| | COVERAGE | 79% | 99% | 80% | 78% | 82% | 79% | 100% | 99% | 79% | | | |
| SAU100139 | SeqID | 10355 | 10557 | 11101 | 11594 | | 5174 | 12255 | 13201 | | | | |
| | IDENTITY | 65% | 84% | 66% | 64% | | 63% | 100% | 86% | | | | |
| | COVERAGE | 85% | 86% | 81% | 83% | | 84% | 101% | 85% | | | | |
| SAU100140 | SeqID | 10354 | 10558 | 11102 | 11440 | | 5173 | 12258 | 13202 | 13970 | | | |
| | IDENTITY | 54% | 66% | 54% | 40% | | 48% | 100% | 63% | 54% | | | |
| | COVERAGE | 93% | 91% | 93% | 94% | | 93% | 101% | 91% | 93% | | | |
| SAU100141 | SeqID | 10353 | 10559 | 11103 | 11592 | | 5172 | 12259 | 13203 | 13969 | | | |
| | IDENTITY | 55% | 78% | 58% | 54% | | 57% | 100% | 74% | 55% | | | |
| | COVERAGE | 96% | 101% | 96% | 96% | | 96% | 100% | 100% | 96% | | | |
| SAU100157 | SeqID | 10364 | 10480 | 11061 | 11408 | 11659 | 11996 | 12444 | 13232 | 13966 | | | |
| | IDENTITY | 60% | 78% | 60% | 55% | 62% | 57% | 100% | 77% | 60% | | | |
| | COVERAGE | 100% | 101% | 100% | 99% | 88% | 100% | 101% | 101% | 101% | | | |
| SAU100158 | SeqID | 10363 | 10481 | 11060 | 11568 | | 11858 | 12443 | 13233 | 13965 | | | |
| | IDENTITY | 60% | 75% | 59% | 63% | | 59% | 100% | 77% | 58% | | | |
| | COVERAGE | 98% | 97% | 98% | 97% | | 98% | 100% | 97% | 99% | | | |
| SAU100162 | SeqID | 10069 | 10630 | 11239 | 11382 | | 11971 | 12583 | 13597 | 14084 | | | |
| | IDENTITY | 43% | 49% | 44% | 37% | | 43% | 100% | 46% | 43% | | | |
| | COVERAGE | 92% | 89% | 88% | 80% | | 83% | 100% | 89% | 93% | | | |
| SAU100175 | SeqID | 10250 | 10651 | 11012 | | | 11954 | 12582 | 13272 | 13705 | | | |
| | IDENTITY | 34% | 42% | 38% | | | 34% | 100% | 42% | 35% | | | |
| | COVERAGE | 98% | 100% | 93% | | | 93% | 100% | 102% | 99% | | | |
| SAU100182 | SeqID | | | | | | | 12362 | | | | | |
| | IDENTITY | | | | | | | 100% | | | | | |
| | COVERAGE | | | | | | | 101% | | | | | |
| SAU100186 | SeqID | 10043 | 10489 | 11124 | 11423 | | 11939 | 12317 | 13355 | 13909 | | | |
| | IDENTITY | 46% | 61% | 44% | 46% | | 45% | 100% | 54% | 45% | | | |
| | COVERAGE | 99% | 99% | 99% | 98% | | 100% | 101% | 99% | 101% | | | |
| SAU100198 | SeqID | | | | 11445 | | | 12120 | 13414 | | | | |
| | IDENTITY | | | | 29% | | | 100% | 29% | | | | |
| | COVERAGE | | | | 78% | | | 101% | 79% | | | | |
| SAU100227 | SeqID | | 10765 | | | | | 12525 | | | | | |
| | IDENTITY | | 36% | | | | | 100% | | | | | |
| | COVERAGE | | 100% | | | | | 100% | | | | | |
| SAU100242 | SeqID | 10097 | | 11201 | | | 11836 | 12336 | | 14056 | | | |
| | IDENTITY | 65% | | 62% | | | 65% | 100% | | 65% | | | |
| | COVERAGE | 94% | | 96% | | | 95% | 100% | 94% | | | | |
| SAU100246 | SeqID | | 10821 | | | | | 12496 | 13490 | | | | |
| | IDENTITY | | 35% | | | | | 100% | 38% | | | | |
| | COVERAGE | | 101% | | | | | 101% | 93% | | | | |
| SAU100251 | SeqID | | | | | | 12363 | | | | | | |
| | IDENTITY | | | | | | 100% | | | | | | |
| | COVERAGE | | | | | | | 100% | | | | | |
| SAU100265 | SeqID | 10469 | | | | | | 12122 | | | | | |
| | IDENTITY | 37% | | | | | | 100% | | | | | |
| | COVERAGE | 88% | | | | | | 100% | | | | | |
| SAU100266 | SeqID | | | | | | | 12256 | | | | | |
| | IDENTITY | | | | | | | 100% | | | | | |
| | COVERAGE | | | | | | | 101% | | | | | |
| SAU100272 | SeqID | | 10617 | | | | | 12141 | | | | | |
| | IDENTITY | | 26% | | | | | 100% | | | | | |
| | COVERAGE | | 104% | | | | | 100% | | | | | |
| SAU100275 | SeqID | 10041 | 10487 | 11149 | 11621 | | 11941 | 12314 | 13438 | 13907 | | | |
| | IDENTITY | 52% | 73% | 47% | 51% | | 51% | 100% | 65% | 51% | | | |
| | COVERAGE | 88% | 94% | 93% | 98% | | 90% | 100% | 98% | 88% | | | |
| SAU100300 | SeqID | 10434 | 10612 | 11039 | 11413 | | 11999 | 12451 | 13517 | | | | |
| | IDENTITY | 67% | 86% | 68% | 63% | | 65% | 100% | 82% | | | | |
| | COVERAGE | 99% | 99% | 99% | 97% | | 99% | 101% | 97% | | | | |
| SAU100301 | SeqID | 10433 | 10624 | 11083 | 11414 | | 12000 | 12452 | 13168 | | | | |
| | IDENTITY | 41% | 58% | 41% | 35% | | 42% | 100% | 51% | | | | |
| | COVERAGE | 99% | 98% | 102% | 96% | | 98% | 101% | 97% | | | | |
| SAU100302 | SeqID | 10432 | | 11082 | | | 12001 | 12453 | | | | | |
| | IDENTITY | 25% | | 34% | | | 31% | 100% | | | | | |
| | COVERAGE | 92% | | 93% | | | 103% | 102% | | | | | |
| SAU100305 | SeqID | 10311 | 10774 | 10990 | | | 11885 | 12397 | 13491 | 13769 | | | |
| | IDENTITY | 40% | 50% | 38% | | | 40% | 100% | 49% | 40% | | | |
| | COVERAGE | 94% | 99% | 94% | | | 92% | 100% | 101% | 94% | | | |
| SAU100307 | SeqID | 10392 | 10725 | 10954 | | 11685 | | 12313 | 13252 | 13919 | | | |
| | IDENTITY | 28% | 32% | 29% | | 28% | | 100% | 29% | 28% | | | |
| | COVERAGE | 99% | 100% | 99% | | 99% | | 100% | 99% | 99% | | | |
| SAU100308 | SeqID | 10013 | 10814 | 10963 | | | | 12312 | 13244 | 13711 | | | |
| | IDENTITY | 26% | 44% | 30% | | | | 100% | 40% | 27% | | | |
| | COVERAGE | 90% | 86% | 86% | | | | 100% | 92% | 90% | | | |
| SAU100313 | SeqID | | 10757 | | | | | 12661 | 13293 | | | | |
| | IDENTITY | | 46% | | | | | 100% | 43% | | | | |
| | COVERAGE | | 99% | | | | | 100% | 100% | | | | |
| SAU100315 | SeqID | 10419 | 10802 | 11136 | 11326 | 11727 | 12087 | 12358 | 13521 | 13791 | | | |
| | IDENTITY | 54% | 73% | 53% | 53% | 55% | 53% | 100% | 74% | 54% | | | |
| | COVERAGE | 96% | 96% | 96% | 96% | 82% | 97% | 100% | 91% | 96% | | | |
| SAU100323 | SeqID | 10216 | 10855 | | | | | 12575 | | 13933 | | | |
| | IDENTITY | 32% | 71% | | | | | 100% | | 34% | | | |
| | COVERAGE | 88% | 99% | | | | | 100% | | 88% | | | |
| SAU100347 | SeqID | 10895 | 10961 | | | 12077 | 12334 | 13206 | | | | | |
| | IDENTITY | 44% | 30% | | | 30% | 100% | 42% | | | | | |
| | COVERAGE | 106% | 84% | | | 100% | 100% | 100% | | | | | |
| SAU100355 | SeqID | | 10683 | | | | | 12155 | 13300 | | | | |
| | IDENTITY | | 42% | | | | | 100% | 31% | | | | |
| | COVERAGE | | 93% | | | | | _100% | 109% | | | | |
| SAU100359 | SeqID | | 10757 | | | | | 12239 | 13293 | | | | |
| | IDENTITY | | 52% | | | | | 100% | 43% | | | | |
| | COVERAGE | | 97% | | | | | 100% | 99% | | | | |
| SAU100381 | SeqID | 10411 | 10674 | | | | 11903 | 12276 | | 14031 | | | |
| | IDENTITY | 28% | 29% | 33% | | | | 100% | | 28% | | | |
| | COVERAGE | 101% | 99% | | | | 92% | 100% | | 101% | | | |
| SAU100389 | SeqID | 10473 | 10737 | | 11374 | | | 12279 | 13344 | | | | |
| | IDENTITY | 27% | 50% | | 41% | | | 100% | 27% | | | | |
| | COVERAGE | 75% | 95% | | 99% | | | 100% | 71% | | | | |
| SAU100401 | SeqID | 10090 | 10706 | 10980 | | 11641 | | 12576 | | 14053 | | | |
| | IDENTITY | 31% | 30% | 27% | | 33% | | 100% | | 31% | | | |
| | COVERAGE | 95% | 99% | 95% | | 95% | | 101% | | 99% | | | |
| SAU100412 | SeqID | 10102 | 10563 | 11194 | 11360 | | 5150 | 12197 | 13468 | | | | |
| | IDENTITY | 31% | 42% | 30% | 33% | | 35% | 100% | 40% | | | | |
| | COVERAGE | 74% | 100% | 80% | 74% | | 73% | 100% | 97% | | | | |
| SAU100414 | SeqID | 10453 | 10556 | 11205 | 11300 | | 11943 | 12148 | 13401 | 13872 | | | |
| | IDENTITY | 60% | 80% | 61% | 60% | | 67% | 100% | 76% | 60% | | | |
| | COVERAGE | 96% | 99% | 98% | 99% | | 91% | 101% | 96% | 96% | | | |
| SAU100432 | SeqID | 10436 | 10614 | 11071 | 11411 | | 5181 | 12450 | 13246 | 14045 | | | |
| | IDENTITY | 34% | 60% | 33% | 31% | | 39% | 100% | 55% | 31% | | | |
| | COVERAGE | 98% | 98% | 100% | 95% | | 99% | 101% | 98% | 98% | | | |
| SAU100433 | SeqID | 10437 | 10615 | 11072 | 11572 | | 5180 | 12449 | 13247 | 14044 | | | |
| | IDENTITY | 58% | 64% | 63% | 57% | | 58% | 100% | 69% | 58% | | | |
| | COVERAGE | 97% | 99% | 98% | 99% | | 98% | 101% | 99% | 98% | | | |
| SAU100436 | SeqID | | 10569 | | | | | 12154 | 13393 | | | | |
| | IDENTITY | | 27% | | | | | 100% | 27% | | | | |
| | COVERAGE | | 100% | | | | | 100% | 100% | | | | |
| SAU100443 | SeqID | 10272 | 10894 | 11081 | | | 11930 | 12333 | 13515 | 13869 | | | |
| | IDENTITY | 40% | 52% | 39% | | | 38% | 100% | 45% | 40% | | | |
| | COVERAGE | 92% | 100% | 96% | | | 92%100% | 100% | 92% | | | | |
| SAU100444 | SeqID | 10440 | 10583 | 11016 | 11540 | | 11967 | 12392 | 13403 | 14041 | | | |
| | IDENTITY | 29% | 30% | 41% | 41% | | 28% | 100% | 52% | 29% | | | |
| | COVERAGE | 75% | 88% | 94% | 90% | | 81%100% | 91% | 75% | | | | |
| SAU100475 | SeqID | | 10927 | | | | 11911 | 12337 | | | | | |
| | IDENTITY | | 33% | | | | 30% | 100% | | | | | |
| | COVERAGE | | 101% | | | | 101% 100% | | | | | | |
| SAU100478 | SeqID | | | 11273 | | | | 12605 | | | | | |
| | IDENTITY | | | 25% | | | | 100% | | | | | |
| | COVERAGE | | | 96% | | | | 100% | | | | | |
| SAU100489 | SeqID | 10332 | 10685 | 11074 | 11580 | 11729 | 11778 | 12566 | 13298 | 14100 | | | |
| | IDENTITY | 33% | 33% | 31% | 34% | 34% | 29% | 100% | 34% | 33% | | | |
| | COVERAGE | 101% | 102% | 99% | 94% | 101% | 99% | 100% | 97% | 94% | | | |
| SAU100496 | SeqID | | 10744 | | | | | 12484 | | | | | |
| | IDENTITY | | 40% | | | | | 100% | | | | | |
| | COVERAGE | | 80% | | | | | 100% | | | | | |
| SAU100497 | SeqID | 10245 | 10709 | 11171 | 11395 | | 11792 | 12140 | | 13740 | | | |
| | IDENTITY | 46% | 59% | 49% | 44% | | 48% | 100% | | 45% | | | |
| | COVERAGE | 99% | 101% | 99% | 100% | | 99% | 100% | | 100% | | | |
| SAU100514 | SeqID | 10215 | | | 11388 | | 12036 | 12626 | | 13932 | | | |
| | IDENTITY | 52% | | | 34% | | 51% | 100% | | 51% | | | |
| | COVERAGE | 93% | | | 95% | | 98% | 100% | | 95% | | | |
| SAU100521 | SeqID | 10251 | | 10969 | 11370 | | 11955 | 12600 | | 13703 | | | |
| | IDENTITY | 43% | | 39% | 34% | | 39% | 100% | | 42% | | | |
| | COVERAGE | 104% | 108% | 103% | 103% | | 100% | 104% | | | | | |
| SAU100522 | SeqID | 10114 | | 11206 | | 11680 | 11904 | 12599 | | 14007 | | | |
| | IDENTITY | 36% | | 34% | | 30% | 36% | 100% | | 35% | | | |
| | COVERAGE | 91% | | 89% | | 80% | 90% | 100% | | 91% | | | |
| SAU100527 | SeqID | 10298 | 10721 | 10996 | | | 11782 | 12341 | 13452 | 13736 | | | |
| | IDENTITY | 44% | 48% | 42% | | | 41% | 100% | 43% | 45% | | | |
| | COVERAGE | 98% | 97% | 99% | | | 98% | 101% | 98% | 97% | | | |
| SAU100528 | SeqID | | 10521 | | | | | 12507 | 13470 | | | | |
| | IDENTITY | | 30% | | | | | 100% | 33% | | | | |
| | COVERAGE | | 83% | | | | | 101% | 71% | | | | |
| SAU100532 | SeqID | 10235 | 10645 | 11128 | 11389 | | | 12580 | 13193 | 13744 | | | |
| | IDENTITY | 39% | 47% | 29% | 34% | | | 100% | 40% | 31% | | | |
| | COVERAGE | 101% | 100% | 72% | 90% | | | 100% | 97% | 72% | | | |
| SAU100542 | SeqID | 10371 | 11070 | 11422 | | 12017 | 12532 | 13444 | 13806 | | | | |
| | IDENTITY | 52% | 51% | 46% | | 31% | 100% | 35% | 52% | | | | |
| | COVERAGE | 100% | 98% | 98% | | 102% | 100% | 102% | 100% | | | | |
| SAU100546 | SeqID | 10359 | 11097 | 11596 | | 5176 | 12235 | 13197 | 13974 | | | | |
| | IDENTITY | 43% | 46% | 34% | | 47% | 100% | 66% | 46% | | | | |
| | COVERAGE | 97% | 97% | 90% | | 99% | 100% | 99% | 91% | | | | |
| SAU100547 | SeqID | 10358 | 10549 | 11098 | 11595 | | 5175 | 12240 | 13198 | 13973 | | | |
| | IDENTITY | 41% | 62% | 39% | 40% | | 46% | 100% | 63% | 41% | | | |
| | COVERAGE | 92% | 100% | 97% | 96% | | 97% | 100% | 100% | 93% | | | |
| SAU100557 | SeqID | | 10928 | | | | | 12565 | 13651 | | | | |
| | IDENTITY | | 50% | | | | | 100% | 49% | | | | |
| | COVERAGE | | 99% | | | | | 100% | 99% | | | | |
| SAU100582 | SeqID | | | | | | | 12503 | | | | | |
| | IDENTITY | | | | | | | 100% | | | | | |
| | COVERAGE | | | | | | | 100% | | | | | |
| SAU100590 | SeqID | | | | | | | 12121 | | | | | |
| | IDENTITY | | | | | | | 100% | | | | | |
| | COVERAGE | | | | | | | 100% | | | | | |
| SAU100595 | SeqID | 10051 | 10832 | | 11464 | | 12109 | 12547 | 13174 | 13722 | | | |
| | IDENTITY | 47% | 66% | | 42% | | 50% | 100% | 46% | 42% | | | |
| | COVERAGE | 88% | 89% | | 89% | | 93% | 100% | 90% | 91% | | | |
| SAU100596 | SeqID | 10050 | 10833 | 11067 | 11624 | 11656 | 12110 | 12548 | 13173 | 13720 | | | |
| | IDENTITY | 36% | 50% | 31% | 41% | 38% | 42% | 100% | 30% | 32% | | | |
| | COVERAGE | 99% | 99% | 100% | 92% | 89% | 95% | 100% | 106% | 95% | | | |
| SAU100601 | SeqID | | | | | | | 12616 | | | | | |
| | IDENTITY | | | | | | | 100% | | | | | |
| | COVERAGE | | | | | | | 100% | | | | | |
| SAU100608 | SeqID | 10032 | 10870 | 11190 | 11349 | | 12008 | 12293 | 13507 | 14079 | | | |
| | IDENTITY | 30% | 61% | 29% | 29% | | 34% | 100% | 50% | 28% | | | |
| | COVERAGE | 102% | 96% | 100% | 98% | | 87% | 100% | 96% | 104% | | | |
| SAU100610 | SeqID | | | | | | | 12294 | | | | | |
| | IDENTITY | | | | | | | 100% | | | | | |
| | COVERAGE | | | | | | | 100% | | | | | |
| SAU100613 | SeqID | 10378 | 10904 | 11094 | | | 11781 | 12126 | 13589 | | | | |
| | IDENTITY | 44% | 54% | 43% | | | 46% | 100% | 49% | | | | |
| | COVERAGE | 91% | 88% | 93% | | | 73% | 100% | 89% | | | | |
| SAU100617 | SeqID | | 10502 | | | | | 12295 | 13314 | | | | |
| | IDENTITY | | 26% | | | | | 100% | 25% | | | | |
| | COVERAGE | | 91% | | | | | 100% | 91% | | | | |
| SAU100633 | SeqID | 10079 | 10589 | | | 11698 | 5107 | 12515 | 13644 | 13724 | | | |
| | IDENTITY | 27% | 42% | | | 25% | 29% | 100% | 35% | 26% | | | |
| | COVERAGE | 92% | 103% | | | 89% | 101% | 100% | 105% | 103% | | | |
| SAU100646 | SeqID | 10051 | 10570 | | 11464 | | 12109 | 12168 | 13174 | 14109 | | | |
| | IDENTITY | 50% | 48% | | 46% | | 49% | 100% | 42% | 50% | | | |
| | COVERAGE | 95% | 94% | | 97% | | 95% | 100% | 95% | 96% | | | |
| SAU100658 | SeqID | 10322 | 10813 | 11177 | 11351 | | 12018 | 12388 | 13186 | 13733 | | | |
| | IDENTITY | 49% | 59% | 49% | 46% | | 48% | 100% | 58% | 49% | | | |
| | COVERAGE | 100% | 100% | 100% | 100% | | 100% | 100% | 100% | 100% | | | |
| SAU100659 | SeqID | 10045 | 10923 | 11174 | 11601 | | 11937 | 12390 | 13616 | 13911 | | | |
| | IDENTITY | 47% | 54% | 45% | 40% | | 46% | 100% | 56% | 44% | | | |
| | COVERAGE | 92% | 92% | 95% | 103% | | 97% | 101% | 95% | 81% | | | |
| SAU100679 | SeqID | 10303 | | 10997 | 11453 | 11713 | 11799 | 12137 | 13329 | 13757 | | | |
| | IDENTITY | 32% | | 31% | 32% | 33% | 35% | 100% | 42% | 35% | | | |
| | COVERAGE | 96% | | 99% | 106% | 96% | 97% | 100% | 104% | 96% | | | |
| SAU100684 | SeqID | 10412 | | | 11486 | | 12097 | 12632 | | 13749 | | | |
| | IDENTITY | 46% | | | 40% | | 46% | 100% | | 46% | | | |
| | COVERAGE | 97% | | | 99% | | 99% | 100% | | 97% | | | |
| SAU100685 | SeqID | | | | | | | 12633 | | | | | |
| | IDENTITY | | | | | | | 100% | | | | | |
| | COVERAGE | | | | | | | 100% | | | | | |
| SAU100689 | SeqID | | 10694 | | | | | 12323 | 13311 | | | | |
| | IDENTITY | | 55% | | | | | 100% | 46% | | | | |
| | COVERAGE | | 98% | | | | | 100% | 96% | | | | |
| SAU100702 | SeqID | | 10655 | | | | | 12196 | 13671 | | | | |
| | IDENTITY | | 46% | | | | | 100% | 41% | | | | |
| | COVERAGE | | 97% | | | | | 100% | 91% | | | | |
| SAU100710 | SeqID | | | | | | 11908 | 12546 | | | | | |
| | IDENTITY | | | | | | 27% | 100% | | | | | |
| | COVERAGE | | | | | | 73% | 101% | | | | | |
| SAU100714 | SeqID | 10465 | 10675 | 11238 | 11563 | | 11961 | 12635 | 13382 | 13853 | | | |
| | IDENTITY | 48% | 66% | 41% | 41% | | 44% | 100% | 60% | 48% | | | |
| | COVERAGE | 108% | 100% | 110% | 102% | | 108% | 103% | 101% | 108% | | | |
| SAU100731 | SeqID | 10071 | 10688 | 11019 | 11371 | | 11850 | 12601 | 13319 | 13945 | | | |
| | IDENTITY | 62% | 79% | 67% | 40% | | 63% | 100% | 76% | 60% | | | |
| | COVERAGE | 99% | 100% | 100% | | 101% | 99% | 101% | 100% | 101% | | | |
| SAU100733 | SeqID | 10415 | | | 11611 | 11636 | 12084 | 12602 | | 13746 | | | |
| | IDENTITY | 41% | | | 33% | 42% | 42% | 100% | | 39% | | | |
| | COVERAGE | 95% | | | 92% | 74% | 95% | 100% | | 95% | | | |
| SAU100734 | SeqID | 10321 | 10573 | 11142 | 11306 | | 12031 | 12603 | 13273 | 13734 | | | |
| | IDENTITY | 28% | 36% | 29% | 27% | | 28% | 100% | 31% | 29% | | | |
| | COVERAGE | 98% | 95% | 97% | 90% | | 93% | 100% | 72% | 101% | | | |
| SAU100736 | SeqID | | 10585 | | | | | 12391 | 13404 | | | | |
| | IDENTITY | | 27% | | | | | 100% | 26% | | | | |
| | COVERAGE | | 97% | | | | | 100% | 97% | | | | |
| SAU100738 | SeqID | 10188 | 10847 | 10953 | 11600 | 11634 | 11907 | 12624 | 13169 | 13981 | | | |
| | IDENTITY | 48% | 45% | 46% | 42% | 48% | 51% | 100% | 45% | 49% | | | |
| | COVERAGE | 97% | 98% | 98% | 97% | 94% | 97% | 100% | 97% | 97% | | | |
| SAU100741 | SeqID | 10081 | 10591 | | 11459 | | 11776 | 12409 | | 13714 | | | |
| | IDENTITY | 65% | 50% | | 35% | | 54% | 100% | | 66% | | | |
| | COVERAGE | 100% | 101% | | 82% | | 100% | 101% | | 101% | | | |
| SAU100745 | SeqID | 10442 | 10484 | 11202 | 11607 | 11733 | 11906 | 12596 | 13453 | 13847 | | | |
| | IDENTITY | 34% | 53% | 35% | 31% | 35% | 34% | 100% | 49% | 35% | | | |
| | COVERAGE | 98% | 97% | 100% | 99% | 101% | 98% | 100% | 98% | 101% | | | |
| SAU100747 | SeqID | | 10749 | | | | | 12597 | 13266 | | | | |
| | IDENTITY | | 32% | | | | | 100% | 31% | | | | |
| | COVERAGE | | 74% | | | | | 100% | 73% | | | | |
| SAU100751 | SeqID | 10425 | 10866 | 11080 | | 11747 | 11927 | 12335 | 13431 | 13788 | | | |
| | IDENTITY | 62% | 64% | 59% | | 62% | 62% | 100% | 63% | 61% | | | |
| | COVERAGE | 99% | 99% | 98% | | 87% | 99% | 100% | 99% | 99% | | | |
| SAU100752 | SeqID | 10140 | | | | | 11976 | 12524 | | 14022 | | | |
| | IDENTITY | 31% | | | | | 35% | 100% | | 38% | | | |
| | COVERAGE | 71% | | | | | 82% | 100% | 72% | | | | |
| SAU100767 | SeqID | 10290 | | | | | 12094 | 12579 | | 13875 | | | |
| | IDENTITY | 43% | | | | | 42% | 100% | | 42% | | | |
| | COVERAGE | 100% | | | | | 90% | 100% | | 100% | | | |
| SAU100771 | SeqID | 10084 | | | | | 11821 | 12545 | 13306 | 13710 | | | |
| | IDENTITY | 30% | | | | | 29% | 100% | 28% | 26% | | | |
| | COVERAGE | 88% | | | | | 80% | 101% | 90% | 94% | | | |
| SAU100773 | SeqID | 10055 | 10758 | 11093 | 11336 | 11763 | 11928 | 12377 | 13250 | | | | |
| | IDENTITY | 47% | 70% | 41% | 41% | 46% | 51% | 100% | 70% | | | | |
| | COVERAGE | 94% | 100% | 98% | 96% | 94% | 93% | 101% | 96% | | | | |
| SAU100776 | SeqID | | | | | | | 12482 | | | | | |
| | IDENTITY | | | | | | | 100% | | | | | |
| | COVERAGE | | | | | | | 100% | | | | | |
| SAU100778 | SeqID | 10083 | | 10957 | | | 11970 | 12514 | | 14062 | | | |
| | IDENTITY | 52% | | 52% | | | 45% | 100% | | 47% | | | |
| | COVERAGE | 89% | | 89% | | | 88% | 100% | | 89% | | | |
| SAU100793 | SeqID | | | | | | | 12188 | 13392 | | | | |
| | IDENTITY | | | | | | | 100% | 27% | | | | |
| | COVERAGE | | | | | | | 100% | 103% | | | | |
| SAU100794 | SeqID | 10203 | | | | | | 12189 | | | | | |
| | IDENTITY | 25% | | | | | | 100% | | | | | |
| | COVERAGE | 101% | | | | | 100% | | | | | | |
| SAU100799 | SeqID | | | | | | | 12682 | | | | | |
| | IDENTITY | | | | | | | 100% | | | | | |
| | COVERAGE | | | | | | | 100% | | | | | |
| SAU100808 | SeqID | | | | | | | 12345 | | 14081 | | | |
| | IDENTITY | | | | | | | 100% | | 35% | | | |
| | COVERAGE | | | | | | | 100% | | 70% | | | |
| SAU100810 | SeqID | 10070 | | | | | 11824 | 12343 | | 14080 | | | |
| | IDENTITY | 51% | | | | | 49% | 100% | | 50% | | | |
| | COVERAGE | 94% | | | | | 96% | 100% | | 96% | | | |
| SAU100813 | SeqID | 10314 | 10764 | 11216 | 11501 | | 5198 | 12322 | 13381 | 13765 | | | |
| | IDENTITY | 47% | 63% | 47% | 45% | | 48% | 100% | 58% | 50% | | | |
| | COVERAGE | 98% | 94% | 100% | 91% | | 92% | 100% | 95% | 92% | | | |
| SAU100831 | SeqID | 10376 | 10741 | 11058 | | | 12093 | 12403 | 13349 | 13811 | | | |
| | IDENTITY | 42% | 58% | 42% | | | 42% | 100% | 51% | 42% | | | |
| | COVERAGE | 97% | 98% | 102% | | | 98% | 100% | 98% | 101% | | | |
| SAU100836 | SeqID | | | | | | | 12212 | | | | | |
| | IDENTITY | | | | | | | 100% | | | | | |
| | COVERAGE | | | | | | | 100% | | | | | |
| SAU100838 | SeqID | | | | | | | 12211 | | | | | |
| | IDENTITY | | | | | | | 100% | | | | | |
| | COVERAGE | | | | | | | 100% | | | | | |
| SAU100839 | SeqID | | 10794 | | | | | 12210 | 13183 | | | | |
| | IDENTITY | | 42% | | | | | 100% | 44% | | | | |
| | COVERAGE | | 100% | | | | 100% | 100% | | | | | |
| SAU100843 | SeqID | 10126 | 10921 | 10974 | 11342 | | | 12328 | 13601 | 14092 | | | |
| | IDENTITY | 26% | 28% | 28% | 28% | | | 100% | 26% | 26% | | | |
| | COVERAGE | 101% | 73% | 101% | 102% | | | 100% | 100% | 104% | | | |
| SAU100845 | SeqID | | | | | | | 12329 | | | | | |
| | IDENTITY | | | | | | | 100% | | | | | |
| | COVERAGE | | | | | | | 100% | | | | | |
| SAU100858 | SeqID | 10256 | 10776 | | 11367 | 11719 | | 12401 | 13472 | 13796 | | | |
| | IDENTITY | 37% | 48% | | 35% | 37% | | 100% | 39% | 39% | | | |
| | COVERAGE | 106% | 98% | | 103% | 106% | | 101% | 100% | 106% | | | |
| SAU100859 | SeqID | 10446 | 10777 | 11254 | 11548 | | 12071 | 12402 | 13473 | 14026 | | | |
| | IDENTITY | 33% | 38% | 33% | 35% | | 34% | 100% | 38% | 32% | | | |
| | COVERAGE | 94% | 94% | 95% | 96% | | 94% | 100% | 92% | 95% | | | |
| SAU100865 | SeqID | 10252 | 10877 | 11010 | 11406 | | 11956 | 12648 | 13506 | 13704 | | | |
| | IDENTITY | 39% | 49% | 41% | 28% | | 44% | 100% | 48% | 38% | | | |
| | COVERAGE | 100% | 99% | 100% | 101% | 99% | 100% | 99% | 100% | | | | |
| SAU100866 | SeqID | 10191 | 10878 | 11005 | 11347 | | 11815 | 12553 | 13492 | 13754 | | | |
| | IDENTITY | 54% | 64% | 51% | 51% | | 53% | 100% | 57% | 55% | | | |
| | COVERAGE | 100% | 100% | | 100% | 100% | 100% | 100% | | | | | |
| SAU100879 | SeqID | | | | | | | 12483 | | | | | |
| | IDENTITY | | | | | | | 100% | | | | | |
| | COVERAGE | | | | | | | 100% | | | | | |
| SAU100880 | SeqID | 10429 | 10720 | | 11335 | | 12039 | 12340 | 13451 | 14072 | | | |
| | IDENTITY | 31% | 51% | | 35% | | 36% | 100% | 45% | 32% | | | |
| | COVERAGE | 81% | 95% | | 97% | | 81% | 100% | 99% | 85% | | | |
| SAU100882 | SeqID | 10322 | 10750 | 11177 | 11351 | | 12018 | 12374 | 13330 | 13733 | | | |
| | IDENTITY | 43% | 54% | 42% | 40% | | 45% | 100% | 52% | 43% | | | |
| | COVERAGE | 98% | 98% | 98% | 99% | | 98% | 100% | 98% | 98% | | | |
| SAU100885 | SeqID | 10410 | 10754 | 11001 | 11509 | | 12095 | 12376 | 14032 | | | | |
| | IDENTITY | 52% | 67% | 53% | 52% | | 53% | 100% | 52% | | | | |
| | COVERAGE | 93% | 74% | 94% | 96% | | 92% | 100% | 93% | | | | |
| SAU100886 | SeqID | 10224 | 10701 | 11213 | 11357 | | 11905 | 12139 | 13348 | 13957 | | | |
| | IDENTITY | 38% | 60% | 38% | 36% | | 36% | 100% | 52% | 38% | | | |
| | COVERAGE | 97% | 83% | 93% | 99% | | 104% | 100% | 102% | 98% | | | |
| SAU100887 | SeqID | 10393 | 10952 | 11057 | 11330 | | 11774 | 12138 | 13342 | 13920 | | | |
| | IDENTITY | 50% | 51% | 50% | 49% | | 48% | 100% | 70% | 50% | | | |
| | COVERAGE | 85% | 96% | 82% | 83% | | 83% | 100% | 96% | 85% | | | |
| SAU100899 | SeqID | | | | | | | 12277 | | | | | |
| | IDENTITY | | | | | | | 100% | | | | | |
| | COVERAGE | | | | | | | 100% | | | | | |
| SAU100901 | SeqID | | | | | | | 12278 | | | | | |
| | IDENTITY | | | | | | | 100% | | | | | |
| | COVERAGE | | | | | | | 100% | | | | | |
| SAU100916 | SeqID | 10209 | 10887 | | | | | 12394 | | 13876 | | | |
| | IDENTITY | 32% | 34% | | | | | 100% | | 32% | | | |
| | COVERAGE | 75% | 72% | | | | | 101% | | 75% | | | |
| SAU100920 | SeqID | 10060 | 10772 | 11191 | 11530 | 11756 | 11983 | 12395 | | 13896 | | | |
| | IDENTITY | 43% | 48% | 31% | 28% | 40% | 30% | 100% | | 43% | | | |
| | COVERAGE | 91% | 86% | 87% | 91% | 86% | 90% | 100% | | 91% | | | |
| SAU100921 | SeqID | 10027 | 10773 | 11185 | | 12012 | 12396 | 13478 | 14074 | | | | |
| | IDENTITY | 32% | 43% | 33% | | 33% | 100% | 34% | 32% | | | | |
| | COVERAGE | 101% | 96% | 96% | | | 96% | 100% | 98% | 101% | | | |
| SAU100932 | SeqID | 10095 | | 11271 | | | 11834 | 12615 | | 14055 | | | |
| | IDENTITY | 39% | | 36% | | | 39% | 100% | | 39% | | | |
| | COVERAGE | 101% | | 101% | | | 102% | 100% | 101% | | | | |
| SAU100944 | SeqID | 10017 | 10687 | 11219 | 11506 | | 12057 | 12505 | 13498 | 14012 | | | |
| | IDENTITY | 37% | 26% | 36% | 36% | | 39% | 100% | 27% | 39% | | | |
| | COVERAGE | 80% | 108% | 79% | 79% | | 83% | 100% | 83% | 80% | | | |
| SAU100952 | SeqID | | 10717 | | | | | 12523 | 13312 | | | | |
| | IDENTITY | | 33% | | | | | 100% | 31% | | | | |
| | COVERAGE | | 104% | | | | | 100% | 102% | | | | |
| SAU100959 | SeqID | | 10704 | | | | | 12485 | 13504 | | | | |
| | IDENTITY | | 58% | | | | | 100% | 49% | | | | |
| | COVERAGE | | 99% | | | | | 100% | 101% | | | | |
| SAU100961 | SeqID | 10320 | 10671 | 11141 | 11312 | | 12030 | 12638 | 13322 | 13766 | | | |
| | IDENTITY | 42% | 63% | 47% | 40% | | 50% | 100% | 57% | 42% | | | |
| | COVERAGE | 98% | 99% | 98% | 97% | | 98% | 101% | 101% | 99% | | | |
| SAU100962 | SeqID | | 11299 | | | 12639 | 13577 | | | | | | |
| | IDENTITY | | 28% | | | 100% | 26% | | | | | | |
| | COVERAGE | | 80% | | | 101% | 92% | | | | | | |
| SAU100963 | SeqID | 10319 | 10633 | 11140 | 11493 | | 12029 | 12640 | 13320 | 13771 | | | |
| | IDENTITY | 60% | 79% | 59% | 61% | | 63% | 100% | 81% | 60% | | | |
| | COVERAGE | 84% | 96% | 81% | 81% | | 84% | 101% | 92% | 88% | | | |
| SAU100964 | SeqID | | 10501 | 11139 | | | 12028 | 12641 | 13331 | | | | |
| | IDENTITY | | 61% | 45% | | | 47% | 100% | 60% | | | | |
| | COVERAGE | | 101% | 76% | | | 77% | 100% | 101% | | | | |
| SAU100965 | SeqID | | | | | | | 12642 | | | | | |
| | IDENTITY | | | | | | | 100% | | | | | |
| | COVERAGE | | | | | | | 101% | | | | | |
| SAU100970 | SeqID | 10128 | 10516 | 11247 | 11512 | | 11891 | 12529 | 13362 | | | | |
| | IDENTITY | 52% | 54% | 39% | 47% | | 52% | 100% | 46% | | | | |
| | COVERAGE | 99% | 99% | 100% | 100% | 99% | 100% | 99% | | | | | |
| SAU100996 | SeqID | | 10686 | | 11350 | | | 12606 | 13600 | | | | |
| | IDENTITY | | 38% | | 34% | | | 100% | 39% | | | | |
| | COVERAGE | | 97% | | 73% | | | 100% | 96% | | | | |
| SAU101006 | SeqID | 10185 | 10572 | 11022 | 11473 | | 5122 | 12190 | | 13820 | | | |
| | IDENTITY | 29% | 40% | 31% | 26% | | 26% | 100% | | 30% | | | |
| | COVERAGE | 84% | 98% | 87% | 94% | | 79% | 100% | 91% | | | | |
| SAU101020 | SeqID | | | | | | | 12710 | | | | | |
| | IDENTITY | | | | | | | 100% | | | | | |
| | COVERAGE | | | | | | | 100% | | | | | |
| SAU101024 | SeqID | | | | | | | 12711 | | | | | |
| | IDENTITY | | | | | | | 100% | | | | | |
| | COVERAGE | | | | | | | 101% | | | | | |
| SAU101028 | SeqID | 10034 | 10848 | 11148 | 11364 | | 12006 | 12552 | 13471 | 13901 | | | |
| | IDENTITY | 46% | 57% | 43% | 46% | | 46% | 100% | 55% | 45% | | | |
| | COVERAGE | 106% | 101% | 107% | 100% | | 108% | 100% | 100% | 106% | | | |
| SAU101034 | SeqID | | 10578 | | | | | 12608 | 13654 | | | | |
| | IDENTITY | | 36% | | | | | 100% | 37% | | | | |
| | COVERAGE | | 80% | | | | | 100% | 71% | | | | |
| SAU101038 | SeqID | | 10716 | | | | 11822 | 12521 | 13428 | | | | |
| | IDENTITY | | 42% | | | | 35% | 100% | 36% | | | | |
| | COVERAGE | | 96% | | | | 78% | 101% | 103% | | | | |
| SAU101039 | SeqID | | | | | | | 12522 | | | | | |
| | IDENTITY | | | | | | | 100% | | | | | |
| | COVERAGE | | | | | | | 100% | | | | | |
| SAU101065 | SeqID | 10221 | 10681 | 11210 | 11607 | 11668 | 11801 | 12289 | 13191 | 14027 | | | |
| | IDENTITY | 37% | 49% | 40% | 28% | 38% | 36% | 100% | 46% | 31% | | | |
| | COVERAGE | 98% | 103% | 100% | 108% | 97% | 98% | 100% | 102% | 98% | | | |
| SAU101067 | SeqID | | 10682 | | | | | 12290 | 13394 | | | | |
| | IDENTITY | | 41% | | | | | 100% | 40% | | | | |
| | COVERAGE | | 100% | | | | | 100% | 99% | | | | |
| SAU101070 | SeqID | | 10770 | | | | | 12291 | 13380 | | | | |
| | IDENTITY | | 40% | | | | | 100% | 32% | | | | |
| | COVERAGE | | 89% | | | | | 100% | 82% | | | | |
| SAU101084 | SeqID | 10066 | | 11156 | | | 11974 | 12283 | | | | | |
| | IDENTITY | 36% | | 34% | | | 35% | 100% | | | | | |
| | COVERAGE | 90% | | 102% | | | 92% | 100% | | | | | |
| SAU101085 | SeqID | 10170 | | 11263 | 11462 | | 11973 | 12284 | 13225 | 13993 | | | |
| | IDENTITY | 37% | | 34% | 37% | | 38% | 100% | 47% | 32% | | | |
| | COVERAGE | 89% | | 88% | 94% | | 94% | 100% | 101% | 88% | | | |
| SAU101086 | SeqID | | | | 11366 | | 11972 | 12285 | 13666 | | | | |
| | IDENTITY | | | | 42% | | 34% | 100% | 49% | | | | |
| | COVERAGE | | | | 74% | | 94% | 100% | 101% | | | | |
| SAU101090 | SeqID | | 10755 | | | | | 12191 | 13188 | | | | |
| | IDENTITY | | 36% | | | | | 100% | 31% | | | | |
| | COVERAGE | | 97% | | | | | 100% | 97% | | | | |
| SAU101092 | SeqID | 10450 | 10567 | | | | 11847 | 12192 | | | | | |
| | IDENTITY | 35% | 33% | | | | 30% | 100% | | | | | |
| | COVERAGE | 71% | 96% | | | | 72% | 100% | | | | | |
| SAU101104 | SeqID | 10135 | 10768 | 11248 | 11404 | 11732 | 11869 | 12195 | 13482 | 13827 | | | |
| | IDENTITY | 38% | 45% | 39% | 37% | 37% | 42% | 100% | 38% | 37% | | | |
| | COVERAGE | 98% | 100% | 100% | 92% | 99% | 99% | 100% | 96% | 99% | | | |
| SAU101143 | SeqID | 10040 | | 11157 | 11315 | | 11968 | 12502 | | 13906 | | | |
| | IDENTITY | 47% | | 27% | 43% | | 44% | 100% | | 47% | | | |
| | COVERAGE | 99% | | 82% | 98% | | 100% | 100% | | 99% | | | |
| SAU101145 | SeqID | | 10548 | | | | 12070 | 12299 | | | | | |
| | IDENTITY | | 42% | | | | 43% | 100% | | | | | |
| | COVERAGE | | 98% | | | | 96% | 101% | | | | | |
| SAU101155 | SeqID | 10287 | 10697 | 11077 | 11352 | 11690 | 11944 | 12310 | 13549 | 13868 | | | |
| | IDENTITY | 43% | 49% | 40% | 30% | 42% | 42% | 100% | 37% | 43% | | | |
| | COVERAGE | 95% | 95% | 95% | 86% | 95% | 94% | 100% | 76% | 95% | | | |
| SAU101156 | SeqID | 10426 | 10698 | 11032 | 11333 | | 12083 | 12311 | | 13790 | | | |
| | IDENTITY | 56% | 63% | 60% | 52% | | 58% | 100% | | 55% | | | |
| | COVERAGE | 96% | 101% | 96% | 97% | | 96% | 101% | | 96% | | | |
| SAU101159 | SeqID | | 10891 | | 11532 | | | 12331 | 13463 | | | | |
| | IDENTITY | | 65% | | 36% | | | 100% | 54% | | | | |
| | COVERAGE | | 100% | | 100% | | | 100% | 104% | | | | |
| SAU101175 | SeqID | | | | | | | 12213 | | | | | |
| | IDENTITY | | | | | | | 100% | | | | | |
| | COVERAGE | | | | | | | 101% | | | | | |
| SAU101180 | SeqID | 10061 | 10888 | | | | 11910 | 12656 | | | | | |
| | IDENTITY | 38% | 50% | | | | 37% | 100% | | | | | |
| | COVERAGE | 72% | 89% | | | | 70% | 100% | | | | | |
| SAU101183 | SeqID | | 10843 | | | | | 12304 | | | | | |
| | IDENTITY | | 42% | | | | | 100% | | | | | |
| | COVERAGE | | 102% | | | | 100% | | | | | | |
| SAU101184 | SeqID | 10477 | 10711 | 11218 | 11376 | 11735 | 12033 | 12305 | 13499 | 13709 | | | |
| | IDENTITY | 37% | 46% | 36% | 30% | 38% | 35% | 100% | 44% | 38% | | | |
| | COVERAGE | 86% | 100% | 102% | 85% | 82% | 85% | 100% | 98% | 82% | | | |
| SAU101189 | SeqID | | | | | | | 12264 | | | | | |
| | IDENTITY | | | | | | | 100% | | | | | |
| | COVERAGE | | | | | | | 100% | | | | | |
| SAU101197 | SeqID | 10180 | 10787 | 11024 | | | 11924 | 12300 | 13340 | 13976 | | | |
| | IDENTITY | 31% | 44% | 31% | | | 27% | 100% | 46% | 30% | | | |
| | COVERAGE | 98% | 98% | 101% | | | 100% | 100% | 98% | 98% | | | |
| SAU101198 | SeqID | 10218 | 10786 | 11023 | | | 11923 | 12301 | 13341 | | | | |
| | IDENTITY | 43% | 50% | 43% | | | 41% | 100% | 46% | | | | |
| | COVERAGE | 74% | 98% | 73% | | | 75% | 100% | 102% | | | | |
| SAU101199 | SeqID | 10088 | 10742 | 10970 | | | 11949 | 12302 | 13178 | 14052 | | | |
| | IDENTITY | 29% | 40% | 31% | | | 36% | 100% | 37% | 30% | | | |
| | COVERAGE | 97% | 86% | 94% | | | 97% | 100% | 87% | 98% | | | |
| SAU101220 | SeqID | 10286 | 10864 | | | | | 12645 | 13390 | 13870 | | | |
| | IDENTITY | 32% | 37% | | | | | 100% | 39% | 31% | | | |
| | COVERAGE | 74% | 81% | | | | | 100% | 99% | 74% | | | |
| SAU101224 | SeqID | | | | 11533 | | | 12647 | | | | | |
| | IDENTITY | | | | 28% | | | 100% | | | | | |
| | COVERAGE | | | | 77% | | | 100% | | | | | |
| SAU101226 | SeqID | | 10837 | | | 11658 | 11825 | 12298 | 13296 | 13721 | | | |
| | IDENTITY | | 52% | | | 28% | 37% | 100% | 27% | 27% | | | |
| | COVERAGE | | 96% | | | 75% | 90% | 100% | 77% | 77% | | | |
| SAU101231 | SeqID | 10301 | 10513 | | | | 12079 | 12303 | | 13759 | | | |
| | IDENTITY | 32% | 61% | | | | 32% | 100% | | 31% | | | |
| | COVERAGE | 101% | 100% | | | | 73% | 101% | | 106% | | | |
| SAU101235 | SeqID | | 10616 | 11087 | | | | 12561 | 13486 | | | | |
| | IDENTITY | | 37% | 27% | | | | 100% | | 35% | | | |
| | COVERAGE | | 84% | 90% | | | | 100% | | 97% | | | |
| SAU101236 | SeqID | 10089 | 10500 | | | 11673 | 11951 | 12564 | 13474 | | | | |
| | IDENTITY | 42% | 55% | | | 29% | 39% | 100% | | 35% | | | |
| | COVERAGE | 101% | 77% | | | 108% | 100% | 100% | 103% | | | | |
| SAU101239 | SeqID | | | | 11361 | | | 12570 | | | | | |
| | IDENTITY | | | | 33% | | | 100% | | | | | |
| | COVERAGE | | | | 98% | | | 100% | | | | | |
| SAU101240 | SeqID | | | | | | | 12573 | | | | | |
| | IDENTITY | | | | | | | 100% | | | | | |
| | COVERAGE | | | | | | | 101% | | | | | |
| SAU101242 | SeqID | 10335 | 10879 | 11121 | 11425 | | 11988 | 12578 | 13240 | 14095 | | | |
| | IDENTITY | 48% | 67% | 47% | 48% | | 47% | 100% | 55% | 47% | | | |
| | COVERAGE | 104% | 101% | 104% | 105% | | 104% | 101% | 101% | 105% | | | |
| SAU101247 | SeqID | | 10919 | | | | 11984 | 12512 | 13359 | | | | |
| | IDENTITY | | 32% | | | | 36% | 100% | | 33% | | | |
| | COVERAGE | | 91% | | | | 90% | 100% | 85% | | | | |
| SAU101262 | SeqID | 1013710735 | | 11399 | | 11922 | 12488 | 13238 | 13837 | | | | |
| | IDENTITY | 28% | 70% | | 47% | | 33% | 100% | 67% | 28% | | | |
| | COVERAGE | 73% | 100% | | 101% | | 97% | 100% | 100% | 73% | | | |
| SAU101266 | SeqID | 10238 | 10789 | 11178 | 11517 | | 11829 | 12490 | 13317 | 13864 | | | |
| | IDENTITY | 45% | 57% | 46% | 41% | | 43% | 100% | 51% | 44% | | | |
| | COVERAGE | 100% | 99% | 100% | 98% | | 89% | 100% | 98% | 100% | | | |
| SAU101267 | SeqID | | | | | | | 12364 | | | | | |
| | IDENTITY | | | | | | | 100% | | | | | |
| | COVERAGE | | | | | | | 100% | | | | | |
| SAU101270 | SeqID | 10175 | 10718 | 11220 | 11324 | | 11881 | 12365 | 13383 | 13942 | | | |
| | IDENTITY | 50% | 62% | 47% | 45% | | 52% | 100% | 61% | 50% | | | |
| | COVERAGE | 96% | 99% | 97% | 93% | | 97% | 100% | 98% | 96% | | | |
| SAU101271 | SeqID | 10174 | 10719 | 11221 | 11556 | | 11880 | 12366 | 13385 | 13943 | | | |
| | IDENTITY | 37% | 46% | 36% | 25% | | 35% | 100% | 46% | 37% | | | |
| | COVERAGE | 100% | 102% | 100% | 100% | | 100% | 100% | 101% | 75% | | | |
| SAU101275 | SeqID | 10232 | 10684 | 10981 | 11521 | 11708 | 11845 | 12604 | 13299 | 13954 | | | |
| | IDENTITY | 35% | 57% | 38% | 33% | 34% | 34% | 100% | 57% | 35% | | | |
| | COVERAGE | 95% | 101% | 93% | 98% | 96% | 94% | 100% | 101% | 95% | | | |
| SAU101286 | SeqID | | 10884 | | | | | 12292 | 13189 | | | | |
| | IDENTITY | | 47% | | | | | 100% | 40% | | | | |
| | COVERAGE | | 100% | | | | | 101% | 99% | | | | |
| SAU101293 | SeqID | | | | | | | 12631 | | | | | |
| | IDENTITY | | | | | | | 100% | | | | | |
| | COVERAGE | | | | | | | 101% | | | | | |
| SAU101300 | SeqID | | 10751 | | | | | 12557 | 13194 | | | | |
| | IDENTITY | | 57% | | | | | 100% | 54% | | | | |
| | COVERAGE | | 93% | | | | | 101% | 90% | | | | |
| SAU101301 | SeqID | | 10752 | | | | 11785 | 12558 | 13195 | | | | |
| | IDENTITY | | 57% | | | | 27% | 100% | 54% | | | | |
| | COVERAGE | | 96% | | | | 94% | 101% | 99% | | | | |
| SAU101302 | SeqID | | 10753 | | 11317 | | | 12559 | 13611 | | | | |
| | IDENTITY | | 49% | | 33% | | | 100% | 26% | | | | |
| | COVERAGE | | 101% | | 86% | | | 101% | 72% | | | | |
| SAU101310 | SeqID | 10330 | 10924 | 11160 | 11321 | | 12063 | 12562 | 13364 | 13885 | | | |
| | IDENTITY | 47% | 52% | 48% | 43% | | 47% | 100% | 51% | 47% | | | |
| | COVERAGE | 98% | 98% | 98% | 98% | | 98% | 100% | 98% | 98% | | | |
| SAU101311 | SeqID | 10094 | | 11278 | | 11859 | 12563 | | 13891 | | | | |
| | IDENTITY | 46% | | 46% | | 42% | 100% | | 46% | | | | |
| | COVERAGE | 98% | | 98% | | 96% | 100% | | 95% | | | | |
| SAU101320 | SeqID | 10263 | 10861 | 10965 | 11562 | | 11948 | 12128 | 13254 | 14089 | | | |
| | IDENTITY | 50% | 59% | 49% | 39% | | 51% | 100% | 56% | 49% | | | |
| | COVERAGE | 100% | 99% | 99% | 100% | | 99% | 100% | 97% | 100% | | | |
| SAU101327 | SeqID | 10018 | 10710 | 11147 | | | 11779 | 12612 | 13495 | 14014 | | | |
| | IDENTITY | 35% | 46% | 43% | | | 34% | 100% | 35% | 35% | | | |
| | COVERAGE | 100% | 97% | 101% | | | 92% | 101% | 99% | 100% | | | |
| SAU101339 | SeqID | 10093 | 10520 | | 11365 | | 11839 | 12399 | 13405 | 13888 | | | |
| | IDENTITY | 55% | 30% | | 26% | | 54% | 100% | 27% | 45% | | | |
| | COVERAGE | 99%74% | | 74% | | 97% | 100% | 76% | 99% | | | | |
| SAU101340 | SeqID | 10092 | | | | | 11840 | 12400 | | 13889 | | | |
| | IDENTITY | 37% | | | | | 35% | 100% | | 39% | | | |
| | COVERAGE | 106% | | | | | 101% | 101% | | 104% | | | |
| SAU101341 | SeqID | 10230 | 10925 | 11212 | 11385 | | 11898 | 12618 | 13365 | 13952 | | | |
| | IDENTITY | 47% | 55% | 48% | 48% | | 45% | 100% | 48% | 47% | | | |
| | COVERAGE | 93% | 92% | 92% | 98% | | 92% | 100% | 100% | 93% | | | |
| SAU101343 | SeqID | 10422 | 10649 | 11162 | | 11721 | | 12619 | 13346 | 13785 | | | |
| | IDENTITY | 50% | 55% | 49% | | 50% | | 100% | 58% | 51% | | | |
| | COVERAGE | 99% | 100% | 99% | | 99% | | 100% | 92% | 99% | | | |
| SAU101344 | SeqID | 10171 | 10650 | 11252 | | | 11826 | 12620 | 13347 | 13755 | | | |
| | IDENTITY | 48% | 62% | 40% | | | 37% | 100% | 44% | 38% | | | |
| | COVERAGE | 81% | 88% | 79% | | | 82% | 100% | 79% | 81% | | | |
| SAU101346 | SeqID | 10058 | | | 11282 | | 11803 | 12621 | | 13894 | | | |
| | IDENTITY | 36% | | | 35% | | 43% | 100% | | 36% | | | |
| | COVERAGE | 99% | | | 103% | | 99% | 100% | | 99% | | | |
| SAU101347 | SeqID | 10139 | | 11163 | 11283 | | 11877 | 12622 | 13259 | 13839 | | | |
| | IDENTITY | 63% | | 29% | 62% | | 62% | 100% | 30% | 62% | | | |
| | COVERAGE | 100% | | 96% | 101% | | 100% | 100% | 91% | 100% | | | |
| SAU101350 | SeqID | 10184 | 10508 | | 11318 | | 12069 | 12487 | 13286 | 13982 | | | |
| | IDENTITY | 61% | 56% | | 32% | | 46% | 100% | 55% | 60% | | | |
| | COVERAGE | 95% | 98% | | 81% | | 100% | 100% | 97% | 97% | | | |
| SAU101351 | SeqID | | 10507 | | | | | 12486 | 13285 | | | | |
| | IDENTITY | | 60% | | | | | 100% | 59% | | | | |
| | COVERAGE | | 96% | | | | | 100% | 96% | | | | |
| SAU101360 | SeqID | 10138 | 10571 | 10977 | 11598 | 11684 | 11878 | 12555 | 13175 | 13838 | | | |
| | IDENTITY | 56% | 70% | 54% | 35% | 55% | 58% | 100% | 71% | 56% | | | |
| | COVERAGE | 98% | 101% | 98% | 97% | 88% | 98% | 100% | 101% | 98% | | | |
| SAU101365 | SeqID | 10269 | 10491 | 11127 | 11577 | 11809 | 12556 | 13295 | 13874 | | | | |
| | IDENTITY | 45% | 55% | 44% | 40% | 45% | 100% | 50% | 45% | | | | |
| | COVERAGE | 101% | 101% | 101% | 99% | 101% | 100% | 100% | 101% | | | | |
| SAU101366 | SeqID | 10147 | 10654 | | | | | 12266 | 13179 | 13843 | | | |
| | IDENTITY | 49% | 73% | | | | | 100% | 56% | 48% | | | |
| | COVERAGE | 99% | 98% | | | | | 100% | 99% | 99% | | | |
| SAU101369 | SeqID | | | | | | | 12274 | | | | | |
| | IDENTITY | | | | | | | 100% | | | | | |
| | COVERAGE | | | | | | | 100% | | | | | |
| SAU101371 | SeqID | | | | 11372 | | 11902 | 12275 | 13243 | | | | |
| | IDENTITY | | | | 40% | | 32% | 100% | 34% | | | | |
| | COVERAGE | | | | 86% | | 79% | 100% | 77% | | | | |
| SAU101381 | SeqID | 10373 | | | | | | 12145 | 13432 | | | | |
| | IDENTITY | 26% | | | | | | 100% | 41% | | | | |
| | COVERAGE | 98% | | | | | | 100% | 99% | | | | |
| SAU101382 | SeqID | 10239 | 10707 | 11179 | 11292 | 11635 | 11879 | 12146 | 13657 | 13862 | | | |
| | IDENTITY | 53% | 60% | 50% | 42% | 39% | 53% | 100% | 63% | 52% | | | |
| | COVERAGE | 98% | 99% | 97% | 97% | 79% | 98% | 100% | 96% | 98% | | | |
| SAU101383 | SeqID | 10317 | 10625 | 11226 | 11418 | | 12055 | 12147 | 13422 | 13761 | | | |
| | IDENTITY | 37% | 39% | 36% | 26% | | 38% | 100% | 37% | 39% | | | |
| | COVERAGE | 102% | 90% | 97% | 98% | | 94% | 100% | 112% | 94% | | | |
| SAU101385 | SeqID | 10403 | 10830 | 11030 | 11368 | 11640 | 12115 | 12385 | 13508 | 14067 | | | |
| | IDENTITY | 33% | 52% | 31% | 27% | 32% | 29% | 100% | 38% | 32% | | | |
| | COVERAGE | 99% | 90% | 92% | 89% | 96% | 98% | 100% | 92% | 99% | | | |
| SAU101387 | SeqID | 10402 | 10839 | | 11549 | | 12114 | 12386 | 13509 | 14068 | | | |
| | IDENTITY | 27% | 35% | | 27% | | 27% | 100% | 32% | 27% | | | |
| | COVERAGE | 87% | 88% | | 71% | | 87% | 101% | 90% | 87% | | | |
| SAU101389 | SeqID | 10401 | 10801 | 11029 | 11400 | | 12113 | 12387 | 13510 | 14069 | | | |
| | IDENTITY | 55% | 72% | 57% | 60% | | 57% | 100% | 74% | 55% | | | |
| | COVERAGE | 98% | 99% | 99% | 100% | | 98% | 100% | 94% | 98% | | | |
| SAU101398 | SeqID | 10313 | 10881 | 11224 | 11502 | 11754 | 12051 | 12324 | 13485 | 13767 | | | |
| | IDENTITY | 55% | 78% | 54% | 51% | 57% | 56% | 100% | 68% | 54% | | | |
| | COVERAGE | 100% | 101% | 100% | 99% | 101% | 100% | 101% | 101% | 101% | | | |
| SAU101399 | SeqID | 10312 | 10882 | 10989 | 11416 | 11755 | 12050 | 12325 | 13699 | 13768 | | | |
| | IDENTITY | 50% | 63% | 48% | 38% | 51% | 51% | 100% | 58% | 49% | | | |
| | COVERAGE | 99% | 100% | 98% | 97% | 85% | 97% | 100% | 99% | 99% | | | |
| SAU101400 | SeqID | | 10743 | | 11448 | | | 12326 | 13391 | | | | |
| | IDENTITY | | 46% | | 32% | | | 100% | 41% | | | | |
| | COVERAGE | | 96% | | 95% | | | 100% | 96% | | | | |
| SAU101408 | SeqID | 10267 | 10509 | | | | | 12308 | 13278 | 14050 | | | |
| | IDENTITY | 37% | 43% | | | | | 100% | 42% | 39% | | | |
| | COVERAGE | 100% | 99% | | | | | 100% | 101% | 100% | | | |
| SAU101421 | SeqID | | 10676 | | | | | 12498 | | | | | |
| | IDENTITY | | 38% | | | | | 100% | | | | | |
| | COVERAGE | | 93% | | | | | 100% | | | | | |
| SAU101427 | SeqID | | | | | | | 12500 | 13234 | | | | |
| | IDENTITY | | | | | | | 100% | 48% | | | | |
| | COVERAGE | | | | | | | 100% | 100% | | | | |
| SAU101432 | SeqID | | | 11046 | 11286 | 11744 | 12065 | 12184 | 13538 | | | | |
| | IDENTITY | | | 57% | 60% | 63% | 68% | 100% | 26% | | | | |
| | COVERAGE | | | 99% | 100% | 101% | 99% | 101% | 73% | | | | |
| SAU101436 | SeqID | 10271 | | 11045 | 11285 | | 12067 | 12183 | | 13873 | | | |
| | IDENTITY | 27% | | 62% | 61% | | 59% | 100% | | 27% | | | |
| | COVERAGE | 90% | | 99% | 97% | | 98% | 100% | | 90% | | | |
| SAU101438 | SeqID | 10146 | 10825 | 11042 | | | | 12379 | 13337 | 13842 | | | |
| | IDENTITY | 30% | 29% | 29% | | | | 100% | 27% | 30% | | | |
| | COVERAGE | 88% | 94% | 89% | | | | 100% | 94% | 88% | | | |
| SAU101444 | SeqID | 10254 | 10827 | 11144 | 11301 | | 12034 | 12381 | 13335 | 13792 | | | |
| | IDENTITY | 60% | 66% | 57% | 54% | | 60% | 100% | 61% | 59% | | | |
| | COVERAGE | 100% | 101% | 100% | 100% | | 100% | 100% | 99% | 100% | | | |
| SAU101445 | SeqID | 10248 | 10828 | 11207 | | | 12037 | 12382 | 13408 | 13949 | | | |
| | IDENTITY | 52% | 70% | 52% | | | 54% | 100% | 72% | 51% | | | |
| | COVERAGE | 99% | 100% | 96% | | | 99% | 100% | 100% | 100% | | | |
| SAU101446 | SeqID | 10411 | 10674 | | | | 11903 | 12383 | | 14031 | | | |
| | IDENTITY | 50% | 59% | | | | 33% | 100% | | 50% | | | |
| | COVERAGE | 98% | 100% | | | | 97% | 100% | | 99% | | | |
| SAU101447 | SeqID | | | | | | | 12683 | | | | | |
| | IDENTITY | | | | | | | 100% | | | | | |
| | COVERAGE | | | | | | | 101% | | | | | |
| SAU101452 | SeqID | | | | | | | 12684 | | | | | |
| | IDENTITY | | | | | | | 100% | | | | | |
| | COVERAGE | | | | | | | 100% | | | | | |
| SAU101455 | SeqID | | | | | | | 12686 | | | | | |
| | IDENTITY | | | | | | | 100% | | | | | |
| | COVERAGE | | | | | | | 100% | | | | | |
| SAU101461 | SeqID | | 10705 | | | | 11790 | 12680 | | | | | |
| | IDENTITY | | 54% | | | | 26% | 100% | | | | | |
| | COVERAGE | | 93% | | | | 86% | 101% | | | | | |
| SAU101463 | SeqID | 10268 | 10708 | | | | 11919 | 12679 | 13584 | 14051 | | | |
| | IDENTITY | 29% | 45% | | | | 26% | 100% | 26% | 29% | | | |
| | COVERAGE | 77% | 98% | | | | 91% | 101% | 88% | 77% | | | |
| SAU101476 | SeqID | 10469 | 10905 | 12254 | 13454 | 13905 | | | | | | | |
| | IDENTITY | 38% | 29% | 100% | 25% | 26% | | | | | | | |
| | COVERAGE | 84% | 94% | | | 100% | 95% | 73% | | | | | |
| SAU101481 | SeqID | 10125 | 10920 | 10975 | 11290 | | 11894 | 12130 | 13580 | | | | |
| | IDENTITY | 40% | 39% | 40% | 32% | | 39% | 100% | 41% | | | | |
| | COVERAGE | 93% | 95% | 96% | 93% | | 96% | 100% | 96% | | | | |
| SAU101482 | SeqID | 10126 | 10921 | 10974 | 11342 | 11738 | 11893 | 12123 | 13360 | 14092 | | | |
| | IDENTITY | 55% | 51% | 52% | 44% | 36% | 52% | 100% | 48% | 37% | | | |
| | COVERAGE | 98% | 100% | 98% | 98% | 77% | 98% | 100% | 99% | 101% | | | |
| SAU101483 | SeqID | 10127 | 10918 | 10973 | 11341 | | 11892 | 12124 | 13674 | 13871 | | | |
| | IDENTITY | 65% | 41% | 59% | 58% | | 61% | 100% | 51% | 31% | | | |
| | COVERAGE | 88% | 90% | 90% | 90% | | 87% | 101% | 92% | 94% | | | |
| SAU101488 | SeqID | | 10730 | | | | 11868 | 12164 | 13450 | 13799 | | | |
| | IDENTITY | | 28% | | | | 25% | 100% | 33% | 28% | | | |
| | COVERAGE | | 95% | | | | 74% | 100% | 98% | 73% | | | |
| SAU101491 | SeqID | | 10580 | | | | | 12165 | 13315 | | | | |
| | IDENTITY | | 42% | | | | | 100% | 42% | | | | |
| | COVERAGE | | 104% | | | | | 100% | 95% | | | | |
| SAU101492 | SeqID | 10073 | 10581 | 11020 | 11284 | | 11831 | 12166 | 13323 | 13715 | | | |
| | IDENTITY | 38% | 52% | 37% | 29% | | 37% | 100% | 43% | 38% | | | |
| | COVERAGE | 98% | 101% | 98% | 78% | | 94% | 101% | 85% | 98% | | | |
| SAU101493 | SeqID | 10074 | | 11021 | 11381 | | 11832 | 12167 | 13564 | 13716 | | | |
| | IDENTITY | 42% | | 41% | 30% | | 43% | 100% | 64% | 44% | | | |
| | COVERAGE | 96% | | 97% | 94% | | 98% | 101% | 91% | 96% | | | |
| SAU101495 | SeqID | 1003010805 | 11188 | 11458 | | 5187 | 12360 | 13333 | 14077 | | | | |
| | IDENTITY | 32% | 34% | 36% | 29% | | 33% | 100% | 32% | 32% | | | |
| | COVERAGE | 92% | 92% | 90% | 86% | | 90% | 100% | 94% | 92% | | | |
| SAU101497 | SeqID | | 10806 | | | | | 12361 | | | | | |
| | IDENTITY | | 59% | | | | | 100% | | | | | |
| | COVERAGE | | 100% | | | | | 100% | | | | | |
| SAU101509 | SeqID | 10121 | | | | 11712 | | 12418 | 13249 | | | | |
| | IDENTITY | 34% | | | | 36% | | 100% | 49% | | | | |
| | COVERAGE | 104% | | | | 104% | | 100% | 83% | | | | |
| SAU101526 | SeqID | | 10901 | | | | | 12179 | 13465 | | | | |
| | IDENTITY | | 38% | | | | | 100% | 34% | | | | |
| | COVERAGE | | 88% | | | | | 100% | 89% | | | | |
| SAU101529 | SeqID | | | | | | | 12544 | | | | | |
| | IDENTITY | | | | | | | 100% | | | | | |
| | COVERAGE | | | | | | | 100% | | | | | |
| SAU101541 | SeqID | 10024 | 10631 | 11182 | 11526 | | 12014 | 12344 | 13647 | 14019 | | | |
| | IDENTITY | 41% | 63% | 42% | 38% | | 42% | 100% | 59% | 40% | | | |
| | COVERAGE | 101% | 100% | 101% | 98% | | 101% | 100% | 101% | 100% | | | |
| SAU101543 | SeqID | 10025 | 10634 | 11183 | | | 11867 | 12346 | 13406 | 14091 | | | |
| | IDENTITY | 26% | 33% | 27% | | | 27% | 100% | 32% | 28% | | | |
| | COVERAGE | 78% | 97% | 78% | | | 73% | 100% | 96% | 76% | | | |
| SAU101545 | SeqID | 10029 | 10636 | 11187 | 11329 | | 12010 | 12348 | 13633 | 14076 | | | |
| | IDENTITY | 31% | 50% | 32% | 27% | | 28% | 100% | 47% | 30% | | | |
| | COVERAGE | 98% | 99% | 97% | 83% | | 97% | 100% | 97% | 98% | | | |
| SAU101546 | SeqID | | 10638 | | | | | 12349 | | | | | |
| | IDENTITY | | 27% | | | | | 100% | | | | | |
| | COVERAGE | | 80% | | | | | 100% | | | | | |
| SAU101549 | SeqID | 10443 | 10762 | 11228 | | 11767 | 12049 | 12549 | 13460 | 14030 | | | |
| | IDENTITY | 40% | 38% | 30% | | 38% | 29% | 100% | 39% | 38% | | | |
| | COVERAGE | 70% | 95% | 88% | | 70% | 92% | 102% | 92% | 70% | | | |
| SAU101551 | SeqID | 10172 | 10490 | 11194 | 11360 | | 12019 | 12550 | 13326 | 13939 | | | |
| | IDENTITY | 52% | 77% | 26% | 27% | | 26% | 100% | 76% | 52% | | | |
| | COVERAGE | 97% | 98% | 98% | 89% | | 96% | 100% | 98% | 97% | | | |
| SAU101554 | SeqID | | 10485 | | 11485 | | | 12551 | 13672 | | | | |
| | IDENTITY | | 48% | | 26% | | | 100% | 46% | | | | |
| | COVERAGE | | 83% | | 81% | | | 101% | 91% | | | | |
| SAU101561 | SeqID | 10400 | 10937 | 11073 | 11355 | 11759 | 12112 | 12149 | 13307 | 14064 | | | |
| | IDENTITY | 44% | 57% | 44% | 38% | 42% | 44% | 100% | 49% | 43% | | | |
| | COVERAGE | 99% | 99% | 99% | 100% | 99% | 100% | 100% | 99% | 99% | | | |
| SAU101565 | SeqID | 10134 | 10552 | 11211 | | | 11895 | 12151 | 13448 | 13826 | | | |
| | IDENTITY | 37% | 50% | 35% | | | 36% | 100% | 44% | 36% | | | |
| | COVERAGE | 93% | 96% | 94% | | | 92% | 100% | 99% | 92% | | | |
| SAU101567 | SeqID | | | | | | | 12144 | | | | | |
| | IDENTITY | | | | | | | 100% | | | | | |
| | COVERAGE | | | | | | | 100% | | | | | |
| SAU101570 | SeqID | 10037 | 10690 | 11208 | | 11700 | 11835 | 12584 | 13563 | 13900 | | | |
| | IDENTITY | 32% | 48% | 31% | | 34% | 33% | 100% | 37% | 30% | | | |
| | COVERAGE | 100% | 100% | 99% | | 95% | 102% | 100% | 100% | 100% | | | |
| SAU101571 | SeqID | | 10691 | | | | 11917 | 12585 | 13308 | | | | |
| | IDENTITY | | 45% | | | | 33% | 100% | 31% | | | | |
| | COVERAGE | | 98% | | | | 94% | 100% | 97% | | | | |
| SAU101572 | SeqID | 10068 | 10692 | | | 11689 | 11864 | 12586 | 13309 | 14083 | | | |
| | IDENTITY | 26% | 56% | | | 46% | 43% | 100% | 45% | 25% | | | |
| | COVERAGE | 75% | 101% | | | 89% | 96% | 100% | 98% | 75% | | | |
| SAU101573 | SeqID | 10096 | 10693 | 11270 | | | 11865 | 12587 | | 14054 | | | |
| | IDENTITY | 31% | 49% | 35% | | | 30% | 100% | | 31% | | | |
| | COVERAGE | 98% | 103% | 98% | | | 101% | 100% | | 98% | | | |
| SAU101574 | SeqID | | | | | | | 12588 | | | | | |
| | IDENTITY | | | | | | | 100% | | | | | |
| | COVERAGE | | | | | | | 101% | | | | | |
| SAU101575 | SeqID | | 10869 | | | | | 12589 | 13638 | | | | |
| | IDENTITY | | 31% | | | | | 100% | 27% | | | | |
| | COVERAGE | | 98% | | | | | 100% | 96% | | | | |
| SAU101576 | SeqID | | 10762 | | | | 12049 | 12554 | 13460 | | | | |
| | IDENTITY | | 32% | | | | 29% | 100% | 39% | | | | |
| | COVERAGE | | 93% | | | | 98% | 102% | 98% | | | | |
| SAU101586 | SeqID | | | | | | | 12598 | 13487 | | | | |
| | IDENTITY | | | | | | | 100% | 34% | | | | |
| | COVERAGE | | | | | | | 101% | 78% | | | | |
| SAU101592 | SeqID | 10249 | 10605 | 10987 | 11555 | 11741 | 11952 | 12406 | 13283 | 13950 | | | |
| | IDENTITY | 51% | 74% | 53% | 53% | 51% | 52% | 100% | 70% | 51% | | | |
| | COVERAGE | 101% | 100% | 100% | 100% | 101% | 101% | 100% | 100% | 101% | | | |
| SAU101599 | SeqID | | | | | | | 12478 | | | | | |
| | IDENTITY | | | | | | | 100% | | | | | |
| | COVERAGE | | | | | | | 100% | | | | | |
| SAU101610 | SeqID | 10449 | | | 11390 | | 12048 | 12629 | | 13816 | | | |
| | IDENTITY | 38% | | | 38% | | 40% | 100% | | 38% | | | |
| | COVERAGE | 105% | | | 101% | | 99% | 100% | | 105% | | | |
| SAU101612 | SeqID | | | | | | | 12637 | | | | | |
| | IDENTITY | | | | | | | 100% | | | | | |
| | COVERAGE | | | | | | | 100% | | | | | |
| SAU101614 | SeqID | 10167 | 10678 | 11262 | 11534 | | 11978 | 12649 | 13462 | 13851 | | | |
| | IDENTITY | 49% | 55% | 29% | 29% | | 39% | 100% | 53% | 48% | | | |
| | COVERAGE | 100% | 98% | 93% | 94% | | 95% | 100% | 99% | 100% | | | |
| SAU101616 | SeqID | 10186 | 10667 | | 11407 | 11695 | 11872 | 12432 | | 13903 | | | |
| | IDENTITY | 33% | 28% | | 32% | 29% | 34% | 100% | | 33% | | | |
| | COVERAGE | 102% | 99% | | 88% | 104% | 96% | | 100% | 100% | | | |
| SAU101622 | SeqID | 10162 | | | 11619 | 11710 | 12104 | 12430 | | 13832 | | | |
| | IDENTITY | 69% | | | 29% | 67% | 43% | 100% | | 70% | | | |
| | COVERAGE | 100% | | | 104% | 78% | 101% | 100% | | 100% | | | |
| SAU101624 | SeqID | 10193 | | 11255 | 11316 | | | 12429 | 13430 | 13752 | | | |
| | IDENTITY | 26% | | 27% | 38% | | | 100% | 26% | 26% | | | |
| | COVERAGE | 101% | | 106% | 97% | | | 100% | 103% | 107% | | | |
| SAU101630 | SeqID | | | | | | | 12410 | | | | | |
| | IDENTITY | | | | | | | 100% | | | | | |
| | COVERAGE | | | | | | | 100% | | | | | |
| SAU101632 | SeqID | | | | | | | 12407 | | | | | |
| | IDENTITY | | | | | | | 100% | | | | | |
| | COVERAGE | | | | | | | 100% | | | | | |
| SAU101637 | SeqID | | 10886 | | | | | 12201 | 13384 | | | | |
| | IDENTITY | | 44% | | | | | 100% | 38% | | | | |
| | COVERAGE | | 99% | | | | | 101% | 98% | | | | |
| SAU101641 | SeqID | 10223 | | | | | 11918 | 12193 | | | | | |
| | IDENTITY | 51% | | | | | 53% | 100% | | | | | |
| | COVERAGE | 92% | | | | | 95% | 100% | | | | | |
| SAU101651 | SeqID | | 10790 | | 11552 | | 12021 | 12491 | 13369 | | | | |
| | IDENTITY | | 38% | | 28% | | 34% | 100% | 42% | | | | |
| | COVERAGE | | 97% | | 89% | | 90% | 101% | 100% | | | | |
| SAU101652 | SeqID | | 10791 | | 11369 | | 12022 | 12492 | 13368 | | | | |
| | IDENTITY | | 62% | | 49% | | 50% | 100% | 56% | | | | |
| | COVERAGE | | 97% | | 91% | | 95% | 100% | 98% | | | | |
| SAU101653 | SeqID | | 10792 | | 11520 | | 12023 | 12493 | 13367 | | | | |
| | IDENTITY | | 73% | | 46% | | 49% | 100% | 63% | | | | |
| | COVERAGE | | 100% | | 100% | | 100% | 100% | 100% | | | | |
| SAU101655 | SeqID | 10205 | 10793 | | | | 11896 | 12494 | 13334 | | | | |
| | IDENTITY | 31% | 50% | | | | 30% | 100% | 33% | | | | |
| | COVERAGE | 84% | 97% | | | | 83% | 100% | 93% | | | | |
| SAU101663 | SeqID | | | | | | | 12261 | | | | | |
| | IDENTITY | | | | | | | 100% | | | | | |
| | COVERAGE | | | | | | | 100% | | | | | |
| SAU101664 | SeqID | 10202 | 10512 | 11138 | | | 11863 | 12262 | 13685 | 13823 | | | |
| | IDENTITY | 37% | 41% | 36% | | | 38% | 100% | 38% | 36% | | | |
| | COVERAGE | 98% | 97% | 108% | | | 106% | 101% | 105% | 98% | | | |
| SAU101674 | SeqID | 10067 | | | | | 11846 | 12594 | | 14082 | | | |
| | IDENTITY | 27% | | | | | 27% | 100% | | 27% | | | |
| | COVERAGE | 103% | | | | | 101% | 100% | | 103% | | | |
| SAU101679 | SeqID | 10190 | 10644 | 11055 | 11398 | | 12105 | 12593 | 13264 | 13756 | | | |
| | IDENTITY | 41% | 53% | 42% | 36% | | 45% | 100% | 45% | 40% | | | |
| | COVERAGE | 90% | 100% | 99% | 86% | | 90% | 100% | 98% | 90% | | | |
| SAU101681 | SeqID | 10464 | 10746 | | | | 11861 | 12592 | 13419 | 13987 | | | |
| | IDENTITY | 39% | 46% | | | | 31% | 100% | 44% | 40% | | | |
| | COVERAGE | 100% | 102% | | | | 95% | 100% | 102% | 97% | | | |
| SAU101682 | SeqID | 10156 | 10670 | 11265 | | | | 12591 | 13488 | 13884 | | | |
| | IDENTITY | 28% | 30% | 28% | | | | 100% | 34% | 26% | | | |
| | COVERAGE | 94% | 96% | 102% | | | | 100% | 80% | 94% | | | |
| SAU101685 | SeqID | | 10590 | | | | 11920 | 12152 | 13396 | | | | |
| | IDENTITY | | 26% | | | | 37% | 100% | 56% | | | | |
| | COVERAGE | | 88% | | | | 97% | 100% | 100% | | | | |
| SAU101717 | SeqID | 10129 | 10586 | 11027 | 11610 | | 11890 | 12131 | 13352 | 14070 | | | |
| | IDENTITY | 33% | 51% | 35% | 31% | | 38% | 100% | 49% | 34% | | | |
| | COVERAGE | 101% | 100% | 93% | 70% | | 99% | 100% | 93% | 101% | | | |
| SAU101724 | SeqID | 10309 | 10588 | 11268 | 11337 | | 12015 | 12136 | 13678 | 13772 | | | |
| | IDENTITY | 44% | 44% | 41% | 36% | | 43% | 100% | 45% | 43% | | | |
| | COVERAGE | 97% | 99% | 97% | 87% | | 80% | 100% | 98% | 97% | | | |
| SAU101726 | SeqID | 10130 | 10664 | 11026 | 11461 | | 11889 | 12134 | 13550 | 14071 | | | |
| | IDENTITY | 37% | 50% | 42% | 36% | | 40% | 100% | 48% | 41% | | | |
| | COVERAGE | 101% | 100% | 101% | 101% | | 100% | 100% | 100% | 77% | | | |
| SAU101727 | SeqID | | 10665 | | | | | 12133 | 13551 | | | | |
| | IDENTITY | | 50% | | | | | 100% | 49% | | | | |
| | COVERAGE | | 101% | | | | | 101% | 101% | | | | |
| SAU101728 | SeqID | 10019 | 10666 | 11053 | | 11734 | 11800 | 12132 | 13182 | 14015 | | | |
| | IDENTITY | 34% | 54% | 35% | | 35% | 34% | 100% | 53% | 34% | | | |
| | COVERAGE | 86% | 95% | 88% | | 85% | 90% | 100% | 94% | 86% | | | |
| SAU101736 | SeqID | 10225 | | | | | 11817 | 12519 | | 13958 | | | |
| | IDENTITY | 28% | | | | | 38% | 100% | | 29% | | | |
| | COVERAGE | 72% | | | | | 99% | | | | | 100% | 72% |
| SAU101737 | SeqID | | | | 11405 | | 11817 | 12518 | | | | | |
| | IDENTITY | | | | 32% | | 30% | 100% | | | | | |
| | COVERAGE | | | | 78% | | 96% | 101% | | | | | |
| SAU101744 | SeqID | | 10562 | | | | | 12367 | | | | | |
| | IDENTITY | | 44% | | | | | 100% | | | | | |
| | COVERAGE | | 101% | | | | | 100% | | | | | |
| SAU101751 | SeqID | 10474 | 10606 | | | 11671 | | 12448 | 13165 | 13706 | | | |
| | IDENTITY | 30% | 46% | | | 30% | | 100% | 45% | 31% | | | |
| | COVERAGE | 85% | 100% | | | 82% | | 100% | 99% | 79% | | | |
| SAU101752 | SeqID | 10438 | 10626 | 11037 | 11410 | | 11997 | 12447 | 13187 | 14043 | | | |
| | IDENTITY | 46% | 75% | 47% | 40% | | 45% | 100% | 69% | 46% | | | |
| | COVERAGE | 115% | 99% | 114% | 120% | | 116% | 100% | 99% | 115% | | | |
| SAU101754 | SeqID | 10439 | 10627 | 11036 | 11571 | | 5179 | 12446 | 13646 | 14042 | | | |
| | IDENTITY | 46% | 72% | 46% | 53% | | 46% | 100% | 68% | 46% | | | |
| | COVERAGE | 116% | 100% | 117% | 80% | | 118% | 100% | 101% | 116% | | | |
| SAU101756 | SeqID | 10365 | 10479 | 11062 | 11409 | | 5178 | 12445 | 13231 | 13967 | | | |
| | IDENTITY | 65% | 83% | 66% | 65% | | 68% | 100% | 82% | 65% | | | |
| | COVERAGE | 91% | 93% | 91% | 91% | | 91% | 101% | 93% | 93% | | | |
| SAU101771 | SeqID | 10220 | 10784 | 11276 | | 11765 | 11950 | 12350 | 13280 | 13934 | | | |
| | IDENTITY | 43% | 65% | 37% | | 35% | 36% | 100% | 67% | 41% | | | |
| | COVERAGE | 91% | 101% | 77% | | 82% | 80% | 101% | 98% | 91% | | | |
| SAU101772 | SeqID | 10240 | 10785 | 11275 | 11294 | | 11925 | 12351 | 13281 | 13863 | | | |
| | IDENTITY | 50% | 63% | 51% | 27% | | 38% | 100% | 61% | 48% | | | |
| | COVERAGE | 100% | 101% | 100% | 77% | | 100% | 100% | 101% | 84% | | | |
| SAU101777 | SeqID | | 10673 | | 11448 | | | 12352 | 13176 | | | | |
| | IDENTITY | | 64% | | 43% | | | 100% | 62% | | | | |
| | COVERAGE | | 97% | | 88% | | | 100% | 98% | | | | |
| SAU101781 | SeqID | | 10495 | | | | 11917 | 12353 | 13308 | | | | |
| | IDENTITY | | 67% | | | | 38% | 100% | 28% | | | | |
| | COVERAGE | | | 99% | | | | 93% | 100% | 85% | | | |
| SAU101782 | SeqID | | 10496 | | | 11689 | 11916 | 12354 | 13309 | | | | |
| | IDENTITY | | 75% | | | 44% | 41% | 100% | 40% | | | | |
| | COVERAGE | | 100% | | | 89% | 99% | 100% | 96% | | | | |
| SAU101784 | SeqID | 10037 | 10498 | 11208 | | 11700 | 11866 | 12355 | 13563 | 13900 | | | |
| | IDENTITY | 44% | 65% | 45% | | 35% | 42% | 100% | 37% | 44% | | | |
| | COVERAGE | 97% | 100% | 97% | | 92% | 99% | 100% | 99% | 97% | | | |
| SAU101790 | SeqID | 10350 | 10524 | 11106 | 11437 | | 5170 | 12215 | 13207 | | | | |
| | IDENTITY | 51% | 81% | 55% | 48% | | 55% | 100% | 79% | | | | |
| | COVERAGE | 86% | 99% | 86% | 86% | | 90% | 101% | 99% | | | | |
| SAU101791 | SeqID | 10349 | 10525 | 11107 | 11436 | | 5169 | 12216 | 13208 | 14108 | | | |
| | IDENTITY | 67% | 90% | 69% | 62% | | 66% | 100% | 89% | 67% | | | |
| | COVERAGE | 101% | 101% | 101% | 100% | | 100% | 101% | 101% | 102% | | | |
| SAU101792 | SeqID | 10348 | 10526 | 11108 | | | 5168 | 12217 | 13209 | 14107 | | | |
| | IDENTITY | 53% | 66% | 52% | | | 49% | 100% | 68% | 50% | | | |
| | COVERAGE | 96% | 94% | 95% | | | 97% | 101% | 94% | 96% | | | |
| SAU101793 | SeqID | 10347 | 10527 | 11109 | 11589 | 11654 | 5167 | 12218 | 13210 | 14106 | | | |
| | IDENTITY | 64% | 85% | 65% | 51% | 64% | 63% | 100% | 79% | 64% | | | |
| | COVERAGE | 100% | 101% | 99% | 99% | 101% | 99% | 101% | 100% | 101% | | | |
| SAU101795 | SeqID | 10345 | 10528 | 11111 | 11435 | | 5165 | 12219 | 13212 | 14104 | | | |
| | IDENTITY | 51% | 79% | 47% | 44% | | 44% | 100% | 76% | 51% | | | |
| | COVERAGE | 99% | 101% | 99% | 98% | | 100% | 101% | 101% | 101% | | | |
| SAU101797 | SeqID | 10343 | 10530 | 11113 | 11433 | | 5163 | 12221 | 13214 | 14102 | | | |
| | IDENTITY | 45% | 68% | 41% | 41% | | 48% | 100% | 66% | 46% | | | |
| | COVERAGE | 100% | 101% | 99% | 93% | | 96% | 101% | 101% | 101% | | | |
| SAU101798 | SeqID | 10342 | 10531 | 11114 | 11432 | | 5162 | 12222 | 13215 | 14101 | | | |
| | IDENTITY | 55% | 72% | 55% | 62% | | 52% | 100% | 66% | 55% | | | |
| | COVERAGE | 99% | 95% | 99% | 87% | | 99% | 101% | 96% | 99% | | | |
| SAU101799 | SeqID | 10341 | 10532 | 11115 | | | 5161 | 12223 | 13216 | | | | |
| | IDENTITY | 51% | 62% | 42% | | | 42% | 100% | 69% | | | | |
| | COVERAGE | 100% | 102% | 100% | | | 97% | 102% | 98% | | | | |
| SAU101800 | SeqID | 10340 | 10534 | 11116 | 11431 | | 5160 | 12225 | 13217 | 14099 | | | |
| | IDENTITY | 47% | 79% | 46% | 40% | | 42% | 100% | 84% | 47% | | | |
| | COVERAGE | 99% | 101% | 99% | 90% | | 99% | 101% | 101% | 99% | | | |
| SAU101802 | SeqID | 10075 | 10536 | 11008 | 11348 | 11633 | 11942 | 12227 | 13219 | 13717 | | | |
| | IDENTITY | 48% | 64% | 52% | 31% | 47% | 53% | 100% | 56% | 47% | | | |
| | COVERAGE | 97% | 97% | 97% | 93% | 97% | 84% | 100% | 96% | 97% | | | |
| SAU101803 | SeqID | 10111 | 10537 | 11052 | 11429 | 11651 | 11876 | 12228 | 13220 | 14010 | | | |
| | IDENTITY | 71% | 84% | 71% | 60% | 70% | 71% | 100% | 82% | 70% | | | |
| | COVERAGE | 97% | 101% | 97% | 100% | 101% | 97% | 101% | 101% | 101% | | | |
| SAU101805 | SeqID | 10337 | 10539 | 11119 | 11427 | | 11990 | 12229 | 13221 | 14097 | | | |
| | IDENTITY | 53% | 75% | 52% | 58% | | 60% | 100% | 74% | 52% | | | |
| | COVERAGE | 96% | 101% | 99% | 99% | | 96% | 101% | 101% | 96% | | | |
| SAU101806 | SeqID | 10336 | 10540 | 11120 | 11426 | | 11989 | 12230 | 13222 | 14096 | | | |
| | IDENTITY | 62% | 85% | 64% | 60% | | 61% | 100% | 85% | 63% | | | |
| | COVERAGE | 100% | 101% | 100% | 102% | | 100% | 101% | 92% | 101% | | | |
| SAU101807 | SeqID | 10334 | 10541 | 11122 | 11583 | | 11987 | 12231 | 13223 | 14094 | | | |
| | IDENTITY | 42% | 71% | 42% | 37% | | 42% | 100% | 58% | 42% | | | |
| | COVERAGE | 99% | 100% | 99% | 94% | | 99% | 100% | 99% | 99% | | | |
| SAU101808 | SeqID | 10333 | 10542 | 11123 | 11582 | 11627 | 5158 | 12232 | 13224 | 14093 | | | |
| | IDENTITY | 48% | 65% | 49% | 46% | 48% | 45% | 100% | 67% | 48% | | | |
| | COVERAGE | 98% | 103% | 98% | 99% | 78% | 98% | 101% | 106% | 98% | | | |
| SAU101810 | SeqID | 10053 | 10544 | 11229 | 11625 | 11666 | 11909 | 12233 | 13441 | 14110 | | | |
| | IDENTITY | 35% | 52% | 34% | 32% | 36% | 33% | 100% | 47% | 36% | | | |
| | COVERAGE | 76% | 88% | 78% | 77% | 73% | 72% | 100% | 88% | 73% | | | |
| SAU101811 | SeqID | 10196 | 10545 | 11068 | 11463 | 11666 | 11888 | 12234 | 13440 | 13721 | | | |
| | IDENTITY | 38% | 49% | 33% | 32% | 33% | 32% | 100% | 45% | 34% | | | |
| | COVERAGE | 78% | 87% | 82% | 82% | 83% | 82% | 100% | 87% | 76% | | | |
| SAU101814 | SeqID | 10327 | 10602 | 11241 | 11471 | 11655 | 5188 | 12237 | 13356 | 13729 | | | |
| | IDENTITY | 58% | 69% | 57% | 47% | 56% | 55% | 100% | 65% | 56% | | | |
| | COVERAGE | 94% | 96% | 94% | 92% | 71% | 97% | 101% | 99% | 94% | | | |
| SAU101815 | SeqID | 10326 | | 11240 | 11288 | | 12016 | 12238 | 13361 | 13732 | | | |
| | IDENTITY | 49% | | 48% | 46% | | 53% | 100% | 69% | 51% | | | |
| | COVERAGE | 98% | | 98% | 93% | | 93% | 101% | 99% | 99% | | | |
| SAU101818 | SeqID | | | 11231 | 11307 | | 11814 | 12369 | 13494 | | | | |
| | IDENTITY | | | 32% | 33% | | 31% | 100% | 35% | | | | |
| | COVERAGE | | | 95% | 90% | | 96% | 101% | 93% | | | | |
| SAU101824 | SeqID | 10158 | | | | | 12004 | 12371 | | | | | |
| | IDENTITY | 33% | | | | | 28% | 100% | | | | | |
| | COVERAGE | 71% | | | | | 75% | 100% | | | | | |
| SAU101833 | SeqID | 10207 | 10747 | 11040 | 11481 | | 11794 | 12373 | 13388 | 13775 | | | |
| | IDENTITY | 42% | 49% | 28% | 44% | | 35% | 100% | 46% | 44% | | | |
| | COVERAGE | 100% | 102% | 95% | 107% | | 117% | 100% | 103% | 89% | | | |
| SAU101839 | SeqID | 10398 | 10849 | 11236 | | | 12100 | 12495 | 13291 | 13924 | | | |
| | IDENTITY | 30% | 33% | 32% | | | 25% | 100% | 32% | 28% | | | |
| | COVERAGE | 94% | 78% | 90% | | | 98% | 100% | 83% | 94% | | | |
| SAU101842 | SeqID | 10105 | 10942 | 11075 | 11376 | 11723 | 11855 | 12510 | 13445 | 13999 | | | |
| | IDENTITY | 45% | 70% | 33% | 48% | 33% | 47% | 100% | 65% | 45% | | | |
| | COVERAGE | 98% | 95% | 95% | 99% | 94% | 97% | 100% | 82% | 99% | | | |
| SAU101845 | SeqID | 10231 | 10739 | | 11567 | | 11899 | 12506 | 13544 | 13953 | | | |
| | IDENTITY | 30% | 47% | | 40% | | 26% | 100% | 43% | 28% | | | |
| | COVERAGE | 101% | 102% | | 102% | | 101% | 100% | 102% | 101% | | | |
| SAU101849 | SeqID | 10015 | 10740 | 11209 | 11472 | | 12058 | 12567 | 13379 | 13713 | | | |
| | IDENTITY | 56% | 77% | 54% | 56% | | 56% | 100% | 75% | 56% | | | |
| | COVERAGE | 103% | 99% | 103% | 101% | | 103% | 100% | 98% | 104% | | | |
| SAU101857 | SeqID | | | | | | | 12569 | | | | | |
| | IDENTITY | | | | | | | 100% | | | | | |
| | COVERAGE | | | | | | | 100% | | | | | |
| SAU101862 | SeqID | 10257 | 10817 | 10955 | 11334 | | 11802 | 12571 | 13305 | 13797 | | | |
| | IDENTITY | 40% | 63% | 40% | 33% | | 39% | 100% | 62% | 39% | | | |
| | COVERAGE | 98% | 100% | 98% | 101% | | 98% | 100% | 99% | 98% | | | |
| SAU101864 | SeqID | | | | | | | 12572 | | | | | |
| | IDENTITY | | | | | | | 100% | | | | | |
| | COVERAGE | | | | | | | 100% | | | | | |
| SAU101865 | SeqID | 10044 | 10834 | 11151 | 11417 | | 11938 | 12318 | 13227 | 13910 | | | |
| | IDENTITY | 43% | 58% | 45% | 40% | | 40% | 100% | 54% | 41% | | | |
| | COVERAGE | 85% | 88% | 88% | 87% | | 87% | 100% | 88% | 88% | | | |
| SAU101866 | SeqID | | 10835 | | | | 11873 | 12319 | 13586 | | | | |
| | IDENTITY | | 42% | | | | 29% | 100% | 40% | | | | |
| | COVERAGE | | 102% | | | | 99% | 100% | 100% | | | | |
| SAU101868 | SeqID | 10049 | 10733 | 11086 | 11305 | | 11813 | 12320 | 13228 | 13898 | | | |
| | IDENTITY | 45% | 56% | 45% | 42% | | 48% | 100% | 49% | 45% | | | |
| | COVERAGE | 101% | 99% | 101% | 96% | | 100% | 100% | 108% | 99% | | | |
| SAU101869 | SeqID | | 10734 | | | | | 12321 | 13668 | | | | |
| | IDENTITY | | 55% | | | | | 100% | 49% | | | | |
| | COVERAGE | | 100% | | | | | 100% | 101% | | | | |
| SAU101876 | SeqID | | | | | | | 12169 | | | | | |
| | IDENTITY | | | | | | | 100% | | | | | |
| | COVERAGE | | | | | | | 101% | | | | | |
| SAU101881 | SeqID | 10325 | | | | | 12081 | 12162 | | 13728 | | | |
| | IDENTITY | 42% | | | | | 41% | 100% | | 42% | | | |
| | COVERAGE | 98% | | | | | 97% | 100% | | 98% | | | |
| SAU101882 | SeqID | 10246 | 10824 | | | 11743 | 12080 | 12163 | | 13727 | | | |
| | IDENTITY | 33% | 30% | | | 31% | 31% | 100% | | 33% | | | |
| | COVERAGE | 96% | 89% | | | 73% | 94% | 100% | | 95% | | | |
| SAU101890 | SeqID | 10374 | | 11125 | | | 12091 | 12280 | | 13809 | | | |
| | IDENTITY | 53% | | 49% | | | 47% | 100% | | 53% | | | |
| | COVERAGE | 91% | | 92% | | | 93% | 100% | | 91% | | | |
| SAU101891 | SeqID | 10295 | 10766 | 11196 | 11483 | | 11791 | 12281 | 13413 | 13739 | | | |
| | IDENTITY | 63% | 72% | 62% | 60% | | 58% | 100% | 67% | 64% | | | |
| | COVERAGE | 91% | 91% | 90% | 90% | | 93% | 100% | 92% | 91% | | | |
| SAU101893 | SeqID | 10300 | 10724 | | | 11748 | 11981 | 12282 | 13290 | 13825 | | | |
| | IDENTITY | 46% | 47% | | | 41% | 35% | 100% | 40% | 43% | | | |
| | COVERAGE | 87% | 100% | | | 78% | 93% | 100% | 95% | 96% | | | |
| SAU101904 | SeqID | 10047 | 10648 | 11089 | 11451 | | 11935 | 12617 | 13345 | 13913 | | | |
| | IDENTITY | 34% | 38% | 33% | 31% | | 31% | 100% | 34% | 33% | | | |
| | COVERAGE | 98% | 101% | 102% | 105% | | 104% | 100% | 93% | 98% | | | |
| SAU101907 | SeqID | 10362 | 10482 | 11059 | 11415 | | 11995 | 12442 | 13171 | 13964 | | | |
| | IDENTITY | 75% | 90% | 76% | 74% | | 73% | 100% | 75% | 74% | | | |
| | COVERAGE | 100% | 101% | 100% | 101% | | 101% | 100% | 101% | 100% | | | |
| SAU101909 | SeqID | 10390 | | 11249 | 11346 | | 11789 | 12441 | | 14063 | | | |
| | IDENTITY | 41% | | 32% | 29% | | 36% | 100% | | 32% | | | |
| | COVERAGE | 99% | | 88% | 90% | | 93% | 100% | | 73% | | | |
| SAU101910 | SeqID | 10199 | | | | | 11818 | 12440 | | | | | |
| | IDENTITY | 56% | | | | | 60% | 100% | | | | | |
| | COVERAGE | 97% | | | | | 97% | 100% | | | | | |
| SAU101915 | SeqID | | 10838 | | | | | 12439 | | | | | |
| | IDENTITY | | 26% | | | | | 100% | | | | | |
| | COVERAGE | | 90% | | | | | 100% | | | | | |
| SAU101922 | SeqID | | | | | | | 12438 | | | | | |
| | IDENTITY | | | | | | | 100% | | | | | |
| | COVERAGE | | | | | | | 100% | | | | | |
| SAU101948 | SeqID | | | | | | | 12709 | | | | | |
| | IDENTITY | | | | | | | 100% | | | | | |
| | COVERAGE | | | | | | | 100% | | | | | |
| SAU101966 | SeqID | 10101 | 10561 | 11007 | 11538 | 11705 | 11897 | 12186 | | 14003 | | | |
| | IDENTITY | 45% | 31% | 32% | 37% | 43% | 45% | 100% | | 45% | | | |
| | COVERAGE | 88% | 91% | 92% | 86% | 88% | 88% | 101% | | 88% | | | |
| SAU101968 | SeqID | 10106 | 10568 | 11242 | 11480 | | 11965 | 12187 | | 13998 | | | |
| | IDENTITY | 30% | 31% | 33% | 27% | | 30% | 100% | | 31% | | | |
| | COVERAGE | 90% | 92% | 90% | 88% | | 83% | 100% | | 76% | | | |
| SAU101991 | SeqID | | 10938 | | | | | 12454 | 13500 | | | | |
| | IDENTITY | | 40% | | | | | 100% | 25% | | | | |
| | COVERAGE | | 101% | | | | | 101% | 80% | | | | |
| SAU101995 | SeqID | 10388 | 10939 | 11066 | 11575 | 11646 | 11957 | 12455 | 13386 | | | | |
| | IDENTITY | 46% | 47% | 49% | 58% | 46% | 57% | 100% | 51% | | | | |
| | COVERAGE | 72% | 78% | 73% | 72% | 72% | 76% | 100% | 74% | | | | |
| SAU101996 | SeqID | 10237 | 10940 | 10999 | 11325 | | 11901 | 12456 | 13455 | 13956 | | | |
| | IDENTITY | 38% | 64% | 36% | 38% | | 35% | 100% | 58% | 37% | | | |
| | COVERAGE | 98% | 99% | 98% | 98% | | 99% | 100% | 100% | 98% | | | |
| SAU101999 | SeqID | 10476 | 10941 | 11259 | 11304 | | 12035 | 12423 | 13241 | 13708 | | | |
| | IDENTITY | 48% | 61% | 46% | 49% | | 51% | 100% | 64% | 48% | | | |
| | COVERAGE | 97% | 98% | 98% | 91% | | 96% | 100% | 97% | 97% | | | |
| SAU102001 | SeqID | 10258 | 10628 | 11134 | 11489 | | 11787 | 12424 | 13636 | 14088 | | | |
| | IDENTITY | 47% | 58% | 47% | 43% | | 49% | 100% | 46% | 47% | | | |
| | COVERAGE | 105% | 98% | 106% | 105% | | 98% | 100% | 98% | 105% | | | |
| SAU102002 | SeqID | | | | | | | 12425 | | | | | |
| | IDENTITY | | | | | | | 100% | | | | | |
| | COVERAGE | | | | | | | 100% | | | | | |
| SAU102003 | SeqID | | | | | | | 12426 | | | | | |
| | IDENTITY | | | | | | | 100% | | | | | |
| | COVERAGE | | | | | | | 101% | | | | | |
| SAU102006 | SeqID | | | 11267 | 11555 | | | 12427 | 13260 | | | | |
| | IDENTITY | | | 44% | 28% | | | 100% | 47% | | | | |
| | COVERAGE | | | 92% | 74% | | | 101% | 105% | | | | |
| SAU102007 | SeqID | | | 11266 | | | | 12428 | 13258 | | | | |
| | IDENTITY | | | 60% | | | | 100% | 61% | | | | |
| | COVERAGE | | | 97% | | | | 100% | 97% | | | | |
| SAU102032 | SeqID | | | | | | 12086 | 12198 | | 13989 | | | |
| | IDENTITY | | | | | | 62% | 100% | | 58% | | | |
| | COVERAGE | | | | | | 99% | 100% | | 75% | | | |
| SAU102035 | SeqID | 10299 | 10933 | 10974 | 11514 | | 11860 | 12199 | 13360 | 13763 | | | |
| | IDENTITY | 60% | 50% | 26% | 29% | | 41% | 100% | 31% | 56% | | | |
| | COVERAGE | 98% | 99% | 85% | 84% | | 97% | 100% | 86% | 99% | | | |
| SAU102044 | SeqID | 10141 | 10916 | 11011 | 11344 | | 12041 | 12414 | 13447 | 13977 | | | |
| | IDENTITY | 56% | 67% | 59% | 50% | | 58% | 100% | 69% | 56% | | | |
| | COVERAGE | 100% | 102% | 100% | 101% | | 101% | 100% | 102% | 100% | | | |
| SAU102046 | SeqID | 10103 | 10723 | | | | 12089 | 12415 | | 14001 | | | |
| | IDENTITY | 32% | 28% | | | | 29% | 100% | | 29% | | | |
| | COVERAGE | 74% | 86% | | | | 90% | 100% | | 89% | | | |
| SAU102049 | SeqID | 10427 | 10518 | 10962 | 11291 | | 11784 | 12416 | 13652 | 13781 | | | |
| | IDENTITY | 36% | 39% | 49% | 40% | | 41% | 100% | 46% | 36% | | | |
| | COVERAGE | 101% | 99% | 97% | 99% | | 100% | 100% | 98% | 101% | | | |
| SAU102054 | SeqID | 10280 | 10494 | 11095 | 11356 | 11676 | 11856 | 12417 | | 13877 | | | |
| | IDENTITY | 53% | 50% | 55% | 51% | 53% | 55% | 100% | | 53% | | | |
| | COVERAGE | 100% | 79% | 100% | 100% | 70% | 100% | 100% | | 100% | | | |
| SAU102059 | SeqID | 10085 | 10771 | 11152 | 11622 | | 11969 | 12286 | 13226 | 14059 | | | |
| | IDENTITY | 43% | 72% | 43% | 40% | | 41% | 100% | 72% | 40% | | | |
| | COVERAGE | 107% | 100% | 107% | 102% | | 109% | 100% | 71% | 89% | | | |
| SAU102067 | SeqID | 10380 | 10564 | 11155 | | | 11795 | 12287 | 13407 | 13798 | | | |
| | IDENTITY | 32% | 52% | 31% | | | 28% | 100% | 44% | 31% | | | |
| | COVERAGE | 95% | 98% | 98% | | | 97% | 100% | 98% | 94% | | | |
| SAU102068 | SeqID | | 10680 | | | | | 12288 | | | | | |
| | IDENTITY | | 29% | | | | | 100% | | | | | |
| | COVERAGE | | 101% | | | | | 100% | | | | | |
| SAU102102 | SeqID | | | | | | | 12696 | | | | | |
| | IDENTITY | | | | | | | 100% | | | | | |
| | COVERAGE | | | | | | | 100% | | | | | |
| SAU102113 | SeqID | | 10641 | | | | | 12178 | | | | | |
| | IDENTITY | | 34% | | | | | 100% | | | | | |
| | COVERAGE | | 110% | | | | | 101% | | | | | |
| SAU102116 | SeqID | | 10642 | | | | | 12180 | 13480 | | | | |
| | IDENTITY | | 29% | | | | | 100% | 31% | | | | |
| | COVERAGE | | 85% | | | | | 100% | 81% | | | | |
| SAU102117 | SeqID | 10016 | 10643 | | 11604 | | 12027 | 12181 | 13481 | 13947 | | | |
| | IDENTITY | 43% | 61% | | 38% | | 42% | 100% | 55% | 41% | | | |
| | COVERAGE | 101% | 100% | | 102% | | 103% | 100% | 100% | 85% | | | |
| SAU102129 | SeqID | | 10859 | | | | | 12176 | 13400 | | | | |
| | IDENTITY | | 60% | | | | | 100% | 56% | | | | |
| | COVERAGE | | 98% | | | | | 100% | 99% | | | | |
| SAU102132 | SeqID | | 10760 | | | | | 12177 | 13304 | | | | |
| | IDENTITY | | 39% | | | | | 100% | 41% | | | | |
| | COVERAGE | | 101% | | | | | 100% | 101% | | | | |
| SAU102142 | SeqID | 10154 | | | | | | 12457 | | | | | |
| | IDENTITY | 37% | | | | | | 100% | | | | | |
| | COVERAGE | 99% | | | | | | 100% | | | | | |
| SAU102143 | SeqID | 10154 | | | | | | 12458 | | | | | |
| | IDENTITY | 32% | | | | | | 100% | | | | | |
| | COVERAGE | 100% | | | | | | 100% | | | | | |
| SAU102144 | SeqID | | | | | | | 12459 | | | | | |
| | IDENTITY | | | | | | | 100% | | | | | |
| | COVERAGE | | | | | | | 100% | | | | | |
| SAU102162 | SeqID | | | | | | | 12462 | | | | | |
| | IDENTITY | | | | | | | 100% | | | | | |
| | COVERAGE | | | | | | | 100% | | | | | |
| SAU102165 | SeqID | | | | | | | 12460 | | | | | |
| | IDENTITY | | | | | | | 100% | | | | | |
| | COVERAGE | | | | | | | 100% | | | | | |
| SAU102200 | SeqID | | | | | | | 12665 | | | | | |
| | IDENTITY | | | | | | | 100% | | | | | |
| | COVERAGE | | | | | | | | 101% | | | | |
| SAU102201 | SeqID | | | | | | | 12666 | | | | | |
| | IDENTITY | | | | | | | 100% | | | | | |
| | COVERAGE | | | | | | | 101% | | | | | |
| SAU102222 | SeqID | 10447 | 10797 | 10994 | 11358 | | 11986 | 12511 | 13192 | 13818 | | | |
| | IDENTITY | 58% | 68% | 58% | 52% | | 59% | 100% | 67% | 58% | | | |
| | COVERAGE | 99% | 99% | 99% | 99% | | 99% | 100% | 99% | 99% | | | |
| SAU102231 | SeqID | 10323 | 10798 | 11193 | | | 12020 | 12527 | 13561 | 13731 | | | |
| | IDENTITY | 41% | 50% | 42% | | | 38% | 100% | 46% | 41% | | | |
| | COVERAGE | 94% | 93% | 89% | | | 94% | 100% | 99% | 94% | | | |
| SAU102232 | SeqID | 10100 | 10799 | | | 11687 | | 12530 | 13562 | 14004 | | | |
| | IDENTITY | 36% | 40% | | | 35% | | 100% | 42% | 34% | | | |
| | COVERAGE | 75% | 79% | | | 74% | | 100% | 79% | 75% | | | |
| SAU102233 | SeqID | | 10800 | | | | | 12531 | 13496 | | | | |
| | IDENTITY | | 61% | | | | | 100% | 45% | | | | |
| | COVERAGE | | 98% | | | | | 100% | 91% | | | | |
| SAU102241 | SeqID | 10163 | 10845 | | | | | 12539 | | | | | |
| | IDENTITY | 28% | 43% | | | | | 100% | | | | | |
| | COVERAGE | 74% | 99% | | | | | 100% | | | | | |
| SAU102242 | SeqID | 10188 | 10847 | 10953 | 11600 | 11634 | 11907 | 12540 | 13593 | 13981 | | | |
| | IDENTITY | 47% | 72% | 44% | 38% | 47% | 47% | 100% | 70% | 47% | | | |
| | COVERAGE | 100% | 99% | 101% | 100% | 98% | 100% | 100% | 100% | 100% | | | |
| SAU102246 | SeqID | 10274 | 10854 | 11154 | 11476 | | 11932 | 12542 | 13313 | 13866 | | | |
| | IDENTITY | 59% | 74% | 60% | 54% | | 62% | 100% | 81% | 58% | | | |
| | COVERAGE | 99% | 100% | 97% | 96% | | 100% | 100% | 101% | 99% | | | |
| SAU102247 | SeqID | | | | | | | 12543 | 13180 | | | | |
| | IDENTITY | | | | | | | 100% | 28% | | | | |
| | COVERAGE | | | | | | | 101% | 74% | | | | |
| SAU102252 | SeqID | 10300 | 10677 | | | 11748 | 11981 | 12241 | 13290 | 13825 | | | |
| | IDENTITY | 39% | 48% | | | 39% | 37% | 100% | 43% | 41% | | | |
| | COVERAGE | 79% | 93% | | | 73% | 91% | 100% | 95% | 98% | | | |
| SAU102256 | SeqID | 10451 | | | 11515 | | | 12243 | 13531 | | | | |
| | IDENTITY | 33% | | | 32% | | | 100% | 75% | | | | |
| | COVERAGE | 97% | | | 97% | | | 101% | 101% | | | | |
| SAU102257 | SeqID | 10451 | | | 11515 | | | 12244 | 13274 | | | | |
| | IDENTITY | 38% | | | 29% | | | 100% | 85% | | | | |
| | COVERAGE | 81% | | | 75% | | | 101% | 101% | | | | |
| SAU102259 | SeqID | | 10844 | | | | | 12245 | 13519 | 13782 | | | |
| | IDENTITY | | 65% | | | | | 100% | 72% | 25% | | | |
| | COVERAGE | | 97% | | | | | 100% | 97% | 87% | | | |
| SAU102260 | SeqID | 10182 | 10646 | | | 11682 | | 12246 | 13275 | 13984 | | | |
| | IDENTITY | 34% | 37% | | | 32% | | 100% | 83% | 32% | | | |
| | COVERAGE | 96% | 87% | | | 96% | | 101% | 100% | 87% | | | |
| SAU102261 | SeqID | 10183 | 10731 | | | | | 12247 | 13276 | 13983 | | | |
| | IDENTITY | 25% | 30% | | | | | 100% | 74% | 26% | | | |
| | COVERAGE | 79% | 80% | | | | | 100% | 99% | 79% | | | |
| SAU102262 | SeqID | 10270 | 10759 | | | 11724 | | 12248 | 13277 | 13881 | | | |
| | IDENTITY | 35% | 39% | | | 31% | | 100% | 82% | 34% | | | |
| | COVERAGE | 104% | 103% | | | | 84% | | 100% | 100% | 104% | | |
| SAU102264 | SeqID | 10160 | | | | | 5103 | 12250 | | 13830 | | | |
| | IDENTITY | 45% | | | | | 44% | 100% | | 43% | | | |
| | COVERAGE | 100% | | | | | 100% | 100% | | 101% | | | |
| SAU102265 | SeqID | | | | | | 11926 | 12251 | | | | | |
| | IDENTITY | | | | | | 37% | 100% | | | | | |
| | COVERAGE | | | | | | 100% | 100% | | | | | |
| SAU102268 | SeqID | | | | | | | 12252 | | | | | |
| | IDENTITY | | | | | | | 100% | | | | | |
| | COVERAGE | | | | | | | 101% | | | | | |
| SAU102270 | SeqID | | | | | | | 12253 | | | | | |
| | IDENTITY | | | | | | | 100% | | | | | |
| | COVERAGE | | | | | | | 100% | | | | | |
| SAU102280 | SeqID | | | | | | | 12378 | | | | | |
| | IDENTITY | | | | | | | 100% | | | | | |
| | COVERAGE | | | | | | | 100% | | | | | |
| SAU102281 | SeqID | 10316 | | 11227 | 11469 | | 12054 | 12384 | 13497 | 13762 | | | |
| | IDENTITY | 45% | | 48% | 39% | | 45% | 100% | 61% | 44% | | | |
| | COVERAGE | 99% | | 99% | 100% | | 99% | 100% | 100% | 99% | | | |
| SAU102283 | SeqID | 10260 | 10875 | 10982 | 11560 | | 11945 | 12119 | 13251 | 14086 | | | |
| | IDENTITY | 41% | 59% | 43% | 41% | | 41% | 100% | 54% | 41% | | | |
| | COVERAGE | 88% | 88% | 88% | 92% | | 95% | 102% | 88% | 88% | | | |
| SAU102284 | SeqID | | | | | | | 12389 | | | | | |
| | IDENTITY | | | | | | | 100% | | | | | |
| | COVERAGE | | | | | | | 100% | | | | | |
| SAU102286 | SeqID | 10385 | 10595 | | | | | 12393 | 13688 | | | | |
| | IDENTITY | 37% | 42% | | | | | 100% | 39% | | | | |
| | COVERAGE | 104% | 99% | | | | | 100% | 101% | | | | |
| SAU102287 | SeqID | 10220 | 10594 | 11025 | | 11663 | 11925 | 12398 | 13427 | 13934 | | | |
| | IDENTITY | 42% | 45% | 40% | | 39% | 41% | 100% | 41% | 39% | | | |
| | COVERAGE | 81% | 95% | 88% | | 89% | 84% | 101% | 94% | 83% | | | |
| SAU102292 | SeqID | 10399 | 10579 | 11018 | 11455 | 11758 | 12111 | 12368 | 13230 | 14065 | | | |
| | IDENTITY | 41% | 59% | 40% | 37% | 41% | 42% | 100% | 57% | 41% | | | |
| | COVERAGE | 101% | 100% | 101% | 100% | 101% | 101% | 100% | 94% | 101% | | | |
| SAU102294 | SeqID | | | | | | | 12610 | | | | | |
| | IDENTITY | | | | | | | 100% | | | | | |
| | COVERAGE | | | | | | | 100% | | | | | |
| SAU102297 | SeqID | 10405 | 10912 | 11063 | 11303 | | 12117 | 12704 | 13686 | 14066 | | | |
| | IDENTITY | 52% | 66% | 51% | 46% | | 50% | 100% | 64% | 48% | | | |
| | COVERAGE | 99% | 100% | 100% | 99% | | 98% | 100% | 100% | 77% | | | |
| SAU102298 | SeqID | 10404 | 10914 | 11031 | | 11686 | 12116 | 12705 | 13255 | | | | |
| | IDENTITY | 36% | 62% | 33% | | 35% | 28% | 100% | 54% | | | | |
| | COVERAGE | 72% | 99% | 87% | 89% | 87% | | 100% | 100% | | | | |
| SAU102308 | SeqID | 10077 | 10577 | 11248 | 11625 | 11732 | 12032 | 12706 | 13350 | 13995 | | | |
| | IDENTITY | 38% | 46% | 37% | 33% | 39% | 38% | 100% | 45% | 39% | | | |
| | COVERAGE | 88% | 100% | 86% | 87% | 88% | 90% | 100% | 100% | 95% | | | |
| SAU102318 | SeqID | 10122 | 10795 | | | | 11806 | 12707 | 13242 | 14039 | | | |
| | IDENTITY | 32% | 75% | | | | 37% | 100% | 63% | 31% | | | |
| | COVERAGE | 90% | 97% | | | | 72% | 100% | 97% | 89% | | | |
| SAU102333 | SeqID | 10057 | 10550 | | | | 12102 | 12657 | 13316 | 13829 | | | |
| | IDENTITY | 41% | 43% | | | | 40% | 100% | 31% | 38% | | | |
| | COVERAGE | 96% | 97% | | | | 96% | 100% | 90% | 95% | | | |
| SAU102334 | SeqID | 10056 | | | | | 12101 | 12658 | | | | | |
| | IDENTITY | 50% | | | | | 50% | 100% | | | | | |
| | COVERAGE | 91% | | | | | 92% | 100% | | | | | |
| SAU102336 | SeqID | | | | | | | 12659 | | | | | |
| | IDENTITY | | | | | | | 100% | | | | | |
| | COVERAGE | | | | | | | 101% | | | | | |
| SAU102340 | SeqID | | | | | | | 12660 | | | | | |
| | IDENTITY | | | | | | | 100% | | | | | |
| | COVERAGE | | | | | | | 100% | | | | | |
| SAU102345 | SeqID | | | | | | 11843 | 12655 | | | | | |
| | IDENTITY | | | | | | 37% | 100% | | | | | |
| | COVERAGE | 86% | | | | | | 101% | | | | | |
| SAU102350 | SeqID | | | | | | | 12433 | | | | | |
| | IDENTITY | | | | | | | 100% | | | | | |
| | COVERAGE | | | | | | | 101% | | | | | |
| SAU102352 | SeqID | | 10657 | | | | | 12434 | 13426 | | | | |
| | IDENTITY | | 55% | | | | | 100% | 39% | | | | |
| | COVERAGE | | 100% | | | | | 100% | 91% | | | | |
| SAU102355 | SeqID | | 10726 | | | | | 12435 | | | | | |
| | IDENTITY | | 39% | | | | | 100% | | | | | |
| | COVERAGE | | 87% | | | | | 100% | | | | | |
| SAU102356 | SeqID | 10227 | 10669 | 11203 | 11546 | | 11805 | 12436 | 13324 | 13960 | | | |
| | IDENTITY | 43% | 60% | 45% | 48% | | 43% | 100% | 56% | 43% | | | |
| | COVERAGE | 95% | 100% | 95% | 98% | | 95% | 100% | 99% | 95% | | | |
| SAU102378 | SeqID | | | | | | | 12437 | | | | | |
| | IDENTITY | | | | | | | 100% | | | | | |
| | COVERAGE | | | | | | | 100% | | | | | |
| SAU102380 | SeqID | | | | | | 11870 | 12265 | | | | | |
| | IDENTITY | | | | | | 32% | 100% | | | | | |
| | COVERAGE | | | | | | 71% | 100% | | | | | |
| SAU102388 | SeqID | 10367 | | 11157 | 11386 | | 11808 | 12267 | | 13802 | | | |
| | IDENTITY | 36% | | 33% | 27% | | 39% | 100% | | 36% | | | |
| | COVERAGE | 96% | | 90% | 101% | | 99% | 100% | | 96% | | | |
| SAU102389 | SeqID | 10063 | 10547 | 10988 | | | 11837 | 12268 | 13395 | 13917 | | | |
| | IDENTITY | 33% | 59% | 31% | | | 36% | 100% | 35% | 33% | | | |
| | COVERAGE | 99% | 97% | 97% | | | 95% | 100% | 98% | 99% | | | |
| SAU102390 | SeqID | 10192 | | | | 11678 | | 12269 | | 13753 | | | |
| | IDENTITY | 41% | | | | 26% | | 100% | | 42% | | | |
| | COVERAGE | 100% | | | | 97% | | 101% | | 100% | | | |
| SAU102392 | SeqID | 10131 | 10500 | | | 11673 | 11951 | 12270 | 13474 | | | | |
| | IDENTITY | 50% | 42% | | | 32% | 42% | 100% | 42% | | | | |
| | COVERAGE | 73% | 80% | | | 80% | 74% | 100% | 76% | | | | |
| SAU102394 | SeqID | | 10807 | | | | | 12271 | | | | | |
| | IDENTITY | | 32% | | | | | 100% | | | | | |
| | COVERAGE | | 102% | | | | | 100% | | | | | |
| SAU102396 | SeqID | 10243 | 10809 | | | | | 12272 | 13467 | 13794 | | | |
| | IDENTITY | 37% | 62% | | | | | 100% | 27% | 37% | | | |
| | COVERAGE | 101% | 99% | | | | | 100% | 98% | 98% | | | |
| SAU102401 | SeqID | | | | | | | 12209 | | | | | |
| | IDENTITY | | | | | | | 100% | | | | | |
| | COVERAGE | | | | | | | | 100% | | | | |
| SAU102417 | SeqID | | 10934 | | | | 12068 | 12204 | | | | | |
| | IDENTITY | | 31% | | | | 25% | 100% | | | | | |
| | COVERAGE | | 79% | | | | 72% | 100% | | | | | |
| SAU102418 | SeqID | | | | | 11760 | | 12205 | | | | | |
| | IDENTITY | | | | | 25% | | 100% | | | | | |
| | COVERAGE | | | | | 89% | | 100% | | | | | |
| SAU102420 | SeqID | | | | | | | 12206 | | | | | |
| | IDENTITY | | | | | | | 100% | | | | | |
| | COVERAGE | | | | | | | 100% | | | | | |
| SAU102422 | SeqID | 10308 | | | | 11665 | 11977 | 12207 | | 13776 | | | |
| | IDENTITY | 30% | | | | 30% | 27% | 100% | | 31% | | | |
| | COVERAGE | 92% | | | | 72% | 93% | 100% | | 92% | | | |
| SAU102423 | SeqID | | | 11084 | 11491 | | 12099 | 12208 | | | | | |
| | IDENTITY | | | 27% | 25% | | 27% | 100% | | | | | |
| | COVERAGE | | | 94% | 92% | | 93% | 100% | | | | | |
| SAU102433 | SeqID | 10395 | 10908 | 11167 | 11616 | | 11772 | 12701 | 13552 | | | | |
| | IDENTITY | 42% | 51% | 39% | 37% | | 52% | 100% | 44% | | | | |
| | COVERAGE | 101% | 100% | 100% | 73% | | 72% | 100% | 98% | | | | |
| SAU102434 | SeqID | 10394 | 10907 | 11166 | | | 11773 | 12700 | 13446 | 13921 | | | |
| | IDENTITY | 26% | 44% | 28% | | | 26% | 100% | 40% | 27% | | | |
| | COVERAGE | 99% | 100% | 99% | | | 100% | 100% | 101% | 99% | | | |
| SAU102437 | SeqID | 10393 | 10952 | 11057 | 11330 | | 11774 | 12695 | 13420 | 13920 | | | |
| | IDENTITY | 55% | 67% | 57% | 51% | | 55% | 100% | 64% | 56% | | | |
| | COVERAGE | 86% | 99% | 88% | 86% | | 87% | 100% | 99% | 86% | | | |
| SAU102440 | SeqID | | | | | 12085 | 12692 | | 13990 | | | | |
| | IDENTITY | | | | | 41% | 100% | | 39% | | | | |
| | COVERAGE | | | | | 98% | 100% | | 99% | | | | |
| SAU102447 | SeqID | | 10947 | | | | | 12685 | 13436 | | | | |
| | IDENTITY | | 38% | | | | | 100% | 32% | | | | |
| | COVERAGE | | 98% | | | | | 100% | 98% | | | | |
| SAU102448 | SeqID | 10460 | 10946 | 11049 | 11332 | | 12073 | 12681 | 13435 | 13860 | | | |
| | IDENTITY | 32% | 55% | 31% | 35% | | 34% | 100% | 46% | 32% | | | |
| | COVERAGE | 101% | 102% | 101% | 101% | | 101% | 101% | 102% | 102% | | | |
| SAU102449 | SeqID | 10445 | 10945 | 11253 | 11444 | 11731 | 12072 | 12677 | 13434 | 14028 | | | |
| | IDENTITY | 45% | 55% | 43% | 35% | 43% | 44% | 100% | 51% | 45% | | | |
| | COVERAGE | 97% | 98% | 98% | 99% | 76% | 97% | 100% | 100% | 97% | | | |
| SAU102450 | SeqID | 10456 | 10943 | 11264 | 11487 | | 12076 | 12675 | 13237 | 13857 | | | |
| | IDENTITY | 47% | 70% | 46% | 43% | | 47% | 100% | 68% | 47% | | | |
| | COVERAGE | 100% | 100% | 100% | | 99% | 99% | 100% | 100% | 100% | | | |
| SAU102452 | SeqID | 10420 | 10748 | 11143 | 11478 | 11629 | 11820 | 12674 | 13265 | 13783 | | | |
| | IDENTITY | 41% | 70% | 37% | 32% | 40% | 40% | 100% | 62% | 38% | | | |
| | COVERAGE | 97% | 98% | 97% | 97% | 94% | 97% | 100% | 100% | 99% | | | |
| SAU102453 | SeqID | | 10749 | | | | 12107 | 12669 | 13266 | | | | |
| | IDENTITY | | 43% | | | | 29% | 100% | 41% | | | | |
| | COVERAGE | | 101% | | | | 70% | 100% | 71% | | | | |
| SAU102460 | SeqID | 10063 | 10547 | 10988 | | | 11837 | 12171 | 13395 | 13917 | | | |
| | IDENTITY | 34% | 35% | 34% | | | 34% | 100% | 34% | 34% | | | |
| | COVERAGE | 98% | 100% | 100% | | | 100% | 100% | 101% | 98% | | | |
| SAU102469 | SeqID | 10217 | | | | | 12172 | | | | | | |
| | IDENTITY | 58% | | | | | 100% | | | | | | |
| | COVERAGE | 98% | | | | | 100% | | | | | | |
| SAU102473 | SeqID | | 10868 | | | | | 12173 | 13475 | | | | |
| | IDENTITY | | 28% | | | | | 100% | 35% | | | | |
| | COVERAGE | | 88% | | | | | 100% | 83% | | | | |
| SAU102474 | SeqID | | 10713 | 10971 | | | | 12174 | 13476 | 14025 | | | |
| | IDENTITY | | 26% | 26% | | | | 100% | 26% | 27% | | | |
| | COVERAGE | | 96% | 105% | | | | 100% | 89% | 97% | | | |
| SAU102476 | SeqID | | | | | | | 12175 | | | | | |
| | IDENTITY | | | | | | | 100% | | | | | |
| | COVERAGE | | | | | | | 100% | | | | | |
| SAU102479 | SeqID | 10306 | | | | | | 12405 | | | | | |
| | IDENTITY | 26% | | | | | | 100% | | | | | |
| | COVERAGE | 84% | | | | | | 100% | | | | | |
| SAU102480 | SeqID | 10310 | 10935 | | | | 11871 | 12404 | | 13770 | | | |
| | IDENTITY | 28% | 33% | | | | 30% | 100% | | 27% | | | |
| | COVERAGE | 100% | 88% | | | | 100% | 100% | | 100% | | | |
| SAU102481 | SeqID | 10289 | 10831 | | | | | 12422 | | 13879 | | | |
| | IDENTITY | 26% | 29% | | | | | 100% | | 26% | | | |
| | COVERAGE | 102% | 94% | | | | | 101% | | 102% | | | |
| SAU102485 | SeqID | 10457 | 10890 | | | | | 12421 | 13512 | 13961 | | | |
| | IDENTITY | 28% | 53% | | | | | 100% | 56% | 60% | | | |
| | COVERAGE | 86% | 100% | | | | | 100% | 99% | 93% | | | |
| SAU102486 | SeqID | 10294 | 10889 | 11025 | | | | 12420 | 13513 | 13962 | | | |
| | IDENTITY | 36% | 38% | 27% | | | | 100% | 42% | 37% | | | |
| | COVERAGE | 95% | 97% | 95% | | | | 101% | 93% | 95% | | | |
| SAU102487 | SeqID | | | | | | | 12419 | | | | | |
| | IDENTITY | | | | | | | 100% | | | | | |
| | COVERAGE | | | | | | | 100% | | | | | |
| SAU102498 | SeqID | 10241 | 10597 | 10974 | 11342 | 11706 | 11842 | 12688 | 13387 | 14092 | | | |
| | IDENTITY | 36% | 35% | 35% | 33% | 37% | 38% | 100% | 35% | 36% | | | |
| | COVERAGE | 93% | 94% | 93% | 92% | 94% | 94% | 100% | 93% | 93% | | | |
| SAU102502 | SeqID | | | | | | 12060 | 12689 | | | | | |
| | IDENTITY | | | | | | 26% | 100% | | | | | |
| | COVERAGE | | | | | | 85% | 100% | | | | | |
| SAU102503 | SeqID | | | | | | 12059 | 12690 | | | | | |
| | IDENTITY | | | | | | 32% | 100% | | | | | |
| | COVERAGE | | | | | | 92% | 100% | | | | | |
| SAU102526 | SeqID | | | | | | | 12691 | | | | | |
| | IDENTITY | | | | | | | 100% | | | | | |
| | COVERAGE | | | | | | | 100% | | | | | |
| SAU102527 | SeqID | 10352 | 10560 | 11104 | 11439 | | 5171 | 12260 | 13204 | 13968 | | | |
| | IDENTITY | 54% | 74% | 55% | 56% | | 58% | 100% | 75% | 54% | | | |
| | COVERAGE | 93% | 101% | 93% | 94% | | 93% | 101% | 94% | 93% | | | |
| SAU102531 | SeqID | | | | | | 10765 | 12667 | | | | | |
| | IDENTITY | | 34% | | | | | 100% | | | | | |
| | COVERAGE | | 102% | | | | | 100% | | | | | |
| SAU102541 | SeqID | 10076 | 10520 | 11000 | 11498 | | 11966 | 12668 | 13405 | 13718 | | | |
| | IDENTITY | 41% | 49% | 38% | 37% | | 44% | 100% | 45% | 41% | | | |
| | COVERAGE | 93% | 102% | 91% | 93% | | 100% | 100% | 81% | 93% | | | |
| SAU102551 | SeqID | | | 11013 | 11353 | | 11816 | 12672 | 13271 | | | | |
| | IDENTITY | | | 47% | 38% | | 39% | 100% | 41% | | | | |
| | COVERAGE | | | 87% | 84% | | 84% | 101% | 95% | | | | |
| SAU102554 | SeqID | | 10494 | | | | | 12673 | 13466 | | | | |
| | IDENTITY | | 47% | | | | | 100% | 44% | | | | |
| | COVERAGE | | 99% | | | | | 100% | 98% | | | | |
| SAU102575 | SeqID | 10166 | | 11232 | 11618 | | 11777 | 12609 | | 13836 | | | |
| | IDENTITY | 28% | | 29% | 35% | | 30% | 100% | | 27% | | | |
| | COVERAGE | 98% | | 91% | 99% | | 96% | 100% | | 98% | | | |
| SAU102578 | SeqID | 1045910948 | 11050 | 11420 | | 12074 | 12411 | 13503 | 13859 | | | | |
| | IDENTITY | 59% | 76% | 60% | 51% | | 65% | 100% | 73% | 59% | | | |
| | COVERAGE | 88% | 95% | 88% | 89% | | 81% | 101% | 94% | 89% | | | |
| SAU102584 | SeqID | | | | | | | 12537 | | | | | |
| | IDENTITY | | | | | | | 100% | | | | | |
| | COVERAGE | | | | | | | 100% | | | | | |
| SAU102585 | SeqID | | | | | | | 12611 | | | | | |
| | IDENTITY | | | | | | | 100% | | | | | |
| | COVERAGE | | | | | | | 100% | | | | | |
| SAU102593 | SeqID | | 10889 | | | | | 12463 | 13513 | | | | |
| | IDENTITY | | 27% | | | | | 100% | 27% | | | | |
| | COVERAGE | | 87% | | | | | 100% | 88% | | | | |
| SAU102598 | SeqID | 10187 | | 10958 | | 11710 | 11979 | 12464 | | 13833 | | | |
| | IDENTITY | 30% | | 32% | | 27% | 31% | 100% | | 31% | | | |
| | COVERAGE | 102% | | 85% | | 75% | 92% | 100% | | 86% | | | |
| SAU102599 | SeqID | 10206 | 10944 | 10958 | 11619 | | 11975 | 12466 | 13653 | 13773 | | | |
| | IDENTITY | 36% | 26% | 30% | 30% | | 33% | 100% | 32% | 32% | | | |
| | COVERAGE | 89% | 76% | 93% | 73% | | 79% | 100% | 77% | 101% | | | |
| SAU102601 | SeqID | 10273 | | 11076 | | 11722 | 11931 | 12467 | 13256 | 13867 | | | |
| | IDENTITY | 27% | | 30% | | 28% | 28% | 100% | 51% | 27% | | | |
| | COVERAGE | 95% | | 93% | | 95% | 93% | 100% | 97% | 92% | | | |
| SAU102602 | SeqID | 10356 | 10555 | 11100 | 11441 | 11679 | 11993 | 12249 | 13200 | 13971 | | | |
| | IDENTITY | 58% | 78% | 61% | 57% | 59% | 60% | 100% | 77% | 58% | | | |
| | COVERAGE | 100% | 100% | 100% | 100% | 100% | 99% | 100% | 100% | 99% | | | |
| SAU102603 | SeqID | | | | | | | 12469 | | | | | |
| | IDENTITY | | | | | | | 100% | | | | | |
| | COVERAGE | | | | | | | 100% | | | | | |
| SAU102605 | SeqID | | 10836 | | | | | 12470 | | | | | |
| | IDENTITY | | 47% | | | | | 100% | | | | | |
| | COVERAGE | | 96% | | | | | 100% | | | | | |
| SAU102606 | SeqID | 10273 | | 11076 | | 11722 | 11931 | 12471 | 13256 | 13867 | | | |
| | IDENTITY | 27% | | 30% | | 27% | 25% | 100% | 50% | 26% | | | |
| | COVERAGE | 95% | | 92% | | 95% | 93% | 100% | 97% | 94% | | | |
| SAU102607 | SeqID | | | | | | | 12472 | 13579 | | | | |
| | IDENTITY | | | | | | | 100% | 43% | | | | |
| | COVERAGE | | | | | | | 100% | 98% | | | | |
| SAU102609 | SeqID | | | | | | | 12473 | | | | | |
| | IDENTITY | | | | | | | 100% | | | | | |
| | COVERAGE | | | | | | | 100% | | | | | |
| SAU102610 | SeqID | | | | | | | 12474 | | | | | |
| | IDENTITY | | | | | | | 100% | | | | | |
| | COVERAGE | | | | | | | 100% | | | | | |
| SAU102613 | SeqID | 10461 | | 11272 | | | | 12475 | | 13988 | | | |
| | IDENTITY | 26% | | 28% | | | | 100% | | 26% | | | |
| | COVERAGE | 97% | | 95% | | | | 100% | | 97% | | | |
| SAU102614 | SeqID | 10211 | 10600 | | | | | 12476 | | 13927 | | | |
| | IDENTITY | 33% | 55% | | | | | 100% | | 32% | | | |
| | COVERAGE | 89% | 100% | | | | | 100% | | 89% | | | |
| SAU102615 | SeqID | 10234 | 10601 | | | 11720 | 12098 | 12477 | | 13926 | | | |
| | IDENTITY | 32% | 40% | | | 32% | 26% | 100% | | 31% | | | |
| | COVERAGE | 98% | 100% | | | 92% | 87% | 100% | | 100% | | | |
| SAU102620 | SeqID | | | | | | | 12479 | | | | | |
| | IDENTITY | | | | | | | 100% | | | | | |
| | COVERAGE | | | | | | | 100% | | | | | |
| SAU102621 | SeqID | 10288 | 10519 | | | 11724 | | 12480 | 13370 | 13881 | | | |
| | IDENTITY | 61% | 62% | | | 58% | | 100% | 59% | 61% | | | |
| | COVERAGE | 100% | 101% | | | 81% | | 100% | 101% | 100% | | | |
| SAU102629 | SeqID | | 10885 | | | | | 12481 | | | | | |
| | IDENTITY | | 26% | | | | | 100% | | | | | |
| | COVERAGE | | 108% | | | | | 100% | | | | | |
| SAU102631 | SeqID | | 10522 | | | 11657 | 11841 | 12712 | | | | | |
| | IDENTITY | | 27% | | | 44% | 32% | 100% | | | | | |
| | COVERAGE | | 83% | | | 83% | 81% | 100% | | | | | |
| SAU102636 | SeqID | | | | | | | 12650 | 13696 | | | | |
| | IDENTITY | | | | | | | 100% | 29% | | | | |
| | COVERAGE | | | | | | | 100% | 102% | | | | |
| SAU102637 | SeqID | | | | | | | 12651 | 13697 | | | | |
| | IDENTITY | | | | | | | 100% | 39% | | | | |
| | COVERAGE | | | | | | | 100% | 98% | | | | |
| SAU102652 | SeqID | | | | | | | 12653 | | | | | |
| | IDENTITY | | | | | | | 100% | | | | | |
| | COVERAGE | | | | | | | 101% | | | | | |
| SAU102658 | SeqID | 10283 | 10910 | 11064 | | | 12090 | 12654 | 13514 | 13855 | | | |
| | IDENTITY | 45% | 54% | 42% | | | 39% | 100% | 49% | 41% | | | |
| | COVERAGE | 97% | 92% | 97% | | | 97% | 100% | 96% | 100% | | | |
| SAU102663 | SeqID | 10304 | 10840 | 11043 | 11626 | | 11798 | 12158 | 13172 | 13780 | | | |
| | IDENTITY | 43% | 58% | 44% | 34% | | 45% | 100% | 56% | 41% | | | |
| | COVERAGE | 99% | 99% | 96% | 95% | | 91% | 100% | 97% | 99% | | | |
| SAU102669 | SeqID | 10022 | 10756 | 11257 | | | 12045 | 12160 | 13371 | 14035 | | | |
| | IDENTITY | 42% | 26% | 43% | | | 41% | 100% | 54% | 41% | | | |
| | COVERAGE | 96% | 91% | 95% | | | 94% | 100% | 95% | 93% | | | |
| SAU102671 | SeqID | 10409 | | 11079 | 11319 | 11683 | 12043 | 12161 | 13373 | 14033 | | | |
| | IDENTITY | 34% | | 32% | 44% | 35% | 56% | 100% | 69% | 33% | | | |
| | COVERAGE | 91% | | 91% | 96% | 74% | 99% | 100% | 96% | 91% | | | |
| SAU102674 | SeqID | 10020 | | 11164 | | 11648 | 5127 | 12156 | | 14016 | | | |
| | IDENTITY | 55% | | 54% | | 46% | 55% | 100% | | 53% | | | |
| | COVERAGE | 102% | | 103% | | 101% | 105% | 101% | | 102% | | | |
| SAU102693 | SeqID | 10178 | 10659 | | 11474 | | 11883 | 12627 | 13301 | 13940 | | | |
| | IDENTITY | 53% | 74% | | 38% | | 49% | 100% | 61% | 49% | | | |
| | COVERAGE | 82% | 87% | | 86% | | 86% | 101% | 90% | 72% | | | |
| SAU102694 | SeqID | 10177 | 10660 | 11222 | 11296 | | 5120 | 12628 | 13302 | | | | |
| | IDENTITY | 48% | 66% | 50% | 44% | | 55% | 100% | 60% | | | | |
| | COVERAGE | 97% | 102% | 97% | 94% | | 94% | 102% | 102% | | | | |
| SAU102725 | SeqID | 10418 | 10514 | 11137 | 11507 | | 12088 | 12338 | 13378 | 13789 | | | |
| | IDENTITY | 40% | 72% | 39% | 38% | | 37% | 100% | 66% | 40% | | | |
| | COVERAGE | 96% | 100% | 96% | 103% | | 104% | 100% | 100% | 96% | | | |
| SAU102764 | SeqID | 10179 | 10929 | 11234 | 11295 | | 11884 | 12625 | 13484 | 13938 | | | |
| | IDENTITY | 44% | 67% | 42% | 41% | | 42% | 100% | 63% | 43% | | | |
| | COVERAGE | 99% | 99% | 99% | 90% | | 97% | 100% | 99% | 99% | | | |
| SAU102812 | SeqID | | 10860 | | | | 12127 | 13253 | | | | | |
| | IDENTITY | | 48% | | | | 100% | 49% | | | | | |
| | COVERAGE | | 100% | | | | 101% | 96% | | | | | |
| SAU102870 | SeqID | 10113 | 10880 | | | | | 12170 | 13270 | 14008 | | | |
| | IDENTITY | 29% | 35% | | | | | 100% | 29% | 28% | | | |
| | COVERAGE | 92% | 83% | | | | | 100% | 93% | 87% | | | |
| SAU102880 | SeqID | 10360 | 10533 | 11096 | 11443 | 11643 | 5177 | 12224 | 13196 | 13975 | | | |
| | IDENTITY | 60% | 82% | 61% | 57% | 61% | 58% | 100% | 85% | 61% | | | |
| | COVERAGE | 100% | 101% | 100% | 97% | 100% | 100% | 101% | 101% | 100% | | | |
| SAU102881 | SeqID | 10357 | 10551 | 11099 | | | 11994 | 12242 | 13199 | 13972 | | | |
| | IDENTITY | 38% | 69% | 37% | | | 38% | 100% | 54% | 38% | | | |
| | COVERAGE | 89% | 98% | 89% | | | 89% | 101% | 102% | 89% | | | |
| SAU102883 | SeqID | 10396 | | 11168 | 11449 | | 12118 | 12702 | 13181 | | | | |
| | IDENTITY | 63% | | 70% | 60% | | 65% | 100% | 76% | | | | |
| | COVERAGE | 86% | | 88% | 86% | | 86% | 102% | 90% | | | | |
| SAU102905 | SeqID | | 10732 | 11217 | 11373 | | | 12273 | | | | | |
| | IDENTITY | | 31% | 26% | 38% | | | 100% | | | | | |
| | COVERAGE | | 92% | 80% | 87% | | | 100% | | | | | |
| SAU102909 | SeqID | 10042 | 10488 | 11150 | 11457 | 11637 | 11940 | 12315 | 13437 | 13908 | | | |
| | IDENTITY | 59% | 68% | 60% | 69% | 59% | 60% | 100% | 73% | 59% | | | |
| | COVERAGE | 95% | 95% | 95% | 130% | 95% | 98% | 101% | 124% | 95% | | | |
| SAU102933 | SeqID | 10448 | 10949 | 10995 | 11579 | 11762 | 11985 | 12412 | 13502 | 13817 | | | |
| | IDENTITY | 33% | 53% | 35% | 32% | 31% | 29% | 100% | 50% | 31% | | | |
| | COVERAGE | 104% | 113% | 101% | 108% | 107% | 101% | 101% | 101% | 103% | | | |
| SAU102936 | SeqID | 10236 | 10872 | | | | 11804 | 12356 | | 13955 | | | |
| | IDENTITY | 33% | 66% | | | | 60% | 100% | | 33% | | | |
| | COVERAGE | 97% | 100% | | | | 96% | 101% | | 98% | | | |
| SAU102942 | SeqID | 10136 | 10492 | 11230 | | 11696 | | 12296 | 13339 | 13834 | | | |
| | IDENTITY | 52% | 55% | 43% | | 50% | | 100% | 51% | 51% | | | |
| | COVERAGE | 100% | 100% | 99% | | 99% | | 100% | 99% | 99% | | | |
| SAU102944 | SeqID | | | | | | | 12468 | 13257 | | | | |
| | IDENTITY | | | | | | | 100% | 42% | | | | |
| | COVERAGE | | | | | | | 100% | 99% | | | | |
| SAU102979 | SeqID | 10014 | | 10979 | 11384 | | 11936 | 12536 | 13429 | 13712 | | | |
| | IDENTITY | 33% | | 37% | 32% | | 41% | 100% | 33% | 33% | | | |
| | COVERAGE | 88% | | 87% | 87% | | 87% | 100% | 87% | 90% | | | |
| SAU102983 | SeqID | | 10883 | | | | | 12676 | 13269 | | | | |
| | IDENTITY | | 28% | | | | | 100% | 27% | | | | |
| | COVERAGE | | 70% | | | | | 100% | 76% | | | | |
| SAU102992 | SeqID | 10176 | 10661 | 11223 | 11297 | | 11882 | 12630 | 13303 | 13941 | | | |
| | IDENTITY | 62% | 70% | 62% | 48% | | 59% | 100% | 63% | 61% | | | |
| | COVERAGE | 99% | 92% | 99% | 97% | | 99% | 101% | 99% | 101% | | | |
| SAU103010 | SeqID | | | | | | | 12194 | | | | | |
| | IDENTITY | | | | | | | 100% | | | | | |
| | COVERAGE | | | | | | | 100% | | | | | |
| SAU103024 | SeqID | | | | | 11670 | 12042 | 12200 | | | | | |
| | IDENTITY | | | | | 44% | 26% | 100% | | | | | |
| | COVERAGE | | | | | 89% | 72% | 101% | | | | | |
| SAU103025 | SeqID | | | | | | | 12202 | | | | | |
| | IDENTITY | | | | | | | 100% | | | | | |
| | COVERAGE | | | | | | | 100% | | | | | |
| SAU103037 | SeqID | | 10867 | | | | | 12613 | 13267 | | | | |
| | IDENTITY | | 27% | | | | | 100% | 26% | | | | |
| | COVERAGE | | 99% | | | | | 101% | 86% | | | | |
| SAU103077 | SeqID | | | | | | | 12408 | | | | | |
| | IDENTITY | | | | | | | 100% | | | | | |
| | COVERAGE | | | | | | | 100% | | | | | |
| SAU103115 | SeqID | | | | | | | 12508 | 13469 | | | | |
| | IDENTITY | | | | | | | 100% | 32% | | | | |
| | COVERAGE | | | | | | | 101% | 101% | | | | |
| SAU103 | 144 | SeqID | | 10936 | | | | | 12663 | | | | |
| | IDENTITY | | 42% | | | | | 100% | | | | | |
| | COVERAGE | | 84% | | | | | 100% | | | | | |
| SAU103159 | SeqID | 10110 | 10783 | 11134 | 11489 | | 11787 | 12670 | 13411 | 13994 | | | |
| | IDENTITY | 43% | 48% | 38% | 48% | | 48% | 100% | 63% | 43% | | | |
| | COVERAGE | 115% | 100% | 112% | 117% | | 98% | 100% | 101% | 116% | | | |
| SAU103169 | SeqID | | | | | | | 12678 | 13239 | | | | |
| | IDENTITY | | | | | | | 100% | 34% | | | | |
| | COVERAGE | | | | | | | 100% | 84% | | | | |
| SAU103175 | SeqID | 10157 | | | | | | 12687 | | | | | |
| | IDENTITY | 36% | | | | | | 100% | | | | | |
| | COVERAGE | 96% | | | | | | 100% | | | | | |
| SAU103191 | SeqID | | | | | | | 12465 | 13332 | | | | |
| | IDENTITY | | | | | | | 100% | 42% | | | | |
| | COVERAGE | | | | | | | 102% | 75% | | | | |
| SAU103204 | SeqID | | | | | | | 12499 | | | | | |
| | IDENTITY | | | | | | | 100% | | | | | |
| | COVERAGE | | | | | | | 101% | | | | | |
| SAU103226 | SeqID | | | | | | | 12713 | | | | | |
| | IDENTITY | | | | | | | 100% | | | | | |
| | COVERAGE | | | | | | | 100% | | | | | |
| SAU103232 | SeqID | 10368 | | | | 11704 | 11848 | 12697 | | 13803 | | | |
| | IDENTITY | 36% | | | | 35% | 48% | 100% | | 35% | | | |
| | COVERAGE | 102% | | | | 98% | 101% | 101% | | 102% | | | |
| SAU200006 | SeqID | 10033 | 10639 | 11192 | 11553 | | 12007 | 12723 | 13479 | | | | |
| | IDENTITY | 53% | 70% | 47% | 43% | | 50% | 100% | 65% | | | | |
| | COVERAGE | 78% | 80% | 84% | 82% | | 89% | 100% | 77% | | | | |
| SAU200028 | SeqID | | | | | | | 12694 | | | | | |
| | IDENTITY | | | | | | | 100% | | | | | |
| | COVERAGE | | | | | | | 100% | | | | | |
| SAU200030 | SeqID | 10372 | 10553 | 11056 | 11447 | 11672 | 12092 | 12745 | 13449 | 13807 | | | |
| | IDENTITY | 42% | 74% | 39% | 43% | 41% | 35% | 100% | 73% | 42% | | | |
| | COVERAGE | 84% | 98% | 84% | 93% | 86% | 93% | 102% | 95% | 84% | | | |
| SAU200058 | SeqID | | 10621 | | | | | 12719 | 13327 | | | | |
| | IDENTITY | | 39% | | | | | 100% | 37% | | | | |
| | COVERAGE | | 79% | | | | | 101% | 78% | | | | |
| SAU200059 | SeqID | 10259 | 10622 | 10978 | | | 12026 | 12720 | 13325 | 14087 | | | |
| | IDENTITY | 31% | 33% | 32% | | | 36% | 100% | 40% | 31% | | | |
| | COVERAGE | 73% | 97% | 73% | | | 74% | 100% | 96% | 73% | | | |
| SAU200088 | SeqID | 10262 | | 10984 | 11403 | | 11947 | 12724 | 13415 | 14090 | | | |
| | IDENTITY | 51% | | 56% | 57% | | 45% | 100% | 68% | 49% | | | |
| | COVERAGE | 82% | | 91% | 93% | | 93% | 102% | 100% | 82% | | | |
| SAU200242 | SeqID | | 10712 | | | | | 12734 | | | | | |
| | IDENTITY | | 28% | | | | | 100% | | | | | |
| | COVERAGE | | 99% | | | | | 100% | | | | | |
| SAU200297 | SeqID | 10109 | 10756 | 11257 | | | 11982 | 12739 | 13371 | 13996 | | | |
| | IDENTITY | 33% | 64% | 34% | | | 33% | 100% | 33% | 32% | | | |
| | COVERAGE | 95% | 100% | 98% | | | 95% | 100% | 95% | 95% | | | |
| SAU200345 | SeqID | | | | | | | 12751 | | | | | |
| | IDENTITY | | | | | | | 100% | | | | | |
| | COVERAGE | | | | | | | 100% | | | | | |
| SAU200392 | SeqID | 10164 | 10584 | 10968 | 11566 | | 11912 | 12755 | | 13892 | | | |
| | IDENTITY | 26% | 30% | 25% | 27% | | 33% | 100% | | 26% | | | |
| | COVERAGE | 97% | 80% | 96% | 98% | | 93% | 100% | | 98% | | | |
| SAU200468 | SeqID | 10201 | 10478 | 11054 | | 12061 | 12937 | 13425 | 13822 | | | | |
| | IDENTITY | 78% | 75% | 62% | | 36% | 100% | 76% | 78% | | | | |
| | COVERAGE | 74% | 75% | 74% | | 81% | 101% | 75% | 74% | | | | |
| SAU200558 | SeqID | 10039 | 10728 | 11277 | | | 12046 | 12777 | 13423 | 13904 | | | |
| | IDENTITY | 28% | 31% | 26% | | | 30% | 100% | 32% | 29% | | | |
| | COVERAGE | 72% | 102% | 80% | | | 75% | 100% | 99% | 72% | | | |
| SAU200561 | SeqID | | | | | | | 12693 | | | | | |
| | IDENTITY | | | | | | | 100% | | | | | |
| | COVERAGE | | | | | | | 100% | | | | | |
| SAU200564 | SeqID | 10099 | | 11170 | 11602 | 11645 | 11788 | 12780 | | 13992 | | | |
| | IDENTITY | 33% | | 31% | 31% | 34% | 32% | 100% | | 34% | | | |
| | COVERAGE | 87% | | 87% | 82% | 86% | 93% | 100% | | 87% | | | |
| SAU200565 | SeqID | 10098 | | 11250 | 11386 | | 11786 | 12781 | | 13991 | | | |
| | IDENTITY | 32% | | 34% | 35% | | 39% | 100% | | 33% | | | |
| | COVERAGE | 97% | | 96% | 98% | | 97% | 100% | | 97% | | | |
| SAU200593 | SeqID | 10435 | 10613 | 11038 | 11412 | | 11998 | 12784 | 13397 | 14046 | | | |
| | IDENTITY | 53% | 73% | 50% | 53% | | 52% | 100% | 64% | 52% | | | |
| | COVERAGE | 99% | 100% | 99% | 98% | | 100% | 100% | 99% | 99% | | | |
| SAU200628 | SeqID | 10173 | 10856 | | | | | 12790 | 13297 | 13937 | | | |
| | IDENTITY | 32% | 31% | | | | | 100% | 29% | 34% | | | |
| | COVERAGE | 92% | 97% | | | | | 100% | 97% | 94% | | | |
| SAU200685 | SeqID | | | | | | | 12801 | 13185 | | | | |
| | IDENTITY | | | | | | | 100% | 31% | | | | |
| | COVERAGE | | | | | | | 100% | 94% | | | | |
| SAU200721 | SeqID | 10208 | 10582 | 11015 | 11541 | | | 12797 | 13681 | 13922 | | | |
| | IDENTITY | 40% | 33% | 41% | 36% | | | 100% | 42% | 41% | | | |
| | COVERAGE | 92% | 79% | 99% | 94% | | | 100% | 100% | 94% | | | |
| SAU200725 | SeqID | 10118 | 10761 | 10966 | | | 11780 | 12933 | 13632 | 14020 | | | |
| | IDENTITY | 30% | 46% | 30% | | | 25% | 100% | 47% | 29% | | | |
| | COVERAGE | 98% | 100% | 97% | | | 98% | 100% | 100% | 98% | | | |
| SAU200731 | SeqID | 10283 | 10822 | 11064 | | | 12090 | 12342 | 13514 | 13855 | | | |
| | IDENTITY | 55% | 54% | 44% | | | 43% | 100% | 51% | 46% | | | |
| | COVERAGE | 99% | 100% | 98% | | | 98% | 100% | 100% | 99% | | | |
| SAU200740 | SeqID | 10318 | 10554 | 11225 | 11393 | | 12056 | 12798 | 13695 | 13760 | | | |
| | IDENTITY | 48% | 56% | 48% | 49% | | 50% | 100% | 55% | 48% | | | |
| | COVERAGE | 86% | 102% | 86% | 73% | | 87% | 100% | 93% | 86% | | | |
| SAU200752 | SeqID | | | | | | | 12809 | | | | | |
| | IDENTITY | | | | | | | 100% | | | | | |
| | COVERAGE | | | | | | | 100% | | | | | |
| SAU200914 | SeqID | 10383 | 10714 | | | 11747 | 11927 | 12837 | 13431 | 13788 | | | |
| | IDENTITY | 26% | 28% | | | 27% | 27% | 100% | 25% | 25% | | | |
| | COVERAGE | 96% | 98% | | | 79% | 90% | 100% | 91% | 90% | | | |
| SAU200916 | SeqID | | | | | | | 12838 | | | | | |
| | IDENTITY | | | | | | | 100% | | | | | |
| | COVERAGE | | | | | | | 100% | | | | | |
| SAU200928 | SeqID | 10439 | 10627 | 11036 | 11571 | | 5179 | 12815 | 13646 | 14042 | | | |
| | IDENTITY | 54% | 73% | 55% | 53% | | 49% | 100% | 69% | 54% | | | |
| | COVERAGE | 86% | 99% | 87% | 86% | | 102% | 100% | 100% | 86% | | | |
| SAU200934 | SeqID | 10212 | 10780 | | | | 11964 | 12842 | | 13835 | | | |
| | IDENTITY | 44% | 60% | | | | 42% | 100% | | 42% | | | |
| | COVERAGE | 72% | 93% | | | | 82% | 100% | | 88% | | | |
| SAU200949 | SeqID | | | | | | | 12846 | | | | | |
| | IDENTITY | | | | | | | 100% | | | | | |
| | COVERAGE | | | | | | | 100% | | | | | |
| SAU200960 | SeqID | | | | 11500 | | 11886 | 12431 | | | | | |
| | IDENTITY | | | | 42% | | 33% | 100% | | | | | |
| | COVERAGE | | | | 70% | | 91% | 102% | | | | | |
| SAU200994 | SeqID | 10036 | 10497 | 11270 | | | 11865 | 12935 | 13310 | 14054 | | | |
| | IDENTITY | 36% | 62% | 32% | | | 37% | 100% | 35% | 33% | | | |
| | COVERAGE | 100% | 101% | 100% | | | 102% | 100% | 73% | 99% | | | |
| SAU201 | 167 | SeqID | | 10779 | | | | | 12887 | | | | |
| | IDENTITY | | 37% | | | | | 100% | | | | | |
| | COVERAGE | | 98% | | | | | 100% | | | | | |
| SAU201168 | SeqID | | 10819 | | | | | 12889 | 13626 | | | | |
| | IDENTITY | | 53% | | | | | 100% | 56% | | | | |
| | COVERAGE | | 102% | | | | | 100% | 100% | | | | |
| SAU201184 | SeqID | 10448 | 10715 | 10995 | 11579 | | 11985 | 12807 | 13502 | 13819 | | | |
| | IDENTITY | 40% | 52% | 35% | 37% | | 37% | 100% | 53% | 32% | | | |
| | COVERAGE | 70% | 108% | 97% | 82% | | 70% | 101% | 111% | 111% | | | |
| SAU201197 | SeqID | 10330 | 10924 | 11160 | 11321 | | 5215 | 12938 | 13364 | 13885 | | | |
| | IDENTITY | 58% | 66% | 60% | 53% | | 58% | 100% | 63% | 58% | | | |
| | COVERAGE | 99% | 99% | 99% | 98% | | 99% | 101% | 96% | 99% | | | |
| SAU201225 | SeqID | | 10812 | 11090 | | | | 12896 | 13170 | | | | |
| | IDENTITY | | 41% | 33% | | | | 100% | 38% | | | | |
| | COVERAGE | | 93% | 80% | | | | 100% | 87% | | | | |
| SAU201236 | SeqID | 10026 | 10679 | 11184 | 11613 | | 12013 | 12891 | 13505 | 14073 | | | |
| | IDENTITY | 32% | 29% | 33% | 33% | | 34% | 100% | 30% | 32% | | | |
| | COVERAGE | 92% | 96% | 93% | 89% | | 95% | 100% | 95% | 90% | | | |
| SAU201301 | SeqID | | | | | | | 12899 | | | | | |
| | IDENTITY | | | | | | | 100% | | | | | |
| | COVERAGE | | | | | | | 100% | | | | | |
| SAU201333 | SeqID | 10192 | | | | 11678 | | 12905 | | 13753 | | | |
| | IDENTITY | 41% | | | | 28% | | 100% | | 41% | | | |
| | COVERAGE | 100% | | | | 96% | | 101% | | 100% | | | |
| SAU201375 | SeqID | | | | | | 11929 | 12926 | | | | | |
| | IDENTITY | | | | | | 36% | 100% | | | | | |
| | COVERAGE | | | | | | 95% | 100% | | | | | |
| SAU201380 | SeqID | 10379 | 10499 | | 11313 | | 12024 | 12922 | | 13801 | | | |
| | IDENTITY | 34% | 25% | | 26% | | 25% | 100% | | 25% | | | |
| | COVERAGE | 94% | 93% | | 95% | | 89% | 100% | | 101% | | | |
| SAU201381 | SeqID | 10241 | 10597 | 10974 | 11387 | 11706 | 11833 | 12923 | 13387 | 13878 | | | |
| | IDENTITY | 68% | 59% | 46% | 44% | 56% | 57% | 100% | 52% | 64% | | | |
| | COVERAGE | 89% | 96% | 90% | 91% | 89% | 100% | 104% | 92% | 89% | | | |
| SAU201403 | SeqID | | | | | | | 12913 | | | | | |
| | IDENTITY | | | | | | | 100% | | | | | |
| | COVERAGE | | | | | | | 100% | | | | | |
| SAU201469 | SeqID | | | | | | | 12967 | | | | | |
| | IDENTITY | | | | | | | 100% | | | | | |
| | COVERAGE | | | | | | | 100% | | | | | |
| SAU201486 | SeqID | | | | | | | 13023 | | | | | |
| | IDENTITY | | | | | | | 100% | | | | | |
| | COVERAGE | | | | | | | 100% | | | | | |
| SAU201506 | SeqID | 10145 | | | | | 11963 | 12946 | | 13841 | | | |
| | IDENTITY | 49% | | | | | 49% | 100% | | 50% | | | |
| | COVERAGE | 101% | | | | | 102% | 100% | | 100% | | | |
| SAU201508 | SeqID | 10370 | | | | | 11874 | 12947 | | 13805 | | | |
| | IDENTITY | 37% | | | | | 42% | 100% | | 36% | | | |
| | COVERAGE | 73% | | | | | 72% | 100% | | 73% | | | |
| SAU201513 | SeqID | 10229 | | | | | | 12944 | | | | | |
| | IDENTITY | 29% | | | | | | 100% | | | | | |
| | COVERAGE | 71% | | | | | | 101% | | | | | |
| SAU201539 | SeqID | 10109 | | 11257 | | | 5099 | 12943 | 13625 | 13996 | | | |
| | IDENTITY | 33% | | 28% | | | 34% | 100% | 32% | 33% | | | |
| | COVERAGE | 95% | | 96% | | | 96% | 100% | 97% | 95% | | | |
| SAU201541 | SeqID | 10131 | 10500 | | | 11673 | 11951 | 12942 | 13474 | | | | |
| | IDENTITY | 50% | 39% | | | 33% | 41% | 100% | 41% | | | | |
| | COVERAGE | 71% | 74% | | | 77% | 73% | 100% | 73% | | | | |
| SAU201558 | SeqID | 10112 | | 11258 | 11396 | | 11875 | 12954 | 13598 | 14009 | | | |
| | IDENTITY | 51% | | 51% | 43% | | 49% | 100% | 46% | 51% | | | |
| | COVERAGE | 96% | | 94% | 94% | | 99% | 101% | 96% | 96% | | | |
| SAU201571 | SeqID | 10224 | 10951 | 11213 | 11357 | | 11905 | 12997 | 13268 | 13957 | | | |
| | IDENTITY | 50% | 61% | 47% | 50% | | 45% | 100% | 54% | 49% | | | |
| | COVERAGE | 98% | 94% | 99% | 92% | | 103% | 100% | 70% | 98% | | | |
| SAU201611 | SeqID | | | | 11539 | | 11902 | 12973 | 13243 | | | | |
| | IDENTITY | | | | 38% | | 48% | 100% | 58% | | | | |
| | COVERAGE | | | | 73% | | 99% | 100% | 95% | | | | |
| SAU201615 | SeqID | | | | | | 11962 | 12972 | | | | | |
| | IDENTITY | | | | | | 40% | 100% | | | | | |
| | COVERAGE | | | | | | 72% | 100% | | | | | |
| SAU201621 | SeqID | 10038 | 10842 | | 11392 | 11707 | 12047 | 12662 | | 13902 | | | |
| | IDENTITY | 49% | 53% | | 42% | 49% | 47% | 100% | | 46% | | | |
| | COVERAGE | 91% | 91% | | 91% | 91% | 91% | 101% | | 91% | | | |
| SAU201654 | SeqID | | | | | | | 12982 | | | | | |
| | IDENTITY | | | | | | | 100% | | | | | |
| | COVERAGE | | | | | | | 101% | | | | | |
| SAU201666 | SeqID | 10291 | 10900 | 11028 | 11557 | 11761 | 11811 | 12981 | | 13743 | | | |
| | IDENTITY | 33% | 29% | 35% | 31% | 32% | 34% | 100% | | 33% | | | |
| | COVERAGE | 71% | 80% | 71% | 76% | 79% | 73% | 100% | | 71% | | | |
| SAU201752 | SeqID | | 10623 | | | | | 12963 | 13689 | | | | |
| | IDENTITY | | 45% | | | | | 100% | 40% | | | | |
| | COVERAGE | | 89% | | | | | 100% | 92% | | | | |
| SAU201765 | SeqID | | | | | | | 12770 | | | | | |
| | IDENTITY | | | | | | | 100% | | | | | |
| | COVERAGE | | | | | | | 100% | | | | | |
| SAU20 | 1773 | SeqID | | | | | | | 12996 | | | | |
| | IDENTITY | | | | | | | 100% | | | | | |
| | COVERAGE | | | | | | | 100% | | | | | |
| SAU20 | 1775 | SeqID | | | | | | | 12996 | | | | |
| | IDENTITY | | | | | | | 100% | | | | | |
| | COVERAGE | | | | | | | 100% | | | | | |
| SAU201810 | SeqID | | | | | | | 12769 | | | | | |
| | IDENTITY | | | | | | | 100% | | | | | |
| | COVERAGE | | | | | | | 100% | | | | | |
| SAU201827 | SeqID | 10258 | 10783 | 11134 | 11310 | | 11787 | 13002 | 13411 | 14088 | | | |
| | IDENTITY | 38% | 46% | 41% | 41% | | 45% | 100% | 63% | 39% | | | |
| | COVERAGE | 108% | 100% | 100% | 104% | | 88% | 100% | 101% | 108% | | | |
| SAU201929 | SeqID | | | | | | | 13008 | | | | | |
| | IDENTITY | | | | | | | 100% | | | | | |
| | COVERAGE | | | | | | | 100% | | | | | |
| SAU20 | 1952 | SeqID | | | | | | | 13020 | | | | |
| | IDENTITY | | | | | | | 100% | | | | | |
| | COVERAGE | | | | | | | 100% | | | | | |
| SAU201971 | SeqID | | | | | | | 13015 | | | | | |
| | IDENTITY | | | | | | | 100% | | | | | |
| | COVERAGE | | | | | | | 101% | | | | | |
| SAU202006 | SeqID | | | | | | | 13018 | | | | | |
| | IDENTITY | | | | | | | 100% | | | | | |
| | COVERAGE | | | | | | | 100% | | | | | |
| SAU202039 | SeqID | | | | 11359 | | | 13009 | 13374 | | | | |
| | IDENTITY | | | | 44% | | | 100% | 48% | | | | |
| | COVERAGE | | | | 96% | | | 101% | 98% | | | | |
| SAU202126 | SeqID | 10261 | 10874 | 10983 | 11561 | | 11946 | 12714 | 13417 | 14085 | | | |
| | IDENTITY | 51% | 50% | 52% | 33% | | 46% | 100% | 58% | 52% | | | |
| | COVERAGE | 94% | 94% | 91% | 84% | | 93% | 101% | 94% | 94% | | | |
| SAU202174 | SeqID | | | | | | | 12895 | | | | | |
| | IDENTITY | | | | | | | 100% | | | | | |
| | COVERAGE | | | | | | | 101% | | | | | |
| SAU202 | 176 | SeqID | | | | | | | 12895 | | | | |
| | IDENTITY | | | | | | | 100% | | | | | |
| | COVERAGE | | | | | | | 101% | | | | | |
| SAU202186 | SeqID | 10062 | | | | | | 12731 | | | | | |
| | IDENTITY | 28% | | | | | | 100% | | | | | |
| | COVERAGE | 73% | | | | | | 101% | | | | | |
| SAU202267 | SeqID | | | | | | | 12727 | | | | | |
| | IDENTITY | | | | | | | 100% | | | | | |
| | COVERAGE | | | | | | | 100% | | | | | |
| SAU202708 | SeqID | 10428 | 10913 | | | | | 12855 | | 13735 | | | |
| | IDENTITY | 25% | 28% | | | | | 100% | | 25% | | | |
| | COVERAGE | 86% | 84% | | | | | 100% | | 86% | | | |
| SAU202736 | SeqID | 10148 | 10902 | 11181 | 11494 | 11677 | 11857 | 12927 | 13248 | 13844 | | | |
| | IDENTITY | 39% | 40% | 37% | 40% | 37% | 38% | 100% | 38% | 39% | | | |
| | COVERAGE | 95% | 93% | 98% | 91% | 80% | 93% | 100% | 103% | 95% | | | |
| SAU202756 | SeqID | 10436 | 10614 | 11071 | | | 5181 | 13027 | 13246 | 14045 | | | |
| | IDENTITY | 44% | 63% | 47% | | | 44% | 100% | 53% | 40% | | | |
| | COVERAGE | 97% | 92% | 86% | | | 92% | 100% | 91% | 97% | | | |
| SAU202781 | SeqID | | | | | | | 12718 | | | | | |
| | IDENTITY | | | | | | | 100% | | | | | |
| | COVERAGE | | | | | | | 100% | | | | | |
| SAU202872 | SeqID | | 10656 | | | | | 12866 | 13670 | | | | |
| | IDENTITY | | 45% | | | | | 100% | 28% | | | | |
| | COVERAGE | | 101% | | | | | 100% | 98% | | | | |
| SAU202882 | SeqID | | | | | | | 12848 | | | | | |
| | IDENTITY | | | | | | | 100% | | | | | |
| | COVERAGE | | | | | | | 101% | | | | | |
| SAU202930 | SeqID | | | | | | | 12871 | | | | | |
| | IDENTITY | | | | | | | 100% | | | | | |
| | COVERAGE | | | | | | | 100% | | | | | |
| SAU202945 | SeqID | | | | | | | 12868 | | | | | |
| | IDENTITY | | | | | | | 100% | | | | | |
| | COVERAGE | | | | | | | 100% | | | | | |
| SAU202968 | SeqID | | | | | | | 12886 | | | | | |
| | IDENTITY | | | | | | | 100% | | | | | |
| | COVERAGE | | | | | | | 100% | | | | | |
| SAU203001 | SeqID | | | | | | | 12894 | | | | | |
| | IDENTITY | | | | | | | 100% | | | | | |
| | COVERAGE | | | | | | | 100% | | | | | |
| SAU203007 | SeqID | | | | | | | 12893 | | | | | |
| | IDENTITY | | | | | | | 100% | | | | | |
| | COVERAGE | 100% | | | | | | | | | | | |
| SAU203196 | SeqID | | | | | | | 12945 | | | | | |
| | IDENTITY | | | | | | | 100% | | | | | |
| | COVERAGE | | | | | | | | 101% | | | | |
| SAU203293 | SeqID | | | | | | | 12979 | | | | | |
| | IDENTITY | | | | | | | 100% | | | | | |
| | COVERAGE | | | | | | | 101% | | | | | |
| SAU203296 | SeqID | | | | 11330 | | | 12263 | | | | | |
| | IDENTITY | | | | 29% | | | 100% | | | | | |
| | COVERAGE | | | | 88% | | | 101% | | | | | |
| SAU203524 | SeqID | | | | | | | 12957 | | | | | |
| | IDENTITY | | | | | | | 100% | | | | | |
| | COVERAGE | | | | | | | 100% | | | | | |
| SAU300110 | SeqID | 10054 | 10544 | | | 11662 | | 13031 | 13441 | | | | |
| | IDENTITY | 33% | 38% | | | 33% | | 100% | 30% | | | | |
| | COVERAGE | 82% | 109% | | | 73% | | 102% | 109% | | | | |
| SAU300131 | SeqID | 10344 | 10529 | 11112 | 11434 | | 5164 | 13034 | 13213 | 14103 | | | |
| | IDENTITY | 45% | 71% | 44% | 52% | | 47% | 100% | 60% | 44% | | | |
| | COVERAGE | 100% | 99% | 100% | 99% | | 99% | 101% | 99% | 100% | | | |
| SAU300156 | SeqID | | | | | | | 13036 | | | | | |
| | IDENTITY | | | | | | | 100% | | | | | |
| | COVERAGE | | | | | | | 100% | | | | | |
| SAU300191 | SeqID | | 10562 | | 11519 | | 11844 | 12367 | 13522 | | | | |
| | IDENTITY | | 43% | | 39% | | 32% | 100% | 41% | | | | |
| | COVERAGE | | 103% | | 91% | | 72% | 101% | 104% | | | | |
| SAU300572 | SeqID | | | | 11522 | | | 12717 | | | | | |
| | IDENTITY | | | | 32% | | | 100% | | | | | |
| | COVERAGE | | | | 108% | | | 100% | | | | | |
| SAU300617 | SeqID | | 10851 | | | | | 12513 | 13289 | | | | |
| | IDENTITY | | 50% | | | | | 100% | 49% | | | | |
| | COVERAGE | | 97% | | | | | 100% | 97% | | | | |
| SAU300713 | SeqID | | 10767 | | | | 11823 | 13058 | | | | | |
| | IDENTITY | | 26% | | | | 30% | 100% | | | | | |
| | COVERAGE | | 83% | | | | 93% | 100% | | | | | |
| SAU300719 | SeqID | 10468 | 10611 | 11246 | 11380 | 11644 | 11887 | 12987 | 13456 | 13726 | | | |
| | IDENTITY | 46% | 34% | 34% | 30% | 30% | 40% | 100% | 33% | 34% | | | |
| | COVERAGE | 100% | 87% | 101% | 94% | 101% | 100% | 101% | 96% | 100% | | | |
| SAU300732 | SeqID | 10282 | 10682 | | | | | 13061 | 13394 | | | | |
| | IDENTITY | 26% | 51% | | | | | 100% | 49% | | | | |
| | COVERAGE | 71% | 88% | | | | | 100% | 86% | | | | |
| SAU300825 | SeqID | | 10655 | | | | | 13068 | 13671 | | | | |
| | IDENTITY | | 52% | | | | | 100% | 41% | | | | |
| | COVERAGE | | 97% | | | | | 100% | 97% | | | | |
| SAU300975 | SeqID | | 10604 | | | | | 12203 | | | | | |
| | IDENTITY | | 30% | | | | | 100% | | | | | |
| | COVERAGE | | 72% | | | | | 102% | | | | | |
| SAU300998 | SeqID | | 10820 | | | | | 13077 | 13489 | | | | |
| | IDENTITY | | 40% | | | | | 100% | 40% | | | | |
| | COVERAGE | | 99% | | | | | 102% | 99% | | | | |
| SAU301004 | SeqID | | 10744 | | | | | 13079 | | | | | |
| | IDENTITY | | 40% | | | | | 100% | | | | | |
| | COVERAGE | | 101% | | | | | 100% | | | | | |
| SAU301030 | SeqID | | | | | | | 13080 | | | | | |
| | IDENTITY | | | | | | | 100% | | | | | |
| | COVERAGE | | | | | | | 100% | | | | | |
| SAU301080 | SeqID | | | | | | | 13083 | | | | | |
| | IDENTITY | | | | | | | 100% | | | | | |
| | COVERAGE | | | | | | | 100% | | | | | |
| SAU301118 | SeqID | 10242 | 10808 | 11092 | | 11653 | | 12904 | | 13795 | | | |
| | IDENTITY | 47% | 58% | 48% | | 53% | | 100% | | 48% | | | |
| | COVERAGE | 98% | 98% | 91% | | 78% | | 100% | | 96% | | | |
| SAU301133 | SeqID | | 10898 | | | | | 13087 | 13443 | | | | |
| | IDENTITY | | 39% | | | | | 100% | 30% | | | | |
| | COVERAGE | | 96% | | | | | | 100% | 93% | | | |
| SAU301223 | SeqID | 10297 | 10640 | 10964 | 11323 | | 11783 | 13090 | 13664 | 13737 | | | |
| | IDENTITY | 31% | 50% | 31% | 32% | | 34% | 100% | 48% | 32% | | | |
| | COVERAGE | 104% | 99% | 102% | 90% | | 102% | 100% | 98% | 104% | | | |
| SAU301230 | SeqID | 10252 | 10877 | 11010 | | 11669 | 11956 | 13092 | 13506 | 13704 | | | |
| | IDENTITY | 52% | 52% | 63% | | 52% | 59% | 100% | 59% | 52% | | | |
| | COVERAGE | 95% | 92% | 74% | | 95% | 77% | 100% | 92% | 95% | | | |
| SAU301268 | SeqID | | | | | | | 13102 | | | | | |
| | IDENTITY | | | | | | | 100% | | | | | |
| | COVERAGE | | | | | | | 100% | | | | | |
| SAU301275 | SeqID | 10048 | 10926 | 11014 | 11511 | | 11934 | 13103 | 13366 | 13897 | | | |
| | IDENTITY | 54% | 47% | 55% | 50% | | 53% | 100% | 46% | 54% | | | |
| | COVERAGE | 99% | 84% | 97% | 97% | | 97% | 101% | 84% | 99% | | | |
| SAU301357 | SeqID | | 10696 | 11063 | | 11766 | | 12859 | 13354 | | | | |
| | IDENTITY | | 74% | 32% | | 33% | | 100% | 76% | | | | |
| | COVERAGE | | 98% | 80% | | 93% | | 101% | 100% | | | | |
| SAU301433 | SeqID | | | | | | | 12845 | 13393 | | | | |
| | IDENTITY | | | | | | | 100% | 26% | | | | |
| | COVERAGE | | | | | | | 100% | 91% | | | | |
| SAU301465 | SeqID | 10210 | 10663 | 11214 | 11554 | | 11921 | 13013 | 13418 | 13925 | | | |
| | IDENTITY | 29% | 54% | 32% | 37% | | 28% | 100% | 52% | 29% | | | |
| | COVERAGE | 100% | 104% | 104% | 100% | | 101% | 100% | 103% | 102% | | | |
| SAU301472 | SeqID | 10157 | | | | | | 12925 | | | | | |
| | IDENTITY | 36% | | | | | | 100% | | | | | |
| | COVERAGE | 85% | | | | | | 100% | | | | | |
| SAU301592 | SeqID | | | | | | | 13137 | | | | | |
| | IDENTITY | | | | | | | 100% | | | | | |
| | COVERAGE | | | | | | | 100% | | | | | |
| SAU301620 | SeqID | | | | | | | 13140 | | | | | |
| | IDENTITY | | | | | | | 100% | | | | | |
| | COVERAGE | | | | | | | 100% | | | | | |
| SAU301758 | SeqID | | | | | | | 13156 | | | | | |
| | IDENTITY | | | | | | | 100% | | | | | |
| | COVERAGE | | | | | | | 100% | | | | | |
| SAU301773 | SeqID | | | | | | | 12729 | | | | | |
| | IDENTITY | | | | | | | 100% | | | | | |
| | COVERAGE | | | | | | | 100% | | | | | |
| SAU301829 | SeqID | 10107 | | | 11309 | | 11857 | 13162 | 13248 | 13935 | | | |
| | IDENTITY | 45% | | | 40% | | 42% | 100% | 38% | 41% | | | |
| | COVERAGE | 98% | | | 97% | | 96% | 100% | 106% | 99% | | | |
| SAU301869 | SeqID | | 10732 | | 11373 | | | 12903 | | | | | |
| | IDENTITY | | 30% | | 36% | | | 100% | | | | | |
| | COVERAGE | | 80% | | 95% | | | 100% | | | | | |
| SAU301898 | SeqID | | 10932 | | | | | 13057 | | | | | |
| | IDENTITY | | 27% | | | | | 100% | | | | | |
| | COVERAGE | | 71% | | | | | 100% | | | | | |
| SAU302060 | SeqID | | | | | | | 13042 | | | | | |
| | IDENTITY | | | | | | | 100% | | | | | |
| | COVERAGE | | | | | | | 100% | | | | | |
| SAU302513 | SeqID | | | | | | | 12851 | | | | | |
| | IDENTITY | | | | | | | 100% | | | | | |
| | COVERAGE | | | | | | | 100% | | | | | |
| SAU302626 | SeqID | | | | | | | 13105 | | | | | |
| | IDENTITY | | | | | | | 100% | | | | | |
| | COVERAGE | | | | | | | 100% | | | | | |
| SAU302685 | SeqID | | | | | | | 13113 | | | | | |
| | IDENTITY | | | | | | | 100% | | | | | |
| | COVERAGE | | | | | | | 100% | | | | | |
| SAU302698 | SeqID | | | | | | | 12725 | | | | | |
| | IDENTITY | | | | | | | 100% | | | | | |
| | COVERAGE | | | | | | | 100% | | | | | |
| SAU302699 | SeqID | | | | | | | 13115 | | | | | |
| | IDENTITY | | | | | | | 100% | | | | | |
| | COVERAGE | | | | | | | 100% | | | | | |
| SAU302805 | SeqID | | | | 11345 | | 13133 | | | | | | |
| | IDENTITY | | | | 33% | | 100% | | | | | | |
| | COVERAGE | | | | 75% | | 101% | | | | | | |
| SAU302901 | SeqID | | | | | | | 12872 | | | | | |
| | IDENTITY | | | | | | | 100% | | | | | |
| | COVERAGE | | | | | | | 100% | | | | | |
| SAU30293 | 1 | SeqID | | | | | | | 13155 | | | | |
| | IDENTITY | | | | | | | 100% | | | | | |
| | COVERAGE | | | | | | | 100% | | | | | |
| SAU302950 | SeqID | | | | | | | 12664 | | | | | |
| | IDENTITY | | | | | | | 100% | | | | | |
| | COVERAGE | | | | | | | 101% | | | | | |
| SAU302956 | SeqID | 10023 | | 11256 | | 11742 | 12044 | 12930 | 13372 | 14018 | | | |
| | IDENTITY | 32% | | 28% | | 31% | 26% | 100% | 31% | 32% | | | |
| | COVERAGE | 88% | | 88% | | 88% | 86% | 101% | 88% | 88% | | | |
| ECO100078 | SeqID | 10023 | | 11256 | | 11742 | 12044 | | 13595 | 14018 | | | |
| | IDENTITY | 100% | | 66% | | 95% | 65% | | 41% | 97% | | | |
| | COVERAGE | 100% | | 98% | | 100% | 99% | | 97% | 100% | | | |
| ECO100252 | SeqID | 10052 | | | 11503 | | 12078 | 12626 | | 13932 | | | |
| | IDENTITY | 100% | | | 41% | | 48% | 38% | | 40% | | | |
| | COVERAGE | 100% | | | 99% | | 96% | 93% | | 93% | | | |
| ECO100397 | SeqID | 10064 | 10781 | 10993 | 11499 | | 11959 | 12884 | 13614 | 13915 | | | |
| | IDENTITY | 100% | 50% | 71% | 38% | | 71% | 45% | 47% | 94% | | | |
| | COVERAGE | 100% | 96% | 100% | 97% | | 97% | 97% | 97% | 99% | | | |
| ECO100398 | SeqID | 10065 | 10653 | 10992 | 11311 | | 11958 | 12883 | 13177 | 13916 | | | |
| | IDENTITY | 100% | 53% | 81% | 46% | | 71% | 57% | 50% | 98% | | | |
| | COVERAGE | 100% | 95% | 101% | 98% | | 99% | 95% | 95% | 100% | | | |
| ECO100990 | SeqID | 10120 | | | | 11768 | | | | | | | |
| | IDENTITY | 100% | | | | 72% | | | | | | | |
| | COVERAGE | 100% | | | | 82% | | | | | | | |
| ECO102108 | SeqID | 10214 | 10608 | 11129 | | 11757 | 11852 | | 13627 | 13931 | | | |
| | IDENTITY | 100% | 36% | 74% | | 94% | 36% | | 36% | 96% | | | |
| | COVERAGE | 100% | 96% | 100% | | 100% | 97% | | 97% | 73% | | | |
| ECO102262 | SeqID | 10228 | | 11204 | | 11631 | 12038 | 13132 | | 13963 | | | |
| | IDENTITY | 100% | | 42% | | 86% | 51% | 35% | | 87% | | | |
| | COVERAGE | 100% | | 100% | | 81% | 100% | 100% | | 100% | | | |
| ECO102447 | SeqID | 10247 | | | | | 11812 | | | 13948 | | | |
| | IDENTITY | 100% | | | | | 47% | | | 99% | | | |
| | COVERAGE | 100% | | | | | 93% | | | 96% | | | |
| ECO102539 | SeqID | 10258 | 10628 | 11134 | 11489 | | 5192 | 12526 | 13636 | 14088 | | | |
| | IDENTITY | 100% | 46% | 77% | 48% | | 71% | 52% | 47% | 97% | | | |
| | COVERAGE | 100% | 101% | 100% | | 100% | 100% | 100% | 82% | 100% | | | |
| ECO102620 | SeqID | 10266 | 10510 | 11269 | 11524 | | 11819 | 12915 | 13279 | 14049 | | | |
| | IDENTITY | 100% | 51% | 26% | 30% | | 28% | 42% | 49% | 89% | | | |
| | COVERAGE | 100% | 93% | 80% | 94% | | 91% | 96% | 101% | 99% | | | |
| ECO103101 | SeqID | 10315 | 10763 | 11215 | 11615 | 11716 | 12052 | | 13662 | 13764 | | | |
| | IDENTITY | 100% | 37% | 73% | 26% | 96% | 64% | | 33% | 94% | | | |
| | COVERAGE | 100% | 74% | 100% | 76% | 100% | 100% | | 74% | 101% | | | |
| ECO104120 | SeqID | 10462 | 10609 | 11034 | | 11726 | 11853 | | | 13887 | | | |
| | IDENTITY | 100% | 29% | 34% | | 87% | 28% | | | 37% | | | |
| | COVERAGE | 100% | 79% | 89% | | 100% | 89% | | | 92% | | | |
| ECO104268 | SeqID | 10475 | 10607 | | | | | 12370 | 13166 | 13707 | | | |
| | IDENTITY | 100% | 43% | | | | | 43% | 38% | 95% | | | |
| | COVERAGE | 100% | 92% | | | | | 99% | 92%100% | | | | |
| KPN100432 | SeqID | 10258 | 10736 | 11134 | 11310 | 11628 | 5192 | 12789 | 13636 | 14088 | | | |
| | IDENTITY | 90% | 37% | 62% | 37% | 100% | 62% | 41% | 47% | 92% | | | |
| | COVERAGE | 100% | 97% | 100% | 93% | 101% 97% | 86% | 87%101% | | | | | |
| KPN100854 | SeqID | 10086 | 10652 | 11197 | 11565 | 11630 | 11862 | | 13389 | 14060 | | | |
| | IDENTITY | 35% | 29% | 26% | 27% | 100% | 42% | | 32% | 35% | | | |
| | COVERAGE | 74% | 72% | 72% | 85% | 100% 77% | | 71% | 74% | | | | |
| KPN101022 | SeqID | 10475 | 10607 | | | 11642 | | 12370 | 13166 | 13707 | | | |
| | IDENTITY | 90% | 29% | | | 100% | | 27% | 26% | 91% | | | |
| | COVERAGE | 100% | 77% | | | 101% | | 101% | 79%101% | | | | |
| KPN101026 | SeqID | 10228 | | 11204 | | 11631 | 12038 | 13132 | | 13963 | | | |
| | IDENTITY | 86% | | 44% | | 100% | 54% | 37% | | 85% | | | |
| | COVERAGE | 99% | | 97% | | 100% 98% | 99% | | 99% | | | | |
| KPN101729 | SeqID | 11045 | 11467 | 11647 | 12067 | 13032 | | | | | | | |
| | IDENTITY | 50% | 50% | 100% | 63% | 63% | | | | | | | |
| | COVERAGE | 96% | 96% | 102% 96% | 96% | | | | | | | | |
| KPN101750 | SeqID | 10052 | | | 11503 | 11652 | 12078 | 12626 | | 13918 | | | |
| | IDENTITY | 94% | | | 38% | 100% | 47% | 37% | | 34% | | | |
| | COVERAGE | 100% | | | 103% | 100% 100% | 96% | | 100% | | | | |
| KPN102057 | SeqID | 10406 | 10892 | 11035 | | 11661 | 11854 | 13153 | | 13883 | | | |
| | IDENTITY | 29% | 30% | 30% | | 100% | 27% | 28% | | 29% | | | |
| | COVERAGE | 96% | 96% | 84% | | 100% | 97% | 85% | | 96% | | | |
| KPN102638 | SeqID | 10266 | 10510 | | 11524 | 11667 | | 12915 | 13557 | 14049 | | | |
| | IDENTITY | 77% | 51% | | 29% | 100% | | 44% | 50% | 77% | | | |
| | COVERAGE | 79% | 79% | | 83% | 100% | | 80% | 79% | 79% | | | |
| KPN103882 | SeqID | 10315 | 10763 | 11215 | 11454 | 11716 | 12052 | | 13662 | 13764 | | | |
| | IDENTITY | 96% | 38% | 73% | 26% | 100% | 65% | | 33% | 93% | | | |
| | COVERAGE | 100% | 74% | 100% | 77% | 100% | 100% | | 74% | 101% | | | |
| KPN104183 | SeqID | 10065 | 10653 | 10992 | 11490 | 11650 | 11958 | 12883 | 13177 | 13916 | | | |
| | IDENTITY | 97% | 56% | 80% | 46% | 100% | 80% | 60% | 55% | 98% | | | |
| | COVERAGE | 85% | 74% | 89% | 86% | 100% | 85% | 74% | 74% | 85% | | | |
| KPN104281 | SeqID | 10023 | | 11256 | | 11742 | 12044 | | 13595 | 14018 | | | |
| | IDENTITY | 95% | | 68% | | 100% | 66% | | 41% | 95% | | | |
| | COVERAGE | 94% | | 92% | | 101% | 94% | | 91% | 101% | | | |
| KPN104538 | SeqID | 10462 | 10609 | 11034 | | 11726 | 11853 | | | 13887 | | | |
| | IDENTITY | 87% | 27% | 35% | | 100% | 29% | | | 38% | | | |
| | COVERAGE | 100% | 87% | 89% | | 100% | 89% | | | 94% | | | |
| KPN104716 | SeqID | 10214 | 10608 | 11129 | | 1175711852 | | 13627 | 13931 | | | | |
| | IDENTITY | 94% | 36% | 75% | | 100% | 36% | | 35% | 94% | | | |
| | COVERAGE | 100% | 96% | 100% | | 100% | 97% | | 97% | 73% | | | |
| KPN105779 | SeqID | | | | | 11770 | 12103 | | | | | | |
| | IDENTITY | | | | | 100% | 28% | | | | | | |
| | COVERAGE | | | | | 101% | 99% | | | | | | |
| KPN106659 | SeqID | 10064 | 10781 | 10993 | | 116491 | 1959 | 12884 | 13614 | 13915 | | | |
| | IDENTITY | 90% | 58% | 72% | | 100% | 74% | 51% | 58% | 91% | | | |
| | COVERAGE | 80% | 70% | 75% | | 101% | 74% | 72% | 70% | 81% | | | |
| KPN106840 | SeqID | 10259 | 10857 | 10978 | | 11664 | 12026 | 12182 | 13691 | 14087 | | | |
| | IDENTITY | 91% | 44% | 74% | | 100% | 55% | 38% | 42% | 91% | | | |
| | COVERAGE | 100% | 101% | 98% | | 100% | 99% | 94% | 92% | 100% | | | |
| KPN107776 | SeqID | 10222 | | 11132 | | 11771 | 11810 | | | 13936 | | | |
| | IDENTITY | 78% | | 37% | | 100% | 35% | | | 80% | | | |
| | COVERAGE | 98% | | 89% | | 102% | 87% | | | 98% | | | |
| SAU100968 | SeqID | 10064 | 10781 | 10993 | 11499 | | 11959 | 12643 | 13614 | 13915 | | | |
| | IDENTITY | 45% | 62% | 44% | 36% | | 46% | 100% | 62% | 46% | | | |
| | COVERAGE | 97% | 97% | 100% | 99% | | 97% | 100% | 98% | 97% | | | |
| SAU201145 | SeqID | 10064 | 10781 | 10993 | 11499 | | 11959 | 12884 | 13614 | 13915 | | | |
| | IDENTITY | 45% | 62% | 44% | 36% | | 46% | 100% | 62% | 46% | | | |
| | COVERAGE | 97% | 97% | 100% | 99% | | 97% | 100% | 98% | 97% | | | |
| SPN101971 | SeqID | 10064 | 10781 | 10993 | 11499 | | 11959 | 12884 | 13287 | 13915 | | | |
| | IDENTITY | 46% | 77% | 42% | 36% | | 48% | 62% | 100% | 46% | | | |
| | COVERAGE | 100% | 99% | 102% | 100% | | 100% | 99% | 100% | 100% | | | |
| SPN201024 | SeqID | 10064 | 10781 | 10993 | 11499 | | 11959 | 12884 | 13614 | 13915 | | | |
| | IDENTITY | 46% | 77% | 43% | 36% | | 49% | 62% | 100% | 46% | | | |
| | COVERAGE | 99% | 99% | 102% | 101% | | 99% | 99% | 100% | 99% | | | |
| STY000277 | SeqID | 10475 | 10607 | | | | | 1237013166 | 13707 | | | | |
| | IDENTITY | 95% | 44% | | | | | 42% | 38% | 100% | | | |
| | COVERAGE | 100% | 91% | | | | | 99% | 96%100% | | | | |
| STY000625 | SeqID | 10421 | | | | | | | | 13784 | | | |
| | IDENTITY | 93% | | | | | | | | 100% | | | |
| | COVERAGE | 100% | | | | | | | | 101% | | | |
| STY000773 | SeqID | 10315 | 10763 | 11215 | 11454 | 11716 | 12052 | | 13662 | 13764 | | | |
| | IDENTITY | 94% | 36% | 71% | 26% | 93% | 62% | | 31% | 100% | | | |
| | COVERAGE | 100% | 74% | 100% | 77% | 100% | 100% | | 74% | 100% | | | |
| STY001430 | SeqID | 10064 | 10781 | 10993 | 11499 | | 11959 | 1288413614 | 13915 | | | | |
| | IDENTITY | 94% | 49% | 70% | 37% | | 70% | 46% | 47% | 100% | | | |
| | COVERAGE | 100% | 96% | 101% | 98% | | 98% | 97% | 98% | 100% | | | |
| STY001433 | SeqID | 10065 | 10653 | 10992 | 11311 | | 11958 | 12883 | 13177 | 13916 | | | |
| | IDENTITY | 98% | 53% | 82% | 46% | | 72% | 58% | 50% | 100% | | | |
| | COVERAGE | 99% | 94% | 100% | 97% | | 99% | 94% | 94% | 100% | | | |
| STY001867 | SeqID | 10247 | | | | | 11812 | | | 13948 | | | |
| | IDENTITY | 99% | | | | | 47% | | | 100% | | | |
| | COVERAGE | 98% | | | | | 96% | | | 100% | | | |
| STY002995 | SeqID | 10023 | | 11256 | | 11742 | 12044 | | 13595 | 14018 | | | |
| | IDENTITY | 97% | | 67% | | 95% | 65% | | 40% | 100% | | | |
| | COVERAGE | 94% | | 92% | | 101% | 94% | | 91% | 101% | | | |
| STY003357 | SeqID | 10228 | | 11204 | | 11631 | 12038 | 13132 | | 13963 | | | |
| | IDENTITY | 87% | | 42% | | 85% | 49% | 36% | | 100% | | | |
| | COVERAGE | 100% | | 100% | | 81% | 101% | 100% | | 100% | | | |
| PA0028 | SeqID | | | | | | 5053 | | | | | | |
| | COVERAGE | | | | | | 100% | | | | | | |
| | IDENTITY | | | | | | 100% | | | | | | |
| PA0120 | SeqID | 10386 | | 10959 | | | 5054 | | | 13899 | | | |
| | COVERAGE | 96% | | 94% | | | 100% | | | 95% | | | |
| | IDENTITY | 28% | | 28% | | | 100% | | | 28% | | | |
| PA0129 | SeqID | 10265 | | | 11388 | | 5055 | 12844 | | 14048 | | | |
| | COVERAGE | 93% | | | 91% | | 100% | 94% | | 91% | | | |
| | IDENTITY | 67% | | | 32% | | 100% | 36% | | 67% | | | |
| PA0141 | SeqID | | | | | | 5056 | | | | | | |
| | COVERAGE | | | | | | 100% | | | | | | |
| | IDENTITY | | | | | | 100% | | | | | | |
| PA0221 | SeqID | | | 11250 | 11386 | 11701 | 5057 | 12781 | | 13778 | | | |
| | COVERAGE | | | 73% | 77% | 83% | 100% | 96% | | 77% | | | |
| | IDENTITY | | | 32% | 26% | 28% | 100% | 28% | | 29% | | | |
| PA0265 | SeqID | 10264 | 10550 | | 11466 | | 5058 | 12375 | 13316 | 14047 | | | |
| | COVERAGE | 100% | 97% | | 99% | | 100% | 96% | 91% | 100% | | | |
| | IDENTITY | 81% | 35% | | 26% | | 100% | 38% | 34% | 80% | | | |
| PA0321 | SeqID | | | | | | 5059 | | | | | | |
| | COVERAGE | | | | | | 100% | | | | | | |
| | IDENTITY | | | | | | 100% | | | | | | |
| PA0337 | SeqID | 10278 | 10785 | 11275 | | | 5060 | 12351 | 13281 | 13880 | | | |
| | COVERAGE | 99% | 73% | 72% | | | 100% | 72% | 73% | 99% | | | |
| | IDENTITY | 43% | 35% | 37% | | | 100% | 36% | 35% | 42% | | | |
| PA0353 | SeqID | 10408 | 11088 | | 11397 | 11749 | 5061 | 12159 | 13511 | 14034 | | | |
| | COVERAGE | 97% | | 100% | 88% | 101% | 100% | 100% | 96% | 101% | | | |
| | IDENTITY | 74% | | 75% | 28% | 74%100% | 45% | 38% | 74% | | | | |
| PA0378 | SeqID | 10324 | | 11130 | | | 5062 | | | 13730 | | | |
| | COVERAGE | 94% | | 80% | | | 100% | | | 95% | | | |
| | IDENTITY | 52% | | 49% | | | 100% | | | 53% | | | |
| PA0401 | SeqID | 10078 | 10858 | | | | 5063 | 12993 | 13560 | 13723 | | | |
| | COVERAGE | 99% | 100% | | | | 100% | 96% | 100% | 99% | | | |
| | IDENTITY | 26% | 31% | | | | 100% | 33% | 33% | 26% | | | |
| PA0413 | SeqID | | | | | | 5064 | | | | | | |
| | COVERAGE | | | | | | 100% | | | | | | |
| | IDENTITY | | | | | | 100% | | | | | | |
| PA0414 | SeqID | | | | | | 5065 | | | | | | |
| | COVERAGE | | | | | | 100% | | | | | | |
| | IDENTITY | | | | | | 100% | | | | | | |
| PA0419 | SeqID | 10296 | 10871 | 11003 | | 11660 | 5066 | 12971 | 13461 | 13738 | | | |
| | COVERAGE | 100% | 93% | 102% | | 78% | 100% | 100% | 91% | 100% | | | |
| | IDENTITY | 46% | 29% | 45% | | 47% | 100% | 27% | 29% | 47% | | | |
| PA0423 | SeqID | 10123 | | | 11424 | | 5067 | 12708 | | 14038 | | | |
| | COVERAGE | 99% | | | 97% | | 100% | 75% | | 99% | | | |
| | IDENTITY | 75% | | | 32% | | 100% | 32% | | 76% | | | |
| PA0469 | SeqID | | | | | | 5068 | | | | | | |
| | COVERAGE | | | | | | 100% | | | | | | |
| | IDENTITY | | | | | | 100% | | | | | | |
| PA0472 | SeqID | 10471 | | | | | 5069 | | | | | | |
| | COVERAGE | 88% | | | | | 100% | | | | | | |
| | IDENTITY | 47% | | | | | 100% | | | | | | |
| PA0506 | SeqID | | | | | | 5070 | | | | | | |
| | COVERAGE | | | | | | 100% | | | | | | |
| | IDENTITY | | | | | | 100% | | | | | | |
| PA0600 | SeqID | | | | | | 5071 | | | | | | |
| | COVERAGE | | | | | | 100% | | | | | | |
| | IDENTITY | | | | | | 100% | | | | | | |
| PA0642 | SeqID | | | | | | 5072 | | | | | | |
| | COVERAGE | | | | | | 100% | | | | | | |
| | IDENTITY | | | | | | 100% | | | | | | |
| PA0650 | SeqID | 10150 | | 11237 | 11581 | | 5073 | 12153 | 13459 | 13846 | | | |
| | COVERAGE | 95% | | 83% | 93% | | 100% | 76% | 95% | 95% | | | |
| | IDENTITY | 38% | | 38% | 35% | | 100% | 34% | 38% | 39% | | | |
| PA0715 | SeqID | | | | | | 5074 | | | | | | |
| | COVERAGE | | | | | | 100% | | | | | | |
| | IDENTITY | | | | | | 100% | | | | | | |
| PA0788 | SeqID | | | | | | 5075 | | | | | | |
| | COVERAGE | | | | | | 100% | | | | | | |
| | IDENTITY | | | | | | | 100% | | | | | |
| PA0882 | SeqID | 10233 | | | | | 5076 | | | 14013 | | | |
| | COVERAGE | 85% | | | | | 100% | | | 101% | | | |
| | IDENTITY | 33% | | | | | 100% | | | 28% | | | |
| PA0934 | SeqID | 10276 | 10876 | 11006 | | 11753 | 5077 | 12646 | 13483 | | | | |
| | COVERAGE | 101% | 93% | 101% | | 80% | 100% | 92% | 94% | | | | |
| | IDENTITY | 47% | 40% | 46% | | 37% | 100% | 39% | 38% | | | | |
| PA0938 | SeqID | | | | | | 5078 | | | | | | |
| | COVERAGE | | | | | | 100% | | | | | | |
| | IDENTITY | | | | | | | 100% | | | | | |
| PA1019 | SeqID | 10467 | 10592 | 11180 | | | 5079 | | | | | | |
| | COVERAGE | 88% | 84% | 88% | | | 100% | | | | | | |
| | IDENTITY | 26% | 25% | 28% | | | 100% | | | | | | |
| PA1072 | SeqID | 10377 | | | | | 5080 | | 13410 | 13813 | | | |
| | COVERAGE | 100% | | | | | 100% | | 71% | 100% | | | |
| | IDENTITY | 62% | | | | | 100% | | 36% | 61% | | | |
| PA1115 | SeqID | | | | | | 5081 | | | | | | |
| | COVERAGE | | | | | | 100% | | | | | | |
| | IDENTITY | | | | | | 100% | | | | | | |
| PA1270 | SeqID | 10328 | | | | 11751 | 5082 | | | 13946 | | | |
| | COVERAGE | 76% | | | | 79% | 100% | | | 76% | | | |
| | IDENTITY | 26% | | | | 25% | 100% | | | 26% | | | |
| PA1301 | SeqID | 10470 | | | | | 5083 | | | | | | |
| | COVERAGE | 96% | | | | | 100% | | | | | | |
| | IDENTITY | 28% | | | | | 100% | | | | | | |
| PA1360 | SeqID | 10104 | | | | | 5084 | | 13282 | 14000 | | | |
| | COVERAGE | 92% | | | | | 100% | | 97% | 92% | | | |
| | IDENTITY | 63% | | | | | 100% | | 25% | 63% | | | |
| PA1365 | SeqID | | | | | | 5085 | | | | | | |
| | COVERAGE | | | | | | 100% | | | | | | |
| | IDENTITY | | | | | | 100% | | | | | | |
| PA1398 | SeqID | | | | | | 5086 | | | | | | |
| | COVERAGE | | | | | | 100% | | | | | | |
| | IDENTITY | | | | | | 100% | | | | | | |
| PA1462 | SeqID | | 10915 | | 11559 | | 5087 | | | | | | |
| | COVERAGE | | 98% | | 101% | | 100% | | | | | | |
| | IDENTITY | | | 29% | | 30% | | 100% | | | | | |
| PA1493 | SeqID | 110423 | | | | 11718 | 5088 | | | 13786 | | | |
| | COVERAGE | 92% | | | | 97% | 100% | | | 92% | | | |
| | IDENTITY | 56% | | | | 49% | 100% | | | 56% | | | |
| PA1547SeqID | | | | 11377 | | 5089 | | | | | | | |
| | COVERAGE | | | | 88% | | 100% | | | | | | |
| | IDENTITY | | | | 28% | | 100% | | | | | | |
| SeqID | 110091 | | | | | 5090 | 12990 | | 13890 | | | | |
| | COVERAGE | 101% | | | | | 100% | 96% | | 81% | | | |
| | IDENTITY | 37% | | | | | 100% | 26% | | 32% | | | |
| PA1684 | SeqID | | | | | 11693 | 5091 | | | | | | |
| | COVERAGE | | | | | 99% | 100% | | | | | | |
| | IDENTITY | | | | | 59% | 100% | | | | | | |
| PA1868 | SeqID | 10361 | | | | | 5092 | | | | | | |
| | COVERAGE | 82% | | | | | 100% | | | | | | |
| | IDENTITY | 35% | | | | | 100% | | | | | | |
| PA1876 | SeqID | | | | | 11746 | 5093 | | 14036 | | | | |
| | COVERAGE | | | | | 76% | 100% | | 93% | | | | |
| | IDENTITY | | | | | 40% | 100% | | 39% | | | | |
| PA1918 | SeqID | 10153 | | 11033 | | | 5094 | | | 13745 | | | |
| | COVERAGE | 79% | | 82% | | | 100% | | | 79% | | | |
| | IDENTITY | 31% | | 28% | | | 100% | | | 28% | | | |
| PA1986 | SeqID | | | | | | 5095 | | | | | | |
| | COVERAGE | | | | | | 100% | | | | | | |
| | IDENTITY | | | | | | 100% | | | | | | |
| PA2009 | SeqID | | | | | | 5096 | | | | | | |
| | COVERAGE | | | | | | 100% | | | | | | |
| | IDENTITY | | | | | | 100% | | | | | | |
| PA2083 | SeqID | 10253 | | | | 11692 | 5097 | | | | | | |
| | COVERAGE | 87% | | | | 85% | 100% | | | | | | |
| | IDENTITY | 31% | | | | 35% | 100% | | | | | | |
| PA2101 | SeqID | 10198 | | | | | 5098 | | 13282 | 13861 | | | |
| | COVERAGE | 92% | | | | | 100% | | 88% | 95% | | | |
| | IDENTITY | 30% | | | | | 100% | | 25% | 28% | | | |
| PA2108 | SeqID | 10109 | | 11257 | | | 5099 | 12943 | 13625 | 13996 | | | |
| | COVERAGE | 96% | | 95% | | | 100% | 94% | 90% | 96% | | | |
| | IDENTITY | 37% | | 27% | | | 100% | 34% | 29% | 37% | | | |
| PA2128 | SeqID | 10472 | 10865 | | | 11752 | 5100 | | 13683 | 13893 | | | |
| | COVERAGE | 97% | 96% | | | 86% | 100% | | 80% | 97% | | | |
| | IDENTITY | 27% | 26% | | | 25% | 100% | | 27% | 33% | | | |
| PA2147 | SeqID | 10181 | | | | | 5101 | | | 13985 | | | |
| | COVERAGE | 98% | | | | | 100% | | | 98% | | | |
| | IDENTITY | 60% | | | | | 100% | | | 59% | | | |
| PA2196 | SeqID | 10169 | | | | | 5102 | | 13852 | | | | |
| | COVERAGE | 99% | | | | | 100% | | 99% | | | | |
| | IDENTITY | 43% | | | | | 100% | | 43% | | | | |
| PA2197 | SeqID | 10160 | | | | | 5103 | 12917 | | 13830 | | | |
| | COVERAGE | 100% | | | | | 100% | 97% | | 100% | | | |
| | IDENTITY | 74% | | | | | 100% | 44% | | 73% | | | |
| PA2222 | SeqID | | | | | | 5104 | | | | | | |
| | COVERAGE | | | | | | 100% | | | | | | |
| | IDENTITY | | | | | | 100% | | | | | | |
| PA2313 | SeqID | | | | | | 5105 | | | | | | |
| | COVERAGE | | | | | | 100% | | | | | | |
| | IDENTITY | | | | | | 100% | | | | | | |
| PA2398 | SeqID | 10132 | | | | | 5106 | | | | | | |
| | COVERAGE | 86% | | | | | 100% | | | | | | |
| | IDENTITY | 35% | | | | | 100% | | | | | | |
| PA2424 | SeqID | | | | | | 5107 | | | | | | |
| | COVERAGE | | | | | | 100% | | | | | | |
| | IDENTITY | | | | | | 100% | | | | | | |
| PA2461 | SeqID | | | | | | 5108 | | | | | | |
| | COVERAGE | | | | | | 100% | | | | | | |
| | IDENTITY | | | | | | 100% | | | | | | |
| PA2470 | SeqID | | | | | | 5109 | 13930 | | | | | |
| | COVERAGE | | | | | | 100% | 98% | | | | | |
| | IDENTITY | | | | | | 100% | 60% | | | | | |
| PA2488 | SeqID | 10189 | | 11172 | | | 5110 | | | 13980 | | | |
| | COVERAGE | 89% | | 70% | | | 100% | | | 87% | | | |
| | IDENTITY | 32% | | 28% | | | 100% | | | 29% | | | |
| PA2494 | SeqID | 10331 | | 11145 | 11516 | | 5111 | | | 13719 | | | |
| | COVERAGE | 99% | | 98% | 100% | | 100% | | | 98% | | | |
| | IDENTITY | 42% | | 31% | 26% | | 100% | | | 41% | | | |
| PA2584 | SeqID | 10195 | 10899 | 10967 | 11504 | | 5112 | 12330 | 13442 | 14058 | | | |
| | COVERAGE | 94% | 99% | 94% | 97% | | 100% | 99% | 92% | 94% | | | |
| | IDENTITY | 60% | 37% | 57% | 38% | | 100% | 41% | 42% | 58% | | | |
| PA2594 | SeqID | 10116 | | | | 11714 | 5113 | | | | | | |
| | COVERAGE | 97% | | | | 80% | 100% | | | | | | |
| | IDENTITY | 41% | | | | 45% | 100% | | | | | | |
| PA2634 | SeqID | 10441 | | | | | 5114 | | | | | | |
| | COVERAGE | 74% | | | | | 100% | | | | | | |
| | IDENTITY | 28% | | | | | 100% | | | | | | |
| PA2641 | SeqID | 10226 | 10566 | | | | 5115 | | | 13959 | | | |
| | COVERAGE | 95% | 89% | | | | 100% | | | 95% | | | |
| | IDENTITY | 80% | 37% | | | | 100% | | | 80% | | | |
| PA2671 | SeqID | | | | | | 5116 | | | | | | |
| | COVERAGE | | | | | | 100% | | | | | | |
| | IDENTITY | | | | | | 100% | | | | | | |
| PA2680 | SeqID | 10444 | 10703 | | | 11730 | 5117 | | | 14029 | | | |
| | COVERAGE | 101% | 74% | | | 90% | 100% | | | 101% | | | |
| | IDENTITY | 42% | 30% | | | 43% | 100% | | | 42% | | | |
| PA2684 | SeqID | 10384 | | | | | 5118 | | | | | | |
| | COVERAGE | 99% | | | | | 100% | | | | | | |
| | IDENTITY | 33% | | | | | 100% | | | | | | |
| PA2726 | SeqID | | | | | | 5119 | | | | | | |
| | COVERAGE | | | | | | 100% | | | | | | |
| | IDENTITY | | | | | | | 100% | | | | | |
| PA2742 | SeqID | 10177 | 10660 | 11222 | 11296 | | 5120 | 12628 | 13302 | | | | |
| | COVERAGE | 91% | 97% | 84% | 89% | | 100% | 97% | 97% | | | | |
| | IDENTITY | 64% | 50% | 67% | 47% | | 100% | 55% | 45% | | | | |
| PA3006 | SeqID | | | | | | 5121 | | | | | | |
| | COVERAGE | | | | | | 100% | | | | | | |
| | IDENTITY | | | | | | 100% | | | | | | |
| PA3011 | SeqID | 10151 | 10695 | 11233 | 11293 | | 5122 | 12339 | | 13848 | | | |
| | COVERAGE | 100% | 79% | 100% | 86% | | 100% | 75% | | 100% | | | |
| | IDENTITY | 68% | 40% | 64% | 39% | | 100% | 42% | | 66% | | | |
| PA3013 | SeqID | 10416 | 10494 | 11095 | 11525 | | 5123 | 12461 | | 13750 | | | |
| | COVERAGE | 98% | 80% | 102% | 102% | | 100% | 102% | | 98% | | | |
| | IDENTITY | 64% | 39% | 43% | 41% | | 100% | 40% | | 64% | | | |
| PA3041 | SeqID | 10307 | | | | | 5124 | | | 13777 | | | |
| | COVERAGE | 88% | | | | | 100% | | | 88% | | | |
| | IDENTITY | 32% | | | | | 100% | | | 32% | | | |
| PA3048 | SeqID | 10117 | | 10966 | | | 5125 | | | 14005 | | | |
| | COVERAGE | 99% | | 75% | | | 100% | | | 99% | | | |
| | IDENTITY | 47% | | 45% | | | 100% | | | 47% | | | |
| PA3068 | SeqID | | | | | | 5126 | | | | | | |
| | COVERAGE | | | | | | 100% | | | | | | |
| | IDENTITY | | | | | | 100% | | | | | | |
| PA3121 | SeqID | 10021 | | 11164 | 11363 | | 5127 | 12156 | | 14017 | | | |
| | COVERAGE | 99% | | 99% | 81% | | 100% | 99% | | 99% | | | |
| | IDENTITY | 63% | | 59% | 26% | | 100% | 56% | | 62% | | | |
| PA3153 | SeqID | | | | | | 5128 | | | | | | |
| | COVERAGE | | | | | | 100% | | | | | | |
| | IDENTITY | | | | | | 100% | | | | | | |
| PA3154 | SeqID | | | | | | 5129 | | | | | | |
| | COVERAGE | | | | | | 100% | | | | | | |
| | IDENTITY | | | | | | 100% | | | | | | |
| PA3160 | SeqID | | | | | | 5130 | | | | | | |
| | COVERAGE | | | | | | 100% | | | | | | |
| | IDENTITY | | | | | | 100% | | | | | | |
| PA3279 | SeqID | | | | | | 5131 | | | | | | |
| | COVERAGE | | | | | | 100% | | | | | | |
| | IDENTITY | | | | | | 100% | | | | | | |
| PA3280 | SeqID | | | | | | 5132 | | | | | | |
| | COVERAGE | | | | | | 100% | | | | | | |
| | IDENTITY | | | | | | 100% | | | | | | |
| PA3374 | SeqID | 10452 | | | | | 5133 | | | | | | |
| | COVERAGE | 99% | | | | | 100% | | | | | | |
| | IDENTITY | 55% | | | | | | 100% | | | | | |
| PA3479 | SeqID | | | | | | 5134 | | | | | | |
| | COVERAGE | | | | | | 100% | | | | | | |
| | IDENTITY | | | | | | 100% | | | | | | |
| PA3484 | SeqID | | | | | | 5135 | | | | | | |
| | COVERAGE | | | | | | 100% | | | | | | |
| | IDENTITY | | | | | | 100% | | | | | | |
| PA3522 | SeqID | 10331 | | 11145 | 11516 | | 5136 | | | 13719 | | | |
| | COVERAGE | 98% | | 99% | 99% | | 100% | | | 99% | | | |
| | IDENTITY | 41% | | 30% | 26% | | 100% | | | 40% | | | |
| PA3643 | SeqID | 10046 | | 11173 | 11378 | | 5137 | | | 13912 | | | |
| | COVERAGE | 99% | | 100% | 79% | | 100% | | | 99% | | | |
| | IDENTITY | 53% | | 51% | 30% | | 100% | | | 52% | | | |
| PA3703 | SeqID | 10194 | | | | | 5138 | | | 13751 | | | |
| | COVERAGE | 100% | | | | | 100% | | | 100% | | | |
| | IDENTITY | 30% | | | | | 100% | | | 31% | | | |
| PA3709 | SeqID | | | | | | 5139 | | | | | | |
| | COVERAGE | | | | | | 100% | | | | | | |
| | IDENTITY | | | | | | 100% | | | | | | |
| PA3716 | SeqID | | | | | | 5140 | | | | | | |
| | COVERAGE | | | | | | 100% | | | | | | |
| | IDENTITY | | | | | | 100% | | | | | | |
| PA3764 | SeqID | 10255 | | 10991 | | | 5141 | | | 13793 | | | |
| | COVERAGE | 94% | | 91% | | | 100% | | | 82% | | | |
| | IDENTITY | 38% | | 41% | | | 100% | | | 39% | | | |
| PA3845 | SeqID | 10277 | | 11200 | | | 5142 | | | 13882 | | | |
| | COVERAGE | 98% | | 98% | | | 100% | | | 98% | | | |
| | IDENTITY | 34% | | 30% | | | 100% | | | 35% | | | |
| PA3866 | SeqID | | | | | | 5143 | | | | | | |
| | COVERAGE | | | | | | 100% | | | | | | |
| | IDENTITY | | | | | | 100% | | | | | | |
| PA3876 | SeqID | 10144 | | | | | 5144 | | | 13840 | | | |
| | COVERAGE | 97% | | | | | 100% | | | 97% | | | |
| | IDENTITY | 61% | | | | | 100% | | | 58% | | | |
| PA3877 | SeqID | 10161 | | | | | 5145 | 12699 | | 13831 | | | |
| | COVERAGE | 98% | | | | | 100% | 92% | | 98% | | | |
| | IDENTITY | 28% | | | | | 100% | 27% | | 27% | | | |
| PA3931 | SeqID | 10050 | 10833 | 11067 | 11460 | 11656 | 5146 | 12548 | 13173 | 13720 | | | |
| | COVERAGE | 82% | 92% | 103% | 92% | 82% | 100% | 96% | 109% | 95% | | | |
| | IDENTITY | 50% | 43% | 41% | 49% | 48% | 100% | 44% | 36% | 35% | | | |
| PA3984 | SeqID | 10087 | | 11002 | | 11674 | 5147 | | | 14061 | | | |
| | COVERAGE | 97% | | 98% | | 91% | 100% | | | 99% | | | |
| | IDENTITY | 40% | | 37% | | 39% | 100% | | | 40% | | | |
| PA4024 | SeqID | 10244 | 10700 | | | 11736 | 5148 | | | 13951 | | | |
| | COVERAGE | 95% | 95% | | | 71% | 100% | | | 95% | | | |
| | IDENTITY | 50% | 50% | | | 72% | 100% | | | 50% | | | |
| PA4027 | SeqID | | | | | | 5149 | | | | | | |
| | COVERAGE | | | | | | 100% | | | | | | |
| | IDENTITY | | | | | | 100% | | | | | | |
| PA4037 | SeqID | 10102 | 10563 | 11194 | 11527 | 11725 | 5150 | 12958 | 13296 | 14002 | | | |
| | COVERAGE | 72% | 83% | 72% | 72% | 72% | 100% | 70% | 71% | 72% | | | |
| | IDENTITY | 35% | 30% | 33% | 34% | 33% | 100% | 35% | 31% | 34% | | | |
| PA4067 | SeqID | 10149 | | | | | 5151 | | | 13845 | | | |
| | COVERAGE | 98% | | | | | 100% | | | 99% | | | |
| | IDENTITY | 44% | | | | | 100% | | | 43% | | | |
| PA4070 | SeqID | 10159 | | | | | 5152 | | | | | | |
| | COVERAGE | 96% | | | | | 100% | | | | | | |
| | IDENTITY | 28% | | | | | 100% | | | | | | |
| PA408 | 1 | SeqID | | | | | | 5153 | | | | | |
| | COVERAGE | | | | | | 100% | | | | | | |
| | IDENTITY | | | | | | 100% | | | | | | |
| PA4105 | SeqID | | | | | | 5154 | | | | | | |
| | COVERAGE | | | | | | 100% | | | | | | |
| | IDENTITY | | | | | | 100% | | | | | | |
| PA4124 | SeqID | | | | | | 5155 | | | 14023 | | | |
| | COVERAGE | | | | | | 100% | | | 93% | | | |
| | IDENTITY | | | | | | 100% | | | 64% | | | |
| PA4125 | SeqID | | | | | | 5156 | | | 14024 | | | |
| | COVERAGE | | | | | | 100% | | | 94% | | | |
| | IDENTITY | | | | | | 100% | | | 67% | | | |
| PA4158 | SeqID | 10080 | 10610 | 11009 | 11379 | 11769 | 5157 | 12297 | | 13725 | | | |
| | COVERAGE | 98% | 95% | 88% | 83% | 74% | 100% | 96% | | 97% | | | |
| | IDENTITY | 61% | 38% | 31% | 28% | 61% | 100% | 50% | | 61% | | | |
| PA4237 | SeqID | 10333 | 10542 | 11123 | 11582 | | 5158 | 12232 | 13224 | 14093 | | | |
| | COVERAGE | 91% | 97% | 98% | 90% | | 100% | 92% | 97% | 91% | | | |
| | IDENTITY | 79% | 43% | 76% | 43% | | 100% | 45% | 42% | 79% | | | |
| PA4242 | SeqID | 10338 | 10538 | 11117 | 11428 | | 5159 | | | | | | |
| | COVERAGE | 100% | 100% | 100% | | 100% | 100% | | | | | | |
| | IDENTITY | 87% | 68% | 76% | 74% | | 100% | | | | | | |
| PA4244 | SeqID | 10340 | 10534 | 11116 | | | 5160 | 12225 | 13217 | 14099 | | | |
| | COVERAGE | 100% | 100% | 100% | 100% | | | 100% | 100% | 100% | | | |
| | IDENTITY | 65% | 46% | 63% | | | 100% | 42% | 43% | 65% | | | |
| PA4245 | SeqID | 10341 | 10532 | 11115 | | | 5161 | 12223 | 13216 | 13812 | | | |
| | COVERAGE | 95% | 98% | 95% | | | 100% | 98% | 98% | 78% | | | |
| | IDENTITY | 56% | 42% | 58% | | | 100% | 42% | 40% | 33% | | | |
| PA4246 | SeqID | 10342 | 10531 | 11114 | 11432 | | 5162 | 12222 | 13215 | 14101 | | | |
| | COVERAGE | 100% | 92% | 99% | 88% | | 100% | 99% | 92% | 100% | | | |
| | IDENTITY | 77% | 52% | 74% | 49% | | 100% | 52% | 53% | 77% | | | |
| PA4247 | SeqID | 10343 | 10530 | 11113 | 11433 | | 5163 | 12221 | 13214 | 14102 | | | |
| | COVERAGE | 99% | 98% | 99% | 97% | | 100% | 98% | 98% | 99% | | | |
| | IDENTITY | 59% | 52% | 63% | 37% | | 100% | 48% | 54% | 59% | | | |
| PA4248 | SeqID | 10344 | 10529 | 11112 | 11434 | | 5164 | 12220 | 13571 | 14103 | | | |
| | COVERAGE | 100% | 99% | 100% | 99% | | 100% | 99% | 99% | 100% | | | |
| | IDENTITY | 62% | 49% | 66% | 50% | | 100% | 43% | 47% | 62% | | | |
| PA4249 | SeqID | 10345 | 10528 | 11111 | 11435 | | 5165 | 13033 | 13212 | 14104 | | | |
| | COVERAGE | 99% | 102% | 99% | 100% | | 100% | 102% | 102% | 99% | | | |
| | IDENTITY | 64% | 46% | 64% | 40% | | 100% | 44% | 47% | 64% | | | |
| PA4250 | SeqID | 10346 | 10599 | 11110 | | | 5166 | 12737 | 13211 | 14105 | | | |
| | COVERAGE | 100% | 100% | 100% | | | 100% | 100% | 100% | 100% | | | |
| | IDENTITY | 69% | 43% | 63% | | | 100% | 46% | 53% | 67% | | | |
| PA4251 | SeqID | 10347 | 10527 | 11109 | 11589 | 11654 | 5167 | 12218 | 13210 | 14106 | | | |
| | COVERAGE | 99% | 99% | 99% | 99% | 99% | 100% | 90% | 98% | 99% | | | |
| | IDENTITY | 69% | 58% | 68% | 48% | 69% | 100% | 63% | 61% | 68% | | | |
| PA4252 | SeqID | 10348 | 10526 | 11108 | | | 5168 | 12217 | 13209 | 14107 | | | |
| | COVERAGE | 97% | 92% | 94% | | | 100% | 98% | 92% | 96% | | | |
| | IDENTITY | 65% | 49% | 62% | | | 100% | 49% | 46% | 64% | | | |
| PA4253 | SeqID | 10349 | 10525 | 11107 | 11436 | | 5169 | 12216 | 13208 | 14108 | | | |
| | COVERAGE | 101% | 100% | 101% | 100% | | 100% | 100% | 100% | 101% | | | |
| | IDENTITY | 85% | 66% | 85% | 65% | | 100% | 66% | 66% | 84% | | | |
| PA4254 | SeqID | 10350 | 10524 | 11106 | 11437 | | 5170 | 12215 | 13207 | | | | |
| | COVERAGE | 90% | 98% | 90% | 84% | | 100% | 89% | 89% | | | | |
| | IDENTITY | 71% | 53% | 62% | 45% | | 100% | 55% | 56% | | | | |
| PA4256 | SeqID | 10352 | 10560 | 11104 | 11439 | | 5171 | 12260 | 13204 | 13968 | | | |
| | COVERAGE | 100% | 100% | 100% | 96% | | 100% | 98% | 98% | 100% | | | |
| | IDENTITY | 77% | 54% | 77% | 65% | | 100% | 58% | 57% | 77% | | | |
| PA4257 | SeqID | 10353 | 10559 | 11103 | 11592 | | 5172 | 12259 | 13203 | 13969 | | | |
| | COVERAGE | 99% | 91% | 100% | 99% | | 100% | 91% | 93% | 99% | | | |
| | IDENTITY | 74% | 61% | 72% | 55% | | 100% | 57% | 59% | 74% | | | |
| PA4258 | SeqID | 10354 | 10558 | 11102 | 11593 | | 5173 | 12258 | 13202 | 13970 | | | |
| | COVERAGE | 100% | 91% | 100% | 95% | | 100% | 99% | 91% | 100% | | | |
| | IDENTITY | 69% | 57% | 70% | 41% | | 100% | 48% | 58% | 69% | | | |
| PA4259 | SeqID | 10355 | 10557 | 11101 | 11594 | | 5174 | 12255 | 13201 | | | | |
| | COVERAGE | 100% | 101% | 100% | 99% | | 100% | 100% | 100% | | | | |
| | IDENTITY | 82% | 70% | 84% | 61% | | 100% | 63% | 67% | | | | |
| PA4262 | SeqID | 10358 | 10549 | 11098 | 11595 | | 5175 | 12240 | 13198 | 13973 | | | |
| | COVERAGE | 100% | 95% | 100% | 96% | | 100% | 101% | 97% | 100% | | | |
| | IDENTITY | 68% | 45% | 72% | 36% | | 100% | 46% | 44% | 68% | | | |
| PA4263 | SeqID | 10359 | | 11097 | 11442 | | 5176 | 12235 | 13197 | 13974 | | | |
| | COVERAGE | 99% | | 98% | 91% | | 100% | 103% | 99% | 99% | | | |
| | IDENTITY | 75% | | 73% | 35% | | 100% | 46% | 51% | 75% | | | |
| PA4264 | SeqID | 10360 | 10533 | 11096 | 11443 | 11643 | 5177 | | 13196 | 13975 | | | |
| | COVERAGE | 100% | 75% | 100% | 95% | 100% | 100% | | 99% | 100% | | | |
| | IDENTITY | 90% | 58% | 92% | 57% | 92% | 100% | | 61% | 91% | | | |
| PA4268 | SeqID | 10365 | 10479 | 11062 | 11409 | | 5178 | 12445 | 13231 | 13967 | | | |
| | COVERAGE | 100% | 111% | 100% | 100% | | 100% | 111% | 111% | 100% | | | |
| | IDENTITY | 89% | 70% | 89% | 75% | | 100% | 68% | 70% | 89% | | | |
| PA4269 | SeqID | 10439 | 10627 | 11036 | 11410 | | 5179 | 12446 | 13646 | 14042 | | | |
| | COVERAGE | 100% | 100% | 100% | 109% | | 100% | 101% | 99% | 100% | | | |
| | IDENTITY | 76% | 46% | 73% | 47% | | 100% | 46% | 45% | 75% | | | |
| PA4271 | SeqID | 10437 | 10615 | 11072 | 11572 | | 5180 | 12449 | 13247 | 14044 | | | |
| | COVERAGE | 100% | 101% | 101% | 102% | | 100% | 98% | 100% | 100% | | | |
| | IDENTITY | 66% | 65% | 66% | 54% | | 100% | 58% | 58% | 64% | | | |
| PA4272 | SeqID | 10436 | 10614 | 11071 | | | 5181 | 12450 | 13246 | 14045 | | | |
| | COVERAGE | 99% | 95% | 100% | | | 100% | 99% | 95% | 99% | | | |
| | IDENTITY | 68% | 40% | 66% | | | 100% | 39% | 42% | 65% | | | |
| PA4316 | SeqID | 10200 | | 11235 | | | 5182 | | | 13821 | | | |
| | COVERAGE | 88% | | 90% | | | 100% | | | 91% | | | |
| | IDENTITY | 51% | | 47% | | | 100% | | | 51% | | | |
| PA4332 | SeqID | | | | | | 5183 | | | | | | |
| | COVERAGE | | | | | | 100% | | | | | | |
| | IDENTITY | 1 | | | | | | 100% | | | | | |
| PA4347 | SeqID | | | | | 11699 | 5184 | | | | | | |
| | COVERAGE | | | | | 86% | 100% | | | | | | |
| | IDENTITY | | | | | 27% | 100% | | | | | | |
| PA4363 | SeqID | 10292 | | | | 11740 | 5185 | | | 13742 | | | |
| | COVERAGE | 95% | | | | 81% | 100% | | | 95% | | | |
| | IDENTITY | 40% | | | | 36% | 100% | | | 41% | | | |
| PA4375 | SeqID | 10072 | | 11145 | 11516 | | 5186 | | | 13719 | | | |
| | COVERAGE | 101% | | 100% | 100% | | 100% | | | 101% | | | |
| | IDENTITY | 33% | | 45% | 28% | | 100% | | | 33% | | | |
| PA4413 | SeqID | 10030 | 10805 | 11188 | 11458 | | 5187 | 12360 | 13333 | 14077 | | | |
| | COVERAGE | 90% | 94% | 92% | 93% | | 100% | 93% | 98% | 90% | | | |
| | IDENTITY | 45% | 33% | 41% | 30% | | 100% | 33% | 32% | 44% | | | |
| PA4433 | SeqID | 10327 | 10602 | 11241 | 11289 | 11655 | 5188 | 12237 | 13356 | 13729 | | | |
| | COVERAGE | 100% | 99% | 100% | 94% | 72% | 100% | 99% | 99% | 100% | | | |
| | IDENTITY | 75% | 59% | 73% | 54% | 76% | 100% | 55% | 56% | 72% | | | |
| PA4473 | SeqID | 10463 | | 11195 | | | 5189 | | | 13986 | | | |
| | COVERAGE | 84% | | 81% | | | 100% | | | 84% | | | |
| | IDENTITY | 39% | | 37% | | | 100% | | | 39% | | | |
| PA4506 | SeqID | 10381 | 10658 | 11198 | 11314 | 11717 | 5190 | 12850 | 13248 | 13800 | | | |
| | COVERAGE | 99% | 77% | 98% | 79% | 91% | 100% | 99% | 81% | 99% | | | |
| | IDENTITY | 58% | 48% | 60% | 51% | 59% | 100% | 46% | 42% | 58% | | | |
| PA4512 | SeqID | | | | | | 5191 | | | 13815 | | | |
| | COVERAGE | 100% | | | | | | | | 99% | | | |
| | IDENTITY | | | | | | 100% | | | 57% | | | |
| PA4542 | SeqID | 10258 | 10628 | 11134 | 11489 | | 5192 | 12526 | 13421 | 14088 | | | |
| | COVERAGE | 100% | 101% | 100% | 100% | | 100% | 101% | 80% | 100% | | | |
| | IDENTITY | 71% | 47% | 70% | 49% | | 100% | 52% | 46% | 71% | | | |
| PA4576 | SeqID | | | | | | 5193 | | | | | | |
| | COVERAGE | | | | | | 100% | | | | | | |
| | IDENTITY | | | | | | 100% | | | | | | |
| PA4598 | SeqID | 10072 | | 11145 | 11516 | | 5194 | | | 13719 | | | |
| | COVERAGE | 100% | | 100% | 99% | | 100% | | | 100% | | | |
| | IDENTITY | 50% | | 29% | 28% | | 100% | | | 50% | | | |
| PA4665 | SeqID | 10143 | 10826 | 11251 | 11287 | 11675 | 5195 | 12380 | 13336 | 13979 | | | |
| | COVERAGE | 100% | 97% | 101% | 97% | 100% | 100% | 98% | 99% | 100% | | | |
| | IDENTITY | 66% | 54% | 64% | 52% | 65% | 100% | 53% | 50% | 66% | | | |
| PA4681 | SeqID | | | | | | 5196 | | | | | | |
| | COVERAGE | | | | | | 100% | | | | | | |
| | IDENTITY | | | | | | 100% | | | | | | |
| PA4709 | SeqID | | | | | | 5197 | | | | | | |
| | COVERAGE | | | | | | 100% | | | | | | |
| | IDENTITY | | | | | | 100% | | | | | | |
| PA4744 | SeqID | 10314 | | 11216 | 11501 | | 5198 | 12322 | 13663 | 13765 | | | |
| | COVERAGE | 107% | | 98% | 93% | | 100% | 78% | 91% | 107% | | | |
| | IDENTITY | 58% | | 58% | 39% | | 100% | 48% | 43% | 58% | | | |
| PA4771 | SeqID | 10387 | 11280 | 5199 | | | 13402 | 13828 | | | | | |
| | COVERAGE | 100% | | 99% | | | 100% | | 96% | 97% | | | |
| | IDENTITY | 87% | | 75% | | | 100% | | 33% | 33% | | | |
| PA4888 | SeqID | | | | | | 5200 | | | | | | |
| | COVERAGE | | | | | | 100% | | | | | | |
| | IDENTITY | | | | | | 100% | | | | | | |
| PA4942 | SeqID | 10455 | | 10972 | | | 5201 | | | 13856 | | | |
| | COVERAGE | 93% | | 91% | | | 100% | | | 95% | | | |
| | IDENTITY | 48% | | 41% | | | 100% | | | 48% | | | |
| PA4997 | SeqID | 10115 | 10619 | 10960 | 11394 | | 5202 | 12501 | 13458 | 14006 | | | |
| | COVERAGE | 86% | 82% | 97% | 83% | | 100% | 96% | 97% | 86% | | | |
| | IDENTITY | 43% | 36% | 44% | 31% | | 100% | 37% | 32% | 44% | | | |
| PA5030 | SeqID | 10165 | | | | | 5203 | | | | | | |
| | COVERAGE | 90% | | | | | 100% | | | | | | |
| | IDENTITY | 64% | | | | | 100% | | | | | | |
| PA5076 | SeqID | 10197 | 10796 | 11176 | 11383 | 11694 | 5204 | | 13292 | 14057 | | | |
| | COVERAGE | 94% | 82% | 97% | 97% | 90% | 100% | | 98% | 94% | | | |
| | IDENTITY | 29% | 33% | 27% | 26% | 29% | 100% | | 30% | 30% | | | |
| PA5088 | SeqID | | | | | | 5205 | | | | | | |
| | COVERAGE | | | | | | 100% | | | | | | |
| | IDENTITY | | | | | | 100% | | | | | | |
| PA5193 | SeqID | 10373 | | 11126 | | 11709 | 5206 | | | 13808 | | | |
| | COVERAGE | 100% | | 96% | | 77% | 100% | | | 100% | | | |
| | IDENTITY | 41% | | 39% | | 42% | 100% | | | 41% | | | |
| PA5199 | SeqID | 10375 | 10596 | | | 11711 | 5207 | | | 13810 | | | |
| | COVERAGE | 102% | 71% | | | 102% | 100% | | | 103% | | | |
| | IDENTITY | 33% | 26% | | | 34% | 100% | | | 32% | | | |
| PA5207 | SeqID | | | 11260 | 11612 | | 5208 | 12730 | | | | | |
| | COVERAGE | | | 100% | 88% | | 100% | 100% | | | | | |
| | IDENTITY | | | 54% | 39% | | 100% | 28% | | | | | |
| PA5209 | SeqID | 10302 | | | | | 5209 | | | 13758 | | | |
| | COVERAGE | 90% | | | | | 100% | | | 89% | | | |
| | IDENTITY | 29% | | | | | 100% | | | 28% | | | |
| PA5248 | SeqID | | | | | | 5210 | | | | | | |
| | COVERAGE | | | | | | 100% | | | | | | |
| | IDENTITY | | | | | | 100% | | | | | | |
| PA5299 | SeqID | | | | | | 5211 | | | | | | |
| | COVERAGE | | | | | | 100% | | | | | | |
| | IDENTITY | | | | | | 100% | | | | | | |
| PA5316 | SeqID | 10391 | | 11158 | 11327 | | 5212 | 12129 | | | | | |
| | COVERAGE | 100% | | 99% | 78% | | 100% | 73% | | | | | |
| | IDENTITY | 82% | | 79% | 39% | | 100% | 40% | | | | | |
| PA5388 | SeqID | | 10503 | | | | 5213 | | | | | | |
| | COVERAGE | | 85% | | | | 100% | | | | | | |
| | IDENTITY | | 28% | | | | 100% | | | | | | |
| PA5393 | SeqID | | | | | | 5214 | | | | | | |
| | COVERAGE | | | | | | 100% | | | | | | |
| | IDENTITY | | | | | | 100% | | | | | | |
| PA5436 | SeqID | 10330 | 10924 | 11160 | 11321 | | 5215 | 13127 | 13617 | 13885 | | | |
| | COVERAGE | 94% | 94% | 94% | 94% | | 100% | 94% | 94% | 94% | | | |
| | IDENTITY | 52% | 51% | 52% | 46% | | 100% | 55% | 54% | 52% | | | |
| PA5443 | SeqID | 10413 | 10788 | 11199 | 11452 | | 5216 | 12489 | 13643 | 13748 | | | |
| | COVERAGE | 100% | 103% | 100% | 96% | | 100% | 100% | 105% | 100% | | | |
| | IDENTITY | 64% | 38% | 56% | 35% | | 100% | 38% | 39% | 64% | | | |
| PA5490 | SeqID | | | | | | 5217 | | | | | | |
| | COVERAGE | | | | | | 100% | | | | | | |
| | IDENTITY | | | | | | 100% | | | | | | |
| PA5493 | SeqID | 10417 | 10668 | 11133 | 11609 | | 5218 | 12623 | 13236 | | | | |
| | COVERAGE | 102% | 102% | 102% | 102% | | 100% | 100% | 101% | | | | |
| | IDENTITY | 62% | 37% | 58% | 31% | | 100% | 38% | 37% | | | | |
| PA5507 | SeqID | 10119 | | | | | 5219 | | | | | | |
| | COVERAGE | 99% | | | | | 100% | | | | | | |
| | IDENTITY | 31% | | | | | 100% | | | | | | |
| PA5567 | SeqID | 10397 | 10911 | 11169 | 11450 | | 5220 | 12703 | 13338 | 13923 | | | |
| | COVERAGE | 99% | 103% | 99% | 100% | | 100% | 102% | 101% | 99% | | | |
| | IDENTITY | 67% | 39% | 64% | 33% | | 100% | 34% | 37% | 67% | | | |

[0779] TABLE VIIB

| | | | | Staphyl- |
|---|---|---|---|---|
| PathoSeq | Enterococcus | Escherichia | Pseudomonas | ococcus |
| Cluster ID | faecalis | coli | aeruginosa | aureus |
| 15 | EFA102326 | ECO101796 | PAE100280 | SAU102515 |
| 55 | EFA100151 | ECO104157 | PAE100416 | SAU100633 |
| 57 | EFA100617 | ECO102690 | PAE105434 | SAU100158 |
| 1443 | EFA100689 | ECO103692 | PAE101987 | SAU100952 |
| 1861 | EFA101412 | ECO103231 | PAE104331 | SAU101793 |
| 2286 | EFA103268 | ECO103265 | PAE104314 | SAU101756 |
| 2362 | EFA101425 | ECO100662 | PAE101537 | SAU101236 |
| 2367 | EFA101417 | ECO103226 | PAE103206 | SAU101798 |
| 2549 | EFA101410 | ECO103233 | PAE104329 | SAU101791 |
| 3816 | EFA101159 | ECO103243 | PAE104319 | SAU100546 |
| 3857 | EFA101415 | ECO103228 | PAE103204 | SAU101796 |
| 4322 | EFA101165 | ECO103237 | PAE104325 | SAU100141 |
| 4569 | EFA100955 | ECO103217 | PAE103215 | SAU101808 |
| 4948 | EFA101160 | ECO103242 | PAE104320 | SAU100547 |
| 5818 | EFA100742 | ECO103224 | PAE103208 | SAU101800 |
| 8159 | EFA101163 | ECO103239 | PAE104323 | SAU100139 |
| 8296 | EFA101164 | ECO103238 | PAE104324 | SAU100140 |
| 8316 | EFA101409 | ECO103234 | PAE104328 | SAU101790 |
| 8494 | EFA103062 | ECO103884 | PAE104311 | SAU100433 |
| 8498 | EFA101411 | ECO103232 | PAE104330 | SAU101792 |
| 8499 | EFA101416 | ECO103227 | PAE103205 | SAU101797 |
| 7 | | ECO100071 | PAE100837 | SAU102674 |
| 8 | EFA101340 | | PAE106580 | SAU100118 |
| 28 | EFA101403 | | PAE102647 | SAU100514 |
| 41 | EFA101753 | ECO100148 | | SAU101565 |
| 63 | EFA101685 | | PAE103857 | SAU100331 |
| 147 | | ECO100645 | PAE100543 | SAU100053 |
| 548 | | ECO100377 | PAE100604 | SAU100747 |
| 730 | | ECO103592 | PAE103108 | SAU100061 |
| 1721 | EFA101686 | ECO100663 | | SAU101996 |
| 1749 | EFA101477 | ECO102557 | | SAU100613 |
| 2153 | EFA102656 | ECO100184 | SAU101869 | |
| 2790 | EFA102764 | ECO100500 | SAU101578 | |
| 3164 | EFA101162 | ECO103240 | | SAU102602 |
| 3312 | EFA103174 | | PAE105008 | SAU100521 |
| 3926 | EFA100194 | ECO103220 | | SAU101806 |
| 4441 | EFA102541 | | PAE105364 | SAU101814 |
| 5685 | EFA100190 | ECO103264 | | SAU100157 |
| 7417 | EFA102788 | ECO101684 | | SAU102992 |
| 7437 | EFA102351 | ECO100084 | | SAU100056 |
| 7579 | | ECO102470 | PAE102641 | SAU100607 |
| 7726 | EFA102551 | ECO103221 | | SAU101805 |
| 7727 | EFA100978 | ECO103218 | | SAU101807 |
| 8092 | | ECO102035 | PAE102964 | SAU100794 |
| 8158 | EFA103365 | | PAE104318 | SAU102880 |
| 8161 | EFA100210 | | PAE104326 | SAU102527 |
| 8162 | EFA101414 | | PAE103203 | SAU101795 |
| 8164 | EFA100741 | ECO103223 | | SAU101801 |
| 8493 | EFA101141 | | PAE104310 | SAU100432 |
| 10185 | EFA102728 | ECO104092 | | SAU102578 |
| 35 | | ECO102870 | | SAU100497 |
| 44 | | | PAE101061 | SAU101143 |
| 54 | | | PAE100225 | SAU100123 |
| 85 | | ECO101104 | | SAU101262 |
| 184 | | | PAE104901 | SAU101366 |
| 362 | EFA102736 | | | SAU 100414 |
| 575 | EFA101790 | | | SAU100133 |
| 579 | EFA102110 | | | SAU101624 |
| 911 | | | PAE105432 | SAU102054 |
| 941 | | ECO101365 | | SAU102162 |
| 952 | EFA100615 | | | SAU100964 |
| 1084 | EFA100289 | ECO102819 | | |
| 1141 | | ECO102255 | | SAU102356 |
| 1232 | | ECO100703 | | SAU101346 |
| 1274 | | | PAE103655 | SAU102264 |
| 1337 | | ECO102562 | | SAU100567 |
| 1350 | | ECO100930 | PAE103901 | |
| 1374 | | ECO103659 | | SAU101385 |
| 1427 | EFA100394 | | | SAU100714 |
| 1535 | | ECO101207 | | SAU101561 |
| 1653 | EFA102655 | | | SAU101868 |
| 1849 | EFA100642 | | | SAU101653 |
| 1932 | EFA100919 | | | SAU101365 |
| 2156 | EFA101150 | | | SAU101271 |
| 2189 | | ECO102827 | PAE100476 | |
| 2238 | | ECO101436 | | SAU101092 |
| 2338 | EFA103038 | | | SAU100518 |
| 2411 | EFA102802 | | | SAU102246 |
| 2501 | EFA101121 | | | SAU100996 |
| 2974 | | | PAE102537 | SAU102125 |
| 3027 | | ECO103959 | | SAU200242 |
| 3239 | EFA103021 | | | SAU100300 |
| 3244 | EFA100399 | | | SAU101891 |
| 3386 | EFA100426 | | | SAU100886 |
| 3447 | EFA102915 | | | SAU102112 |
| 3460 | EFA102023 | | | SAU101399 |
| 3682 | EFA100740 | | | SAU101802 |
| 3771 | EFA101540 | | | SAU100275 |
| 4424 | EFA102542 | | | SAU101815 |
| 4654 | | ECO100488 | PAE106184 | |
| 5148 | EFA100065 | | | SAU100658 |
| 7227 | EFA100023 | | | SAU100436 |
| 7240 | | ECO103672 | | SAU101682 |
| 7278 | | | PAE101620 | SAU301370 |
| 7374 | | | PAE106765 | SAU103042 |
| 7375 | EFA102051 | | | SAU103038 |
| 7402 | | ECO103572 | PAE106044 | |
| 7419 | | ECO101686 | | SAU102693 |
| 7436 | EFA101792 | | | SAU101495 |
| 7504 | EFA101670 | | | SAU102603 |
| 7653 | EFA100397 | | | SAU100246 |
| 7660 | EFA102352 | ECO103698 | | |
| 7719 | EFA100756 | | | SAU100496 |
| 7725 | EFA100739 | | | SAU101803 |
| 8040 | EFA101736 | | | SAU101197 |
| 8058 | EFA103571 | | | SAU101242 |
| 8077 | EFA100200 | | | SAU102231 |
| 8082 | EFA101080 | | | SAU100199 |
| 8116 | EFA101963 | | | SAU101028 |
| 8122 | EFA101737 | | | SAU101198 |
| 8141 | EFA102780 | | | SAU102433 |
| 8177 | EFA103348 | | | SAU202126 |
| 8178 | EFA101022 | | | SAU102283 |
| 8181 | EFA101541 | | | SAU102909 |
| 8191 | EFA102022 | | | SAU101398 |
| 8234 | EFA103033 | | | SAU100745 |
| 8237 | EFA101682 | | | SAU101266 |
| 8238 | EFA103295 | | | SAU100963 |
| 8251 | | | PAE100662 | SAU100596 |
| 8300 | EFA101120 | | | SAU100944 |
| 8539 | EFA101339 | | | SAU101400 |
| 8610 | | ECO103661 | | SAU102298 |
| 8874 | EFA100748 | | | SAU101155 |
| 9028 | EFA103210 | | | SAU100731 |
| 9996 | EFA102338 | | | SAU100175 |
| 10234 | EFA102186 | | | SAU102933 |
| 10248 | | ECO102828 | | SAU101220 |
| 10297 | | | PAE105229 | SAU101381 |
| 10328 | EFA101079 | | | SAU101547 |
| 10345 | EFA100298 | | | SAU100659 |
| 10365 | EFA100641 | | | SAU101655 |
| 10393 | EFA103504 | | | SAU100961 |
| 10402 | EFA101833 | | | SAU100880 |
| 12426 | EFA101413 | | | SAU101794 |
| 14277 | EFA103081 | | | SAU200088 |
| 14330 | EFA101161 | | | SAU102881 |
| 14455 | EFA101424 | | | SAU101771 |
| 14520 | EFA100211 | | | SAU101789 |
| 15660 | EFA103375 | | | SAU102694 |

### Example 13

### Use of Identified Nucleic Acid Sequences as Probes

[0780] The sequences from Staphylococcus aureus, Salmonella typhimurium, Klebsiella pneumoniae, Pseudomonas aeruginosa, Enterococcus faecalis, Escherichia coli, Enterococcus faecalis, Haemophilus influenzae, Helicobacter pylori, or Salmonella typhi described herein, homologous coding nucleic acids, or homologous antisense nucleic acids can be used as probes to obtain the sequence of additional genes of interest from a second cell or microorganism. For example, probes to genes encoding potential bacterial target proteins may be hybridized to nucleic acids from other organisms including other bacteria and higher organisms, to identify homologous sequences in these other organisms. For example, the identified sequences from Staphylococcus aureus, Salmonella typhimurium, Klebsiella pneumoniae, Pseudomonas aeruginosa, Enterococcus faecalis, Escherichia coli, Enterococcus faecalis, Haemophilus influenzae, Helicobacter pylori, or Salmonella typhi, homologous coding nucleic acids, or homologous antisense nucleic acids may be used to identify homologous sequences in Anaplasma marginale, Aspergillus fumigatus, Bacillus anthracis, Bacterioides fragilis Bordetella pertussis, Burkholderia cepacia, Campylobacter jejuni, Candida albicans, Candida glabrata (also called Torulopsis glabrata), Candida tropicalis, Candida parapsilosis, Candida guilliermondii, Candida krusei, Candida kefyr (also called Candida pseudotropicalis), Candida dubliniensis, Chlamydia pneumoniae, Chlamydia trachomatus, Clostridium botulinum, Clostridium difficile, Clostridium perfringens, Coccidiodes immitis, Corynebacterium diptheriae, Cryptococcus neoformans, Enterobacter cloacae, Enterococcus faecalis, Enterococcus faecium, Escherichia coli, Haemophilus influenzae, Helicobacter pylori, Histoplasma capsulatum, Klebsiella pneumoniae, Listeria monocytogenes, Mycobacterium leprae, Mycobacterium tuberculosis, Neisseria gonorrhoeae, Neisseria meningitidis, Nocardia asteroides, Pasteurella haemolytica, Pasteurella multocida, Pneumocystis carinii, Proteus vulgaris, Pseudomonas aeruginosa, Salmonella bongori, Salmonella cholerasuis, Salmonella enterica, Salmonella paratyphi, Salmonella typhi, Salmonella typhimurium, Staphylococcus aureus, Listeria monocytogenes, Moxarella catarrhalis, Shigella boydii, Shigella dysenteriae, Shigella flexneri, Shigella sonnei, Staphylococcus epidermidis, Streptococcus pneumoniae, Streptococcus mutans, Treponema pallidum, Yersinia enterocolitica, Yersinia pestis and any species falling within the genera of any of the above species. In some embodiments of the present invention, the nucleic acids from Staphylococcus aureus, Salmonella typhimurium, Klebsiella pneumoniae, Pseudomonas aeruginosa, Enterococcus faecalis, Escherichia coli, Enterococcus faecalis, Haemophilus influenzae, Helicobacter pylori, or Salmonella typhi described herein, homologous coding nucleic acids, or homologous antisense nucleic acids may be used to identify homologous nucleic acids from a heterologous organism other than E. coli.

[0781] Hybridization between the nucleic acids from Staphylococcus aureus, Salmonella typhimurium, Klebsiella pneumoniae, Pseudomonas aeruginosa, Enterococcus faecalis, Escherichia coli, Enterococcus faecalis, Haemophilus influenzae, Helicobacter pylori, or Salmonella typhi described herein, homologous coding nucleic acids, or homologous antisense nucleic acids and nucleic acids from humans might indicate that the protein encoded by the gene to which the probe corresponds is found in humans and therefore not necessarily an optimal drug target. Alternatively, the gene can be conserved only in bacteria and therefore would be a good drug target for a broad spectrum antibiotic or antimicrobial. These probes can also be used in a known manner to isolate homologous nucleic acids from Staphylococcus, Salmonella, Klebsiella, Pseudomonas, Enterococcus or other cells or microorganisms, e.g. by screening a genomic or cDNA library.

[0782] Probes derived from the nucleic acid sequences from Staphylococcus aureus, Salmonella typhimurium, Klebsiella pneumoniae, Pseudomonas aeruginosa, Enterococcus faecalis, Escherichia coli Enterococcus faecalis, Haemophilus influenzae, Helicobacter pylori, or Salmonella typhi described herein, homologous coding nucleic acids, or homologous antisense nucleic acids, or portions thereof, can be labeled with detectable labels familiar to those skilled in the art, including radioisotopes and non-radioactive labels, to provide a detectable probe. The detectable probe can be single stranded or double stranded and can be made using techniques known in the art, including in vitro transcription, nick translation, or kinase reactions. A nucleic acid sample containing a sequence capable of hybridizing to the labeled probe is contacted with the labeled probe. If the nucleic acid in the sample is double stranded, it can be denatured prior to contacting the probe. In some applications, the nucleic acid sample can be immobilized on a surface such as a nitrocellulose or nylon membrane. The nucleic acid sample can comprise nucleic acids obtained from a variety of sources, including genomic DNA, cDNA libraries, RNA, or tissue samples.

[0783] Procedures used to detect the presence of nucleic acids capable of hybridizing to the detectable probe include well known techniques such as Southern blotting, Northern blotting, dot blotting, colony hybridization, and plaque hybridization. In some applications, the nucleic acid capable of hybridizing to the labeled probe can be cloned into vectors such as expression vectors, sequencing vectors, or in vitro transcription vectors to facilitate the characterization and expression of the hybridizing nucleic acids in the sample. For example, such techniques can be used to isolate, purify and clone sequences from a genomic library, made from a variety of bacterial species, which are capable of hybridizing to probes made from the sequences identified in Examples 5 and 6.

### Example 14

### Preparation of PCR Primers and Amplification of DNA

[0784] The identified Staphylococcus aureus, Salmonella typhimurium, Klebsiella pneumoniae, Pseudomonas aeruginosa, Enterococcus faecalis, Escherichia coli, Enterococcus faecalis, Haemophilus influenzae, Helicobacter pylori, or Salmonella typhi genes corresponding directly to or located within the operon of nucleic acid sequences required for proliferation, homologous coding nucleic acids, or homologous antisense nucleic acids or portions thereof can be used to prepare PCR primers for a variety of applications, including the identification or isolation of homologous sequences from other species. For example, the Staphylococcus aureus, Salmonella typhimurium, Klebsiella pneumoniae, Pseudomonas aeruginosa, Enterococcus faecalis, Escherichia coli, Enterococcus faecalis, Haemophilus influenzae, Helicobacter pylori, or Salmonella typhi genes may be used to prepare PCR primers to identify or isolate homologous sequences from Anaplasma marginale, Aspergillus fumigatus, Bacillus anthracis, Bacterioides fragilis Bordetella pertussis, Burkholderia cepacia, Campylobacter jejuni, Candida albicans, Candida glabrata (also called Torulopsis glabrata), Candida tropicalis, Candida parapsilosis, Candida guilliermondii, Candida krusei, Candida kefyr (also called Candida pseudotropicalis), Candida dubliniensis, Chlamydia pneumoniae, Chlamydia trachomatus, Clostridium botulinum, Clostridium difficile, Clostridium perfringens, Coccidiodes immitis, Corynebacterium diptheriae, Cryptococcus neoformans, Enterobacter cloacae, Enterococcus faecalis, Enterococcus faecium, Escherichia coli, Haemophilus influenzae, Helicobacter pylori, Histoplasma capsulatum, Klebsiella pneumoniae, Listeria monocytogenes, Mycobacterium leprae, Mycobacterium tuberculosis, Neisseria gonorrhoeae, Neisseria meningitidis; Nocardia asteroides, Pasteurella haemolytica, Pasteurella multocida, Pneumocystis carinii, Proteus vulgaris, Pseudomonas aeruginosa, Salmonella bongori, Salmonella cholerasuis, Salmonella enterica, Salmonella paratyphi, Salmonella typhi, Salmonella typhimurium, Staphylococcus aureus, Listeria monocytogenes, Moxarella catarrhalis, Shigella boydii, Shigella dysenteriae, Shigella flexneri, Shigella sonnei, Staphylococcus epidermidis, Streptococcus pneumoniae, Streptococcus mutans, Treponema pallidum, Yersinia enterocolitica, Yersinia pestis or any species falling within the genera of any of the above species. In some embodiments of the present invention, the PCR primers may be used to identify or isolate homologous nucleic acids from an organism other than E. coli.

[0785] The identified or isolated nucleic acids obtained using the PCR primers may contain part or all of the homologous nucleic acids. Because homologous nucleic acids are related but not identical in sequence, those skilled in the art will often employ degenerate sequence PCR primers. Such degenerate sequence primers are designed based on sequence regions that are either known to be conserved or suspected to be conserved such as conserved coding regions. The successful production of a PCR product using degenerate probes generated from the sequences identified herein would indicate the presence of a homologous gene sequence in the species being screened. The PCR primers are at least 10 nucleotides, and preferably at least 20 nucleotides in length. More preferably, the PCR primers are at least 20-30 nucleotides in length. In some embodiments, the PCR primers can be more than 30 nucleotides in length. It is preferred that the primer pairs have approximately the same G/C ratio, so that melting temperatures are approximately the same. A variety of PCR techniques are familiar to those skilled in the art. For a review of PCR technology, see Molecular Cloning to Genetic Engineering White, B. A. Ed. in Methods in Molecular Biology 67: Humana Press, Totowa 1997. When the entire coding sequence of the target gene is known, the 5′ and 3′ regions of the target gene can be used as the sequence source for PCR probe generation. In each of these PCR procedures, PCR primers on either side of the nucleic acid sequences to be amplified are added to a suitably prepared nucleic acid sample along with dNTPs and a thermostable polymerase such as Taq polymerase, Pfu polymerase, or Vent polymerase. The nucleic acid in the sample is denatured and the PCR primers are specifically hybridized to complementary nucleic acid sequences in the sample. The hybridized primers are extended. Thereafter, another cycle of denaturation, hybridization, and extension is initiated. The cycles are repeated multiple times to produce an amplified fragment containing the nucleic acid sequence between the primer sites.

### Example 15

### Inverse PCR

[0786] The technique of inverse polymerase chain reaction can be used to extend the known nucleic acid sequence identified in Examples 5 and 6. The inverse PCR reaction is described generally by Ochman et al., in Ch. 10 of PCR Technology: Principles and Applications for DNA Amplification, (Henry A. Erlich, Ed.) W.H. Freeman and Co. (1992). Traditional PCR requires two primers that are used to prime the synthesis of complementary strands of DNA. In inverse PCR, only a core sequence need be known.

[0787] Using the sequences identified as relevant from the techniques taught in Examples 5 and 6 and applied to other species of bacteria, a subset of nucleic sequences are identified that correspond to genes or operons that are required for bacterial proliferation. In species for which a genome sequence is not known, the technique of inverse PCR provides a method for obtaining the gene in order to determine the sequence or to place the probe sequences in full context to the target sequence to which the identified nucleic acid sequence binds.

[0788] To practice this technique, the genome of the target organism is digested with an appropriate restriction enzyme so as to create fragments of nucleic acid that contain the identified sequence as well as unknown sequences that flank the identified sequence. These fragments are then circularized and become the template for the PCR reaction. PCR primers are designed in accordance with the teachings of Example 15 and directed to the ends of the identified sequence. The primers direct nucleic acid synthesis away from the known sequence and toward the unknown sequence contained within the circularized template. After the PCR reaction is complete, the resulting PCR products can be sequenced so as to extend the sequence of the identified gene past the core sequence of the identified exogenous nucleic acid sequence identified. In this manner, the full sequence of each novel gene can be identified. Additionally the sequences of adjacent coding and noncoding regions can be identified.

### Example 16

### Identification of Genes Required for Escherichia coli Proliferation

[0789] Genes required for proliferation in Escherichia coli are identified according to the methods described above.

### Example 17

### Identification of Genes Required for Neisseria gonorrhoeae Proliferation

[0790] Genes required for proliferation in Neisseria gonorrhoeae are identified according to the methods described above.

### Example 18

### Identification of Genes Required for Salmonella enterica Proliferation

[0791] Genes required for proliferation in Salmonella enterica are identified according to the methods described above.

### Example 19

### Identification of Genes Required for Enterococcus faecium Proliferation

[0792] Genes required for proliferation in Enterococcus faecium are identified according to the methods described above.

### Example 20

### Identification of Genes Required for Haemophilus influenzae Proliferation

[0793] Genes required for proliferation in Haemophilus influenzae are identified according to the methods described above.

### Example 21

### Identification of Genes Required for Aspergillus fumigatus Proliferation

[0794] Genes required for proliferation in Aspergillus fumigatus are identified according to the methods described above.

### Example 22

### Identification of Genes Required for Helicobacter pylori Proliferation

[0795] Genes required for proliferation in Helicobacter pylori are identified according to the methods described above.

### Example 23

### Identification of Genes Required for Mycoplasma pneumoniae Proliferation

[0796] Genes required for proliferation in Mycoplasma pneumoniae are identified according to the methods described above.

### Example 24

### Identification of Genes Required for Plasmodium ovale Proliferation

[0797] Genes required for proliferation in Plasmodium ovale are identified according to the methods described above.

### Example 25

### Identification of Genes Required for Entamoeba histolytica Proliferation

[0798] Genes required for proliferation in Entamoeba histolytica are identified according to the methods described above.

### Example 26

### Identification of Genes Required for Candida albicans Proliferation

[0799] Genes required for proliferation in Candida albicans are identified according to the methods described above.

### Example 27

### Identification of Genes Required for Histoplasma capsulatum Proliferation

[0800] Genes required for proliferation in Histoplasma capsulatum are identified according to the methods described above.

### Example 28

### Identification of Genes Required for Salmonella typhi Proliferation

[0801] Genes required for proliferation in Salmonella typhi are identified according to the methods described above.

### Example 29

### Identification of Genes Required for Salmonella paratyphi Proliferation

[0802] Genes required for proliferation in Salmonella paratyphi are identified according to the methods described above.

### Example 30

### Identification of Genes Required for Salmonella cholerasuis Proliferation

[0803] Genes required for proliferation in Salmonella cholerasuis are identified according to the methods described above.

### Example 31

### Identification of Genes Required for Staphylococcus epidermis Proliferation

[0804] Genes required for proliferation in Staphylococcus epidermis are identified according to the methods described above.

### Example 32

### Identification of Genes Required for Mycobacterium tuberculosis Proliferation

[0805] Genes required for proliferation in Mycobacterium tuberculosis are identified according to the methods described above.

### Example 33

### Identification of Genes Required for Mycobacterium leprae Proliferation

[0806] Genes required for proliferation in Mycobacterium leprae are identified according to the methods described above.

### Example 34

### Identification of Genes Required for Treponema pallidum Proliferation

[0807] Genes required for proliferation in Treponema pallidum are identified according to the methods described above.

### Example 35

### Identification of Genes Required for Bacillus anthracis Proliferation

[0808] Genes required for proliferation in Bacillus anthracis are identified according to the methods described above.

### Example 36

### Identification of Genes Required for Yersinia pestis Proliferation

[0809] Genes required for proliferation in Yersinia pestis are identified according to the methods described above.

### Example 37

### Identification of Genes Required for Clostridium botulinum Proliferation

[0810] Genes required for proliferation in Clostridium botulinum are identified according to the methods described above.

### Example 38

### Identification of Genes Required for Campylobacter jejuni Proliferation

[0811] Genes required for proliferation in Campylobacter jejuni are identified according to the methods described above.

### Example 39

### Identification of Genes Required for Chlamydia trachomatis Proliferation

[0812] Genes required for proliferation in Chlamydia trachomatis are identified according to the methods described above.

### Example 40

### Identification of Genes Required for Staphylococcus aureus Proliferation

[0813] Genes required for proliferation in Staphylococcus aureus are identified according to the methods described above.

### Example 41

### Identification of Genes Required for Salmonella typhimurium Proliferation

[0814] Genes required for proliferation in Salmonella typhimurium are identified according to the methods described above.

### Example 42

### Identification of Genes Required for Klebsiella Pneumoniae Proliferation

[0815] Genes required for proliferation in Klebsiella Pneumoniae are identified according to the methods described above.

### Example 43

### Identification of Genes Required for Pseudomonas aeruginosa Proliferation

[0816] Genes required for proliferation in Pseudomonas aeruginosa are identified according to the methods described above.

### Example 44

### Identification of Genes Required for Enterococcus faecalis Proliferation

[0817] Genes required for proliferation in Enterococcus faecalis are identified according to the methods described above.

[0818] Use of Isolated Exogenous Nucleic Acid Fragments as Antisense Antibiotics

[0819] In addition to using the identified sequences to enable screening of molecule libraries to identify compounds useful to identify antibiotics, antisense nucleic acids complementary to the proliferation-required sequences or portions thereof, antisense nucleic acids complementary to homologous coding nucleic acids, or homologous antisense nucleic acids can be used as therapeutic agents. Specifically, the proliferation-required sequences or homolgous coding nucleic acids, or portions therof, in an antisense orientation or homologous antisense nucleic acids can be provided to an individual to inhibit the translation of a bacterial target gene or the processing, folding, or assembly into a protein/RNA complex of a nontranslated RNA.

### Example 45

### Generation of Antisense Therapeutics from Identified Exogenous Sequences

[0820] Antisense nucleic acids complementary to the proliferation-required sequences described herein, or portions thereof, antisense nucleic acids complementary to homologous coding nucleic acids, or portions thereof, or homologous antisense nucleic acids or portions thereof can be used as antisense therapeutics for the treatment of bacterial infections or simply for inhibition of bacterial growth in vitro or in vivo. For example, the antisense therapeutics may be used to treat bacterial infections caused by Staphylococcus aureus, Salmonella typhimurium, Klebsiella pneumoniae, Pseudomonas aeruginosa, Enterococcus faecalis, Escherichia coli, Enterococcus faecalis, Haemophilus influenzae, Helicobacter pylori, or Salmonella typhi or to inhibit the growth of these organisms. The antisense therapeutics may also be used to treat infections caused by or to inhibit the growth of Anaplasma marginale, Aspergillus fumigatus, Bacillus anthracis, Bacterioides fragilis Bordetella pertussis, Burkholderia cepacia, Campylobacter jejuni, Candida albicans, Candida glabrata (also called Torulopsis glabrata), Candida tropicalis, Candida parapsilosis, Candida guilliermondii, Candida krusei, Candida kefyr (also called Candida pseudotropicalis), Candida dubliniensis, Chlamydia pneumoniae, Chlamydia trachomatus, Clostridium botulinum, Clostridium difficile, Clostridium perfringens, Coccidiodes immitis, Corynebacterium diptheriae, Cryptococcus neoformans, Enterobacter cloacae, Enterococcus faecalis, Enterococcus faecium, Escherichia colt, Haemophilus influenzae, Helicobacter pylori, Histoplasma capsulatum, Klebsiella pneumoniae, Listeria monocytogenes, Mycobacterium leprae, Mycobacterium tuberculosis, Neisseria gonorrhoeae, Neisseria meningitidis, Nocardia asteroides, Pasteurella haemolytica, Pasteurella multocida, Pneumocystis carinii, Proteus vulgaris, Pseudomonas aeruginosa, Salmonella bongori, Salmonella cholerasuis, Salmonella enterica, Salmonella paratyphi, Salmonella typhi, Salmonella typhimurium, Staphylococcus aureus, Listeria monocytogenes, Moxarella catarrhalis, Shigella boydii, Shigella dysenteriae, Shigella flexneri, Shigella sonnei, Staphylococcus epidermidis, Streptococcus pneumoniae, Streptococcus mutans, Treponema pallidum, Yersinia enterocolitica, Yersinia pestis or any species falling within the genera of any of the above species. In some embodiments of the present invention, the antisense therapuetics may be used to treat infection by or inhibit the growth of an organism other than E. coli.

[0821] The therapy exploits the biological process in cells where genes are transcribed into messenger RNA (mRNA) that is then translated into proteins. Antisense RNA technology contemplates the use of antisense nucleic acids, including antisense oligonucleotides, complementary to a target gene that will bind to its target nucleic acid and decrease or inhibit the expression of the target gene. For example, the antisense nucleic acid may inhibit the translation or transcription of the target nucleic acid. In one embodiment, antisense oligonucleotides can be used to treat and control a bacterial infection of a cell culture containing a population of desired cells contaminated with bacteria. In another embodiment, the antisense oligonucleotides can be used to treat an organism with a bacterial infection.

[0822] Antisense oligonucleotides can be synthesized from any of the sequences of the present invention using methods well known in the art. In a preferred embodiment, antisense oligonucleotides are synthesized using artificial means. Uhlmann & Peymann, Chemical Rev. 90:543-584 (1990) review antisense oligonucleotide technology in detail. Modified or unmodified antisense oligonucleotides can be used as therapeutic agents. Modified antisense oligonucleotides are preferred. Modification of the phosphate backbones of the antisense oligonucleotides can be achieved by substituting the intemucleotide phosphate residues with methylphosphonates, phosphorothioates, phosphoramidates, and phosphate esters. Nonphosphate internucleotide analogs such as siloxane bridges, carbonate brides, thioester bridges, as well as many others known in the art may also be used. The preparation of certain antisense oligonucleotides with modified internucleotide linkages is described in U.S. Pat. No. 5,142,047, hereby incorporated by reference.

[0823] Modifications to the nucleoside units of the antisense oligonucleotides are also contemplated. These modifications can increase the half-life and increase cellular rates of uptake for the oligonucleotides in vivo. For example, α-anomeric nucleotide units and modified nucleotides such as 1,2-dideoxy-d-ribofaranose, 1,2-dideoxy-1-phenylribofuranose, and N⁴, N⁴-ethano-5-methyl-cytosine are contemplated for use in the present invention.

[0824] An additional form of modified antisense molecules is found in peptide nucleic acids. Peptide nucleic acids (PNA) have been developed to hybridize to single and double stranded nucleic acids. PNA are nucleic acid analogs in which the entire deoxyribose-phosphate backbone has been exchanged with a chemically different, but structurally homologous, polyamide (peptide) backbone containing 2-aminoethyl glycine units. Unlike DNA, which is highly negatively charged, the PNA backbone is neutral. Therefore, there is much less repulsive energy between complementary strands in a PNA-DNA hybrid than in the comparable DNA-DNA hybrid, and consequently they are much more stable. PNA can hybridize to DNA in either a Watson/Crick or Hoogsteen fashion (Demidov et al., Proc. Natl. Acad. Sci. U.S.A. 92:2637-2641, 1995; Egholm, Nature 365:566-568, 1993; Nielsen et al., Science 254:1497-1500, 1991; Dueholm et al., New J. Chem. 21:19-31, 1997).

[0825] Molecules called PNA “clamps” have been synthesized which have two identical PNA sequences joined by a flexible hairpin linker containing three 8-amino-3,6-dioxaoctanoic acid units. When a PNA clamp is mixed with a complementary homopurine or homopyrimidine DNA target sequence, a PNA-DNA-PNA triplex hybrid can form which has been shown to be extremely stable (Bentin et al., Biochemistry 35:8863-8869, 1996; Egholm et al., Nucleic Acids Res. 23:217-222, 1995; Griffith et al., J. Am. Chem. Soc. 117:831-832, 1995).

[0826] The sequence-specific and high affinity duplex and triplex binding of PNA have been extensively described (Nielsen et al., Science 254:1497-1500, 1991; Egholm et al., J. Am. Chem. Soc. 114:9677-9678, 1992; Egholm et al., Nature 365:566-568, 1993; Almarsson et al., Proc. Natl. Acad. Sci. USA. 90:9542-9546, 1993; Demidov et al., Proc. Natl. Acad. Sci. USA. 92:2637-2641, 1995). They have also been shown to be resistant to nuclease and protease digestion (Demidov et al., Biochem. Pharm. 48:1010-1313, 1994). PNA has been used to inhibit gene expression (Hanvey et al., Science 258:1481-1485,1992; Nielsen et al., Nucl. Acids. Res., 21:197-200, 1993; Nielsen et al., Gene 149:139-145, 1994; Good & Nielsen, Science, 95: 2073-2076, 1998; all of which are hereby incorporated by reference), to block restriction enzyme activity (Nielsen et al., supra., 1993), to act as an artificial transcription promoter (Mollegaard, Proc. Natl. Acad Sci. U.S.A. 91:3892-3895, 1994) and as a pseudo restriction endonuclease (Demidov et al., Nucl. Acids. Res. 21:2103-2107, 1993). Recently, PNA has also been shown to have antiviral and antitumoral activity mediated through an antisense mechanism (Norton, Nature Biotechnol., 14:615-619, 1996; Hirschman et al., J. Investig. Med. 44:347-351, 1996). PNAs have been linked to various peptides in order to promote PNA entry into cells (Basu et al., Bioconj. Chem. 8:481-488, 1997; Pardridge et al., Proc. Natl. Acad. Sci. U.S.A. 92:5592-5596, 1995).

[0827] The antisense oligonucleotides contemplated by the present invention can be administered by direct application of oligonucleotides to a target using standard techniques well known in the art. The antisense oligonucleotides can be generated within the target using a plasmid, or a phage. Alternatively, the antisense nucleic acid may be expressed from a sequence in the chromosome of the target cell. For example, a promoter may be introduced into the chromosome of the target cell near the target gene such that the promoter directs the transcription of the antisense nucleic acid. Alternatively, a nucleic acid containing the antisense sequence operably linked to a promoter may be introduced into the chromosome of the target cell. It is further contemplated that the antisense oligonucleotides are incorporated in a ribozyme sequence to enable the antisense to specifically bind and cleave its target mRNA. For technical applications of ribozyme and antisense oligonucleotides see Rossi et al., Pharmacol. Ther. 50(2):245-254, (1991), which is hereby incorporated by reference. The present invention also contemplates using a retron to introduce an antisense oligonucleotide to a cell. Retron technology is exemplified by U.S. Pat. No. 5,405,775, which is hereby incorporated by reference. Antisense oligonucleotides can also be delivered using liposomes or by electroporation techniques which are well known in the art.

[0828] The antisense nucleic acids described above can also be used to design antibiotic compounds comprising nucleic acids which function by intracellular triple helix formation. Triple helix oligonucleotides are used to inhibit transcription from a genome. The antisense nucleic acids can be used to inhibit cell or microorganism gene expression in individuals infected with such microorganisms or containing such cells. Traditionally, homopurine sequences were considered the most useful for triple helix strategies. However, homopyrimidine sequences can also inhibit gene expression. Such homopyrimidine oligonucleotides bind to the major groove at homopurine:homopyrimidine sequences. Thus, both types of sequences based on the sequences from Staphylococcus aureus, Salmonella typhimurium, Klebsiella pneumoniae, Pseudomonas aeruginosa, Enterococcus faecalis, Escherichia colt, Enterococcus faecalis, Haemophilus influenzae, Helicobacter pylori, or Salmonella typhi or homologous nucleic acids that are required for proliferation are contemplated for use as antibiotic compound templates.

[0829] The antisense nucleic acids, such as antisense oligonucleotides, which are complementary to the proliferation-required nucleic acids from Staphylococcus aureus, Salmonella typhimurium, Klebsiella pneumoniae, Pseudomonas aeruginosa, Enterococcus faecalis, Escherichia coli, Enterococcus faecalis, Haemophilus influenzae, Helicobacter pylori, or Salmonella typhi or to homologous coding nucleic acids, or portions thereof, may be used to induce bacterial cell death or at least bacterial stasis by inhibiting target nucleic acid transcription or translation. Antisense oligonucleotides complementary to about 8 to 40 nucleotides of the proliferation-required nucleic acids described herein or homologous coding nucleic acids have sufficient complementarity to form a duplex with the target sequence under physiological conditions.

[0830] To kill bacterial cells or inhibit their growth, the antisense oligonucleotides are applied to the bacteria or to the target cells under conditions that facilitate their uptake. These conditions include sufficient incubation times of cells and oligonucleotides so that the antisense oligonucleotides are taken up by the cells. In one embodiment, an incubation period of 7-10 days is sufficient to kill bacteria in a sample. An optimum concentration of antisense oligonucleotides is selected for use.

[0831] The concentration of antisense oligonucleotides to be used can vary depending on the type of bacteria sought to be controlled, the nature of the antisense oligonucleotide to be used, and the relative toxicity of the antisense oligonucleotide to the desired cells in the treated culture. Antisense oligonucleotides can be introduced to cell samples at a number of different concentrations preferably between 1×10⁻¹⁰M to 1×10⁻⁴M. Once the minimum concentration that can adequately control gene expression is identified, the optimized dose is translated into a dosage suitable for use in vivo. For example, an inhibiting concentration in culture of 1×10⁻⁷ translates into a dose of approximately 0.6 mg/kg body weight. Levels of oligonucleotide approaching 100 mg/kg body weight or higher may be possible after testing the toxicity of the oligonucleotide in laboratory animals. It is additionally contemplated that cells from the subject are removed, treated with the antisense oligonucleotide, and reintroduced into the subject. This range is merely illustrative and one of skill in the art are able to determine the optimal concentration to be used in a given case.

[0832] After the bacterial cells have been killed or controlled in a desired culture, the desired cell population may be used for other purposes.

### Example 46

### Use of Antisense Oligonucleotides to Treat Contaminated Cell Cultures

[0833] The following example demonstrates the ability of an Staphylococcus aureus, Salmonella typhimurium, Klebsiella pneumoniae, Pseudomonas aeruginosa, Enterococcus faecalis, Escherichia coli, Enterococcus faecalis, Haemophilus influenzae, Helicobacter pylori, or Salmonella typhi antisense oligonucleotide or an antisense oligonucleotide complementary to a homologous coding nucleic acid, or portions thereof, to act as a bacteriocidal or bacteriostatic agent to treat a contaminated cell culture system. The application of the antisense oligonucleotides of the present invention are thought to inhibit the translation of bacterial gene products required for proliferation. The antisense nucleic acids may also inhibit the transcription, folding or processing of the target RNA.

[0834] In one embodiment of the present invention, the antisense oligonucleotide may comprise a phosphorothioate modified nucleic acid comprising at least about 15, at least about 20, at least about 25, at least about 30, at least about 35, at least about 40, or more than 40 consecutive nucleotides of an antisense nucleic acid listed in Table IA. A sense oligodeoxynucleotide complementary to the antisense sequence is synthesized and used as a control. The oligonucleotides are synthesized and purified according to the procedures of Matsukura, et al., Gene 72:343 (1988). The test oligonucleotides are dissolved in a small volume of autoclaved water and added to culture medium to make a 100 micromolar stock solution.

[0835] Human bone marrow cells are obtained from the peripheral blood of two patients and cultured according standard procedures well known in the art. The culture is contaminated with Staphylococcus aureus, Salmonella typhimurium, Klebsiella pneumoniae, Pseudomonas aeruginosa, Enterococcus faecalis, Escherichia coli, Enterococcus faecalis, Haemophilus influenzae, Helicobacter pylori, or Salmonella typhi or an organism containing a homologous nucleic acid and incubated at 37° C. overnight to establish bacterial infection.

[0836] The control and antisense oligonucleotide containing solutions are added to the contaminated cultures and monitored for bacterial growth. After a 10 hour incubation of culture and oligonucleotides, samples from the control and experimental cultures are drawn and analyzed for the translation of the target bacterial gene using standard microbiological techniques well known in the art. The target Staphylococcus aureus, Salmonella typhimurium, Klebsiella pneumoniae, Pseudomonas aeruginosa, Enterococcus faecalis, Escherichia coli Enterococcus faecalis, Haemophilus influenzae, Helicobacter pylori, or Salmonella typhi gene or an organism containing the homologous coding nucleic acid is found to be translated in the control culture treated with the control oligonucleotide, however, translation of the target gene in the experimental culture treated with the antisense oligonucleotide of the present invention is not detected or reduced, indicating that the culture is no longer contaminated or is contaminated at a reduced level.

### Example 47

### Use of Antisense Oligonucleotides to Treat Infections

[0837] A subject suffering from a Staphylococcus aureus, Salmonella typhimurium, Klebsiella pneumoniae, Pseudomonas aeruginosa, Enterococcus faecalis, Escherichia coli, Enterococcus faecalis, Haemophilus influenzae, Helicobacter pylori, or Salmonella typhi infection or an infection with an organism containing a homologous coding nucleic acid is treated with the antisense oligonucleotide preparation above. The antisense oligonucleotide is provided in a pharmaceutically acceptable carrier at a concentration effective to inhibit the transcription or translation of the target nucleic acid. The present subject is treated with a concentration of antisense oligonucleotide sufficient to achieve a blood concentration of about 0.1-100 micromolar. The patient receives daily injections of antisense oligonucleotide to maintain this concentration for a period of 1 week. At the end of the week a blood sample is drawn and analyzed for the presence or absence of the organism using standard techniques well known in the art. There is no detectable evidence of Staphylococcus aureus, Salmonella typhimurium, Klebsiella pneumoniae, Pseudomonas aeruginosa, Enterococcus faecalis, Escherichia coli Enterococcus faecalis, Haemophilus influenzae, Helicobacter pylori, or Salmonella typhi or an organim containing a homologous coding nucleic acid and the treatment is terminated.

[0838] Antisense nucleic acids complementary to a homologous coding nucleic acid or a portion thereof may be used in the preceding method to treat individuals infected with an organism containing the homologous coding nucleic acid.

### Example 48

### Preparation and Use of Triple Helix Forming Oligonucleotides

[0839] The sequences of proliferation-required nucleic acids, homologous coding nucleic acids, or homologous antisense nucleic acids are scanned to identify 10-mer to 20-mer homopyrimidine or homopurine stretches that could be used in triple-helix based strategies for inhibiting gene expression. Following identification of candidate homopyrimidine or homopurine stretches, their efficiency in inhibiting gene expression is assessed by introducing varying amounts of oligonucleotides containing the candidate sequences into a population of bacterial cells that normally express the target gene. The oligonucleotides may be prepared on an oligonucleotide synthesizer or they may be purchased commercially from a company specializing in custom oligonucleotide synthesis.

[0840] The oligonucleotides can be introduced into the cells using a variety of methods known to those skilled in the art, including but not limited to calcium phosphate precipitation, DEAE-Dextran, electroporation, liposome-mediated transfection or native uptake.

[0841] Treated cells are monitored for a reduction in proliferation using techniques such as monitoring growth levels as compared to untreated cells using optical density measurements. The oligonucleotides that are effective in inhibiting gene expression in cultured cells can then be introduced in vivo using the techniques well known in that art at a dosage level shown to be effective.

[0842] In some embodiments, the natural (beta) anomers of the oligonucleotide units can be replaced with alpha anomers to render the oligonucleotide more resistant to nucleases. Further, an intercalating agent such as ethidium bromide, or the like, can be attached to the 3′ end of the alpha oligonucleotide to stabilize the triple helix. For information on the generation of oligonucleotides suitable for triple helix formation see Griffin et al. (Science 245:967-971 (1989), which is hereby incorporated by this reference).

### Example 49

### Identification of Bacterial Strains from Isolated Specimens by PCR

[0843] Classical bacteriological methods for the detection of various bacterial species are time consuming and costly. These methods include growing the bacteria isolated from a subject in specialized medium, cultivation on selective agar medium, followed by a set of confirmation assays that can take from 8 to 10 days or longer to complete. Use of the identified sequences of the present invention provides a method to dramatically reduce the time necessary to detect and identify specific bacterial species present in a sample.

[0844] In one exemplary method, bacteria are grown in enriched medium and DNA samples are isolated from specimens of, for example, blood, urine, stool, saliva or central nervous system fluid by conventional methods. A panel of PCR primers based on identified sequences unique to various species or types of cells or microorganisms are then utilized in accordance with Example 12 to amplify DNA of approximately 100-200 nucleotides in length from the specimen. A separate PCR reaction is set up for each pair of PCR primers and after the PCR reaction is complete, the reaction mixtures are assayed for the presence of PCR product. The presence or absence of bacteria from the species to which the PCR primer pairs belong is determined by the presence or absence of a PCR product in the various test PCR reaction tubes.

[0845] Although the PCR reaction is used to assay the isolated sample for the presence of various bacterial species, other assays such as the Southern blot hybridization are also contemplated.

[0846] Compounds which inhibit the activity or reduce the amount of gene products required for proliferation may be identified using rational drug design. These methods may be used with the proliferation-required polypeptides described herein or homologous polypeptides. In such methods, the structure of the gene product is determined using methods such as x-ray crystallography, NMR, or computer modelling. Compounds are screened to identify those which have a structure which allows them to interact with the gene product. In some embodiments, the compounds are screened to identify those which have structures which allow them to interact with regions of the gene product which are important for its activity. For example, the compounds may be screened to identify those which have structures which allow them to bind to the active site of the gene product to inhibit its activity. For example, the compound may be a suicide substrate which binds to the active site with high affinity, thereby preventing the gene product from acting on its natural substrate. Alternatively, the compound may bind to a region of the gene product which is involved in complex formation with other biomolecules. In such instances, the activity of the gene product is inhibited by blocking the interaction between the gene product and other members of the complex.

[0847] Thus, one embodiment of the present invention comprises a method of using a crystal of the gene products of the present invention and/or a dataset comprising the three-dimensional coordinates obtained from the crystal in a drug-screening assay. The present invention also includes agents (modulators or drugs) that are identified by the methods of the present invention, along with the method of using agents (modulators or drugs) identified by a method of the present invention, for inhibiting the activity of or modulating the amount of an essential gene product. The present invention also includes crystals comprising the gene products of the present invention or portions thereof.

[0848] In some embodiments of the present invention, the three-dimensional structure of the polypeptides required for proliferation is determined using X-ray crystallography or NMR. The coordinates of the determined structure are used in computer-assisted modeling programs to identify compounds that bind to and/or modulate the activity or amount of the encoded polypeptide. The method may include the following steps: 1) the generation of high-purity crystals of the encoded recombinant (or endogenous) polypeptide for analysis; 2) determination of the three-dimensional structure of the polypeptide; and, 3) the use of computer-assisted “docking” programs to analyze the molecular interaction of compound structure and the polypeptide (i.e., drug screening).

[0849] General methods for performing each of the above steps are described below and are also well known to those of skill in the art. Any method known to those of skill in the art, including those described herein, may be employed for generating the three-dimensional structure for each identified essential gene product and its use in the drug-screening assays.

[0850] Crystals of the gene products required for proliferation may be obtained as follows. Under certain conditions, molecules condense from solution into a highly-ordered crystalline lattice, which is defined by a unit cell, the smallest repeating volume of the crystalline array. The contents of such a cell can interact with and diffract certain electromagnetic and particle waves (e.g., X-rays, neutron beams, electron beams etc.). Due to the symmetry of the lattice, the diffracted waves interact to create a diffraction pattern. By measuring the diffraction pattern, crystallographers are able to reconstruct the three-dimensional structure of the atoms in the crystal.

[0851] Any method known to those of skill in the art, including those set forth below, may be employed to prepare high-purity crystals. For example, crystals of the product of the identified essential gene can be grown by a number of techniques including batch crystallization, vapor diffusion (either by sitting drop or hanging drop) and by microdialysis. Seeding of the crystals in some instances is required to obtain X-ray quality crystals. Standard micro and/or macro seeding of crystals may therefore be used. Exemplified below is the hanging-drop vapor diffusion procedure. Hanging drops of an essential gene product (2.5 μl, 10 mg/ml) in 20 mM Tris, pH=8.0, 100 mM NaCl are mixed with an equal amount of reservoir buffer containing 2.7-3.2 M sodium formate and 100 mM Tris buffer, pH=8.0, and kept at 4° C. Crystal showers may appear after 1-2 days with large single crystals growing to full size (0.3×0.3×0.15 mmd) within 2-3 weeks. Crystals are harvested in 3.5 M sodium formate and 100 mM Tris buffer, pH=8.0 and cryoprotected in 3.5 M sodium formate, 100 mM Tris buffer, pH=8.0, 10% (w/v) sucrose, and 10% (v/v) ethylene glycol before flash freezing in liquid propane.

[0852] In some embodiments, the crystal may be obtained using the methods described in U.S. Pat. No. 5,869,604, the disclosure of which is incorporated herein by reference in its entirety. The method involves (a) contacting a mixture containing uncrystallized polypeptides with an exogenous nucleating agent that has an areal lattice match of at least 90.4% to the polypeptide,(b) crystallizing the polypeptides, thereby forming at least one crystal of the polypeptide attached to the nucleating agent, the attached crystal being of a high purity, and at least one polypeptide crystal unattached to the nucleating agent, the unattached crystal being of a lower purity than the attached crystal, and (c) separating the crystal attached to the nucleating agent from the crystal unattached to the nucleating agent. The crystallized polypeptide may also be purified from contaminants by (a) contacting a mixture containing uncrystallized polypeptides and a contaminant with an exogenous nucleating agent that has an areal lattice match of at least 90.4% to the polypeptide, (b) crystallizing the polypeptides, thereby forming at least one crystal of the polypeptide attached to the nucleating agent, the attached crystal being of a high purity and produced in a high yield, and at least one crystal unattached to the nucleating agent, the unattached crystal being of a lower purity than the attached crystal, and (c) separating the crystal attached to the nucleating agent from the crystal unattached to the nucleating agent.

[0853] Once a crystal of the present invention is grown, X-ray diffraction data can be collected using methods familiar to those skilled in the art. Therefore, any person with skill in the art of protein crystallization having the present teachings and without undue experimentation can crystallize a large number of alternative forms of the essential gene products from a variety of different organisms, or polypeptides having conservative substitutions in their amino acid sequence.

[0854] A crystal lattice is defined by the symmetry of its unit cell and any structural motifs the unit cell contains. For example, there are 230 possible symmetry groups for an arbitrary crystal lattice, while the unit cell of the crystal lattice group may have an arbitrary dimension that depends on the molecules making up the lattice. Biological macromolecules, however, have asymmetric centers and are limited to 65 of the 230 symmetry groups. See Cantor et al., Biophysical Chemistry, Vol. III, W. H. Freeman & Company (1980), the disclosure of which is incorporated herein by reference in its entirety.

[0855] A crystal lattice interacts with electromagnetic or particle waves, such as X-rays or electron beams respectively, that have a wavelength with the same order of magnitude as the spacing between atoms in the unit cell. The diffracted waves are measured as an array of spots on a detection surface positioned adjacent to the crystal. Each spot has a three-dimensional position, hkl, and an intensity, I(hkl), both of which are used to reconstruct the three-dimensional electron density of the crystal with the so-called Electron Density Equation. The Electron Density Equation states that the three-dimensional electron density of the unit cell is the Fourier transform of the structure factors. Thus, in theory, if the structure factors are known for a sufficient number of spots in the detection space, then the three-dimensional electron density of the unit cell could be calculated using the Electron Density Equation.

[0856] In some embodiments of the present invention, an image of a crystal of a gene product required for proliferation or a portion thereof is obtained with the aid of a digital computer and the crystal's diffraction pattern as described in U.S. Pat. No. 5,353,236, the disclosure of which is incorporated herein by reference in its entirety. The diffraction pattern contains a plurality of reflections, each having an associated resolution. The image is obtained by (a) converting the diffraction pattern of the crystal into computer usable normalized amplitudes, the pattern being produced with a diffractometer; (b) determining from the diffraction pattern a dimension of a unit cell of the crystal; (c) providing an envelope defining the region of the unit cell occupied by the gene product or portion thereof in the crystal; (d) distributing a collection of scattering bodies within said envelope, the collection of scattering bodies having various arrangements, each of which has an associated pattern of Fourier amplitudes; (e) condensing the collection of scattering bodies to a condensed arrangement that results in a high correlation between a diffraction pattern and the pattern of Fourier amplitudes for said collection of scattering bodies; (f) determining the phase associated with at least one of the reflections of said diffraction pattern from the condensed arrangement of scattering bodies; (g) calculating an electron density distribution of the gene product or portion thereof within the unit cell from the phase determined in procedure f; and (h) displaying a graphical image of the gene product or portion thereof constructed from said electron density distribution.

[0857] The crystals of the gene products required for proliferation may be used in drug screening methods such as those described in U.S. Pat. No. 6,156,526, the disclosure of which is incorporated herein by reference in its entirety. Briefly, in such methods, a compound which inhibits the formation of a complex comprising the gene product or a portion thereof is identified as follows. A set of atomic coordinates defining the three-dimensional structure of a complex including the gene product of interest or a portion thereof are determined. A potential compound that binds to the gene product or a portion thereof involved in complex formation is selected using the atomic coordinates obtained above. The compound is contacted with the gene product or portion thereof and its binding partner(s) in the complex under conditions which would permit the complex to form in the absence of the potential compound. The binding affinity of the gene product or portion thereof for its binding partner(s) is determined and a potential compound is identified as a compound that inhibits the formation of the complex when there is a decrease in the binding affinity of the gene product or portion thereof for its binding partner(s).

[0858] In some embodiments of the present invention, the three dimensional structure of the essential gene product is determined and potential agonists and/or potential antagonists are designed with the aid of computer modeling [Bugg et al., Scientific American, Dec.:92-98 (1993); West et al., TIPS, 16:67-74 (1995); Dunbrack et al., Folding & Design, 2:27-42 (1997), the disclosures of which are incorporated herein by reference in their entireties].

[0859] Computer analysis may be performed with one or more of the computer programs including: QUANTA, CHARMM, INSIGHT, SYBYL, MACROMODEL and ICM [Dunbrack et al., Folding & Design, 2:27-42 (1997), the disclosure of which is incorporated herein by reference in its entirety]. In a further embodiment of this aspect of the invention, an initial drug-screening assay is performed using the three-dimensional structure so obtained, preferably along with a docking computer program. Such computer modeling can be performed with one or more Docking programs such as FlexX, DOC, GRAM and AUTO DOCK [Dunbrack et al., Folding & Design, 2:27-42 (1997)].

[0860] It should be understood that for each drug screening assay provided herein, a number of iterative cycles of any or all of the steps may be performed to optimize the selection. The drug screening assays of the present invention may use any of a number of means for determining the interaction between an agent or drug and an essential gene product.

[0861] In some embodiments of the present invention, a drug can be specifically designed to bind to an essential gene product of the present invention through NMR based methodology. [Shuker et al., pi Science 274:1531-1534 (1996) the disclosure of which is incorporated herein by reference herein in its entirety.] NMR spectra may be recorded using devices familiar to those skilled in the art, such as the Varian Unity Plus 500 and unity 600 spectrometers, each equipped with a pulsed-field gradient triple resonance probe as analyzed as described in Bagby et al., [Cell 82:857-867 (1995), the disclosure of which is incorporated herein by reference in its entirety]. Sequential resonance assignments of backbone ¹H, .¹⁵ N, and .¹³C atoms may be made using a combination of triple resonance experiments similar to those previously described [Bagby et al., Biochemistry, 33:2409-2421 (1994a), the disclosure of which is incorporated herein by reference in its entirety], except with enhanced sensitivity [Muhandiram and Kay, J. Magn. Reson., 103: 203-216 (1994), the disclosure of which is incorporated herein by reference in its entirety] and minimal H₂O saturation [Kay et al., J. Magn. Reson., 109:129-133 (1994), the disclosure of which is incorporated herein by reference in its entirety]. Side chain ¹H and ¹³ C assignments may be made using HCCH-TOCSY [Bax et al., J. Magn. Reson., 87:620-627 (1990), the disclosure of which is incorporated herein by reference in its entirety] experiments with mixing times of 8 ms and 16 ms.in solution but need not be included in structure calculations. Nuclear Overhauser effect (NOE) cross peaks in two-dimensional ¹H-¹H NOE spectroscopy (NOESY), three-dimensional ¹⁵N-edited NOESY-HSQC [Zhang et al., J. Biomol, NMR, 4:845-858 (1994), the disclosure of which is incorporated herein by reference in its entirety] and three-dimensional simultaneous acquisition ¹⁵N/¹³C-edited NOE [Pascal et al., J. Magn. Reson., 103:197-201 (1994), the disclosure of which is incorporated herein by reference in its entirety] spectra may be obtained with 100 ms NOE mixing times. Standard pseudo-atom distance corrections [Wuthrich et al., J. Mol. Biol., 169:949-961 (1983), the disclosure of which is incorporated herein by reference in its entirety] may be incorporated to account for center averaging. An additional 0.5 .ANG. may be added to the upper limits for distances involving methyl groups [Wagner et al., J. Mol. Biol., 196:611-639 (1987); Clore et al., Biochemistry, 26:8012-8023 (1987), the disclosures of which are incorporated herein by reference in their entireties].

[0862] The structures can be calculated using a simulated annealing protocol [Nilges et al., In computational Aspects of the Study of Biological Macromolecules by Nuclear Magnetic Resonance Spectroscopy, J. C. Hoch, F. M. Poulsen, and C. Redfield, eds., New York: Plenum Press, pp. 451-455 (1991, the disclosures of which are incorporated herein by reference in their entireties] within X-PLOR [Brunger, X-PLOR Manual, Version 3.1, New Haven, Conn.: Department of Molecular Biophysics and Biochemistry, Yale University (1993), the disclosure of which is incorporated herein by reference in its entirety] using the previously described strategy [Bagby et al., Structure, 2:107-122 (1994b), the disclosure of which is incorporated herein by reference in its entirety]. Interhelical anges may be calculated using a program written by K. Yap. Accessible surface areas were calculated using the program Naccess, available from Prof. J. Thornton, University College, London.

[0863] Compounds capable of reducing the activity or amount of gene products required for cellular proliferation may be identified using the methods described in U.S. Pat. No. 6,077,682, the disclosure of which is incorporated herein by reference in its entirety. Briefly, the three-dimensional structure of the gene product or portion thereof may be used in a drug screening assay by (a) selecting a potential drug by performing rational drug design with the three-dimensional structure determined from one or more sets of atomic coordinates of the gene product or portion thereof in conjunction with computer modeling; (b) contacting the potential drug with a polypeptide comprising the gene product or portion thereof and (c) detecting the binding of the potential drug with said polypeptide; wherein a potential drug is selected as a drug if the potential drug binds to the polypeptide. In some methods, the three-dimensional structure of the gene product or portion thereof is used in a drug screening assay involving (a) selecting a potential drug by performing structural based rotational drug design with the three-dimensional structure of the gene product or portion thereof; wherein said selecting is performed in conjunction with computer modeling; (b) contacting the potential drug with a polypeptide comprising the gene product or portion thereof in the presence of a substrate of the gene product; wherein in the absence of the potential drug the substrate is acted upon by the gene product; and (c) determining the extent to which the gene product acted upon the substrate; wherein a drug is selected when a decrease in the action of the gene product on the substrate is determined in the presence of the potential drug relative to in its absence. In some embodiments, the preceding method further involves(d) contacting the potential drug with the gene product or portion thereof for NMR analysis; wherein a binding complex forms between the potential drug and said gene product or portion thereof for NMR analysis; wherein the gene product or portion thereof for NMR analysis comprises a conservative amino acid substitution; (e) determining the three-dimensional structure of the binding complex by NMR; and (f) selecting a candidate drug by performing structural based rational drug design with the three-dimensional structure determined for the binding complex; wherein said selecting is performed in conjunction with computer modeling; (g) contacting the candidate drug with a second polypeptide comprising the gene product or portion thereof in the presence of a substrate of the gene product or portion thereof; wherein in the absence of the candidate drug the substrate is acted upon by the second polypeptide; and (h) determining the amount of action of the second polypeptide on the substrate; wherein a drug is selected when a decrease in the amount of action of the second polypeptide is determined in the presence of the candidate drug relative to in its absence.

[0864] Once the three-dimensional structure of a crystal comprising an essential gene product is determined, a potential modulator of its activity, can be examined through the use of computer modeling using a docking program such as FlexX, GRAM, DOCK, or AUTODOCK [Dunbrack et al., 1997, supra], to identify potential modulators. This procedure can include computer fitting of potential modulators to the polypeptide or fragments thereof to ascertain how well the shape and the chemical structure of the potential modulator will bind. Computer programs can also be employed to estimate the attraction, repulsion, and steric hindrance of the two binding partners (e.g., the essential gene product and a potential modulator). Generally the tighter the fit, the lower the steric hindrances, and the greater the attractive forces, the more potent the potential modulator since these properties are consistent with a tighter binding constant. Furthermore, the more specificity in the design of a potential drug the more likely that the drug will not interact as well with other proteins. This will minimize potential side-effects due to unwanted interactions with other proteins.

[0865] Compound and compound analogs can be systematically modified by computer modeling programs until one or more promising potential analogs is identified. In addition systematic modification of selected analogs can then be systematically modified by computer modeling programs until one or more potential analogs are identified. Such analysis has been shown to be effective in the development of HIV protease inhibitors [Lam et al., Science 263:380-384 (1994); Wlodawer et al., Ann. Rev. Biochem. 62:543-585 (1993); Appelt, Perspectives in Drug Discovery and Design 1:23-48 (1993); Erickson, Perspectives in Drug Discovery and Design 1:109-128 (1993), the disclosures of which are incorporated herein by reference in their entireties]. Alternatively a potential modulator could be obtained by initially screening a random peptide library produced by recombinant bacteriophage for example, [Scott and Smith, Science, 249:386-390 (1990); Cwirla et al., Proc. Natl. Acad. Sci., 87:6378-6382 (1990); Devlin et al., Science, 249:404-406 (1990), the disclosures of which are incorporated herein by reference in their entireties]. A peptide selected in this manner would then be systematically modified by computer modeling programs as described above, and then treated analogously to a structural analog.

[0866] Example 45 describes computer modelling of the structures of gene products required for proliferation.

### Example 50

### Determination of the Structure of Gene Products Required for Proliferation Using Computer Modelling

[0867] Three dimensional models were built by applying computer modelling methods to some of the gene products required for proliferation of Staphylococcus aureus using the amino acid sequences of the encoded proteins as follows. Sir Tom Blundell's program COMPOSER as provided by Tripos Associates in their BIOPOLYMER module to SYBYL was used to build the models. Skolnik's method of topology fingerprinting as implemented in Matchmaker was used to score the average mutation free energy. This number is in Boltzmans (units of kT) and should be negative (the more negative, the better the model.

[0868] Composer uses a Needleman Wunsch alignment with jumbling to find significant alignments. The reported parameters are percent identity and significance as measured from the jumbling. Those matches which were 30% identical and had a significance greater that 4 on the scale were judged to be good candidates for model building templates. If no three dimensional structures met these criteria, then a BLAST search was conducted against the most recent PDB sequence database. Any significant hits discovered in this manner were then added to the binary protein structure database and the candidate search was repeated in the manner discussed above.

[0869] In the next phase, Composer assigned structurally conserved and structurally variable regions and built the backbone structure and then searched the database for structures of the variable loops. These were then spliced in and a model of the protein resulted. Any loops (variable regions) which were unassignable were manually built and refined with a combination of dynamics.

[0870] The structure was then refined. Hydrogen atoms were added and a non-active aggregate was defined. 1000 pS of dynamics using AMBER ALL-ATOM and Kollman charges are performed. Next a minimization cycle of up 5000 steepest decent steps were performed and then the aggregate was thawed and the process was repeated on the entire protein.

[0871] The resulting structure was then validated in MATCHMAKER. The topologicaly scanned free energy determined from empirically derived protein topologies was computed and the average energy/residue is reported in Boltzamans was reported. As this number represents a free energy the more negative it is the more favorable it is.

[0872] Sixty six proteins required for the proliferation of Staphylococcus aureus were modelled as described above. MATCHMAKER energies were computed for these.

[0873] The distribution of the models built by class is shown in the table below.

TABLE 1
Distribution of models built with their MATCHMAKER energies in kT

| | | Average Matchmaker |
|---|---|---|
| Classification | Number of Models | Energy |
| Acylases | 1 | −0.10 |
| Dehydrogenases | 3 | −0.12 |
| DNA Related | 3 | −0.12 |
| Heat Shock Protein | 2 | −0.16 |
| Hydrolases | 3 | −0.16 |
| Isomerases | 1 | −0.05 |
| Ligases | 7 | −0.07 |
| Lyases | 1 | −0.09 |
| Membrane Anchored | 1 | −0.12 |
| Misc | 18 | −0.21 |
| Oxidoreductases | 6 | −0.09 |
| Proteases | 1 | −0.03 |
| Ribosome | 3 | −0.11 |
| Synthases | 4 | −0.14 |
| Transferases | 6 | −0.12 |

[0874] The validity of the above method was confirmed using FtsZ. In the case of FtsZ, a crystal structure from M. Janeschi was available. Examination of the gross structural features determined using the above modelling showed all of the folds in the 20 correct place, although there were some minor differences from the structure determined by x-ray crystallography.

### Example 51

### Functional Complementation

[0875] In another embodiment, gene products whose activities may be complemented by a proliferation-required gene product from Staphylococcus aureus, Salmonella typhimurium, Klebsiella pneumoniae, Pseudomonas aeruginosa, Enterococcus faecalis, Escherichia coli, Enterococcus faecalis, Haemophilus influenzae, Helicobacter pylori, or Salmonella typhi or homologous polypeptides are identified using merodiploids, created by introducing a plasmid or Bacterial Artificial Chromosome into an organism having a mutation in the essential gene which reduces or eliminates the activity of the gene product. In some embodiments, the mutation may be a conditional mutation, such as a temperature sensitive mutation, such that the organism proliferates under permissive conditions but is unable to proliferate under non-permissive conditions in the absence of complementation by the gene on the plasmid or Bacterial Artificial Chromosome. Alternatively, duplications may be constructed as described in Roth et al. (1987) Biosynthesis of Aromatic Amino Acids in Escherichia coli and Salmonella typhimurium, F. C. Neidhardt, ed., American Society for Microbiology, publisher, pp. 2269-2270, the disclosure of which is incorporated herein by reference in its entirety. Such methods are familiar to those skilled in the art.

[0876] Table VIII provides a cross reference for SEQ ID NOs. of the nucleotide sequences discussed herein and the SEQ ID NOs. of the polypeptides encoded by these nucleotide.

[0877] All documents cited herein are incorporated herein by reference in their entireties.

TABLE VIII

| Nucleotide SeqID | Protein SeqID | Nucleotide SeqID | Protein SeqID |
|---|---|---|---|
| 5916 | 10013 | 5961 | 10058 |
| 5917 | 10014 | 5962 | 10059 |
| 5918 | 10015 | 5963 | 10060 |
| 5919 | 10016 | 5964 | 10061 |
| 5920 | 10017 | 5965 | 10062 |
| 5921 | 10018 | 5966 | 10063 |
| 5922 | 10019 | 5967 | 10064 |
| 5923 | 10020 | 5968 | 10065 |
| 5924 | 10021 | 5969 | 10066 |
| 5925 | 10022 | 5970 | 10067 |
| 5926 | 10023 | 5971 | 10068 |
| 5927 | 10024 | 5972 | 10069 |
| 5928 | 10025 | 5973 | 10070 |
| 5929 | 10026 | 5974 | 10071 |
| 5930 | 10027 | 5975 | 10072 |
| 5931 | 10028 | 5976 | 10073 |
| 5932 | 10029 | 5977 | 10074 |
| 5933 | 10030 | 5978 | 10075 |
| 5934 | 10031 | 5979 | 10076 |
| 5935 | 10032 | 5980 | 10077 |
| 5936 | 10033 | 5981 | 10078 |
| 5937 | 10034 | 5982 | 10079 |
| 5938 | 10035 | 5983 | 10080 |
| 5939 | 10036 | 5984 | 10081 |
| 5940 | 10037 | 5985 | 10082 |
| 5941 | 10038 | 5986 | 10083 |
| 5942 | 10039 | 5987 | 10084 |
| 5943 | 10040 | 5988 | 10085 |
| 5944 | 10041 | 5989 | 10086 |
| 5945 | 10042 | 5990 | 10087 |
| 5946 | 10043 | 5991 | 10088 |
| 5947 | 10044 | 5992 | 10089 |
| 5948 | 10045 | 5993 | 10090 |
| 5949 | 10046 | 5994 | 10091 |
| 5950 | 10047 | 5995 | 10092 |
| 5951 | 10048 | 5996 | 10093 |
| 5952 | 10049 | 5997 | 10094 |
| 5953 | 10050 | 5998 | 10095 |
| 5954 | 10051 | 5999 | 10096 |
| 5955 | 10052 | 6000 | 10097 |
| 5956 | 10053 | 6001 | 10098 |
| 5957 | 10054 | 6002 | 10099 |
| 5958 | 10055 | 6003 | 10100 |
| 5959 | 10056 | 6004 | 10101 |
| 5960 | 10057 | 6005 | 10102 |
| 6006 | 10103 | 6053 | 10150 |
| 6007 | 10104 | 6054 | 10151 |
| 6008 | 10105 | 6055 | 10152 |
| 6009 | 10106 | 6056 | 10153 |
| 6010 | 10107 | 6057 | 10154 |
| 6011 | 10108 | 6058 | 10155 |
| 6012 | 10109 | 6059 | 10156 |
| 6013 | 10110 | 6060 | 10157 |
| 6014 | 10111 | 6061 | 10158 |
| 6015 | 10112 | 6062 | 10159 |
| 6016 | 10113 | 6063 | 10160 |
| 6017 | 10114 | 6064 | 10161 |
| 6018 | 10115 | 6065 | 10162 |
| 6019 | 10116 | 6066 | 10163 |
| 6020 | 10117 | 6067 | 10164 |
| 6021 | 10118 | 6068 | 10165 |
| 6022 | 10119 | 6069 | 10166 |
| 6023 | 10120 | 6070 | 10167 |
| 6024 | 10121 | 6071 | 10168 |
| 6025 | 10122 | 6072 | 10169 |
| 6026 | 10123 | 6073 | 10170 |
| 6027 | 10124 | 6074 | 10171 |
| 6028 | 10125 | 6075 | 10172 |
| 6029 | 10126 | 6076 | 10173 |
| 6030 | 10127 | 6077 | 10174 |
| 6031 | 10128 | 6078 | 10175 |
| 6032 | 10129 | 6079 | 10176 |
| 6033 | 10130 | 6080 | 10177 |
| 6034 | 10131 | 6081 | 10178 |
| 6035 | 10132 | 6082 | 10179 |
| 6036 | 10133 | 6083 | 10180 |
| 6037 | 10134 | 6084 | 10181 |
| 6038 | 10135 | 6085 | 10182 |
| 6039 | 10136 | 6086 | 10183 |
| 6040 | 10137 | 6087 | 10184 |
| 6041 | 10138 | 6088 | 10185 |
| 6042 | 10139 | 6089 | 10186 |
| 6043 | 10140 | 6090 | 10187 |
| 6044 | 10141 | 6091 | 10188 |
| 6045 | 10142 | 6092 | 10189 |
| 6046 | 10143 | 6093 | 10190 |
| 6047 | 10144 | 6094 | 10191 |
| 6048 | 10145 | 6095 | 10192 |
| 6049 | 10146 | 6096 | 10193 |
| 6050 | 10147 | 6097 | 10194 |
| 6051 | 10148 | 6098 | 10195 |
| 6052 | 10149 | 6099 | 10196 |
| 6100 | 10197 | 6147 | 10244 |
| 6101 | 10198 | 6148 | 10245 |
| 6102 | 10199 | 6149 | 10246 |
| 6103 | 10200 | 6150 | 10247 |
| 6104 | 10201 | 6151 | 10248 |
| 6105 | 10202 | 6152 | 10249 |
| 6106 | 10203 | 6153 | 10250 |
| 6107 | 10204 | 6154 | 10251 |
| 6108 | 10205 | 6155 | 10252 |
| 6109 | 10206 | 6156 | 10253 |
| 6110 | 10207 | 6157 | 10254 |
| 6111 | 10208 | 6158 | 10255 |
| 6112 | 10209 | 6159 | 10256 |
| 6113 | 10210 | 6160 | 10257 |
| 6114 | 10211 | 6161 | 10258 |
| 6115 | 10212 | 6162 | 10259 |
| 6116 | 10213 | 6163 | 10260 |
| 6117 | 10214 | 6164 | 10261 |
| 6118 | 10215 | 6165 | 10262 |
| 6119 | 10216 | 6166 | 10263 |
| 6120 | 10217 | 6167 | 10264 |
| 6121 | 10218 | 6168 | 10265 |
| 6122 | 10219 | 6169 | 10266 |
| 6123 | 10220 | 6170 | 10267 |
| 6124 | 10221 | 6171 | 10268 |
| 6125 | 10222 | 6172 | 10269 |
| 6126 | 10223 | 6173 | 10270 |
| 6127 | 10224 | 6174 | 10271 |
| 6128 | 10225 | 6175 | 10272 |
| 6129 | 10226 | 6176 | 10273 |
| 6130 | 10227 | 6177 | 10274 |
| 6131 | 10228 | 6178 | 10275 |
| 6132 | 10229 | 6179 | 10276 |
| 6133 | 10230 | 6180 | 10277 |
| 6134 | 10231 | 6181 | 10278 |
| 6135 | 10232 | 6182 | 10279 |
| 6136 | 10233 | 6183 | 10280 |
| 6137 | 10234 | 6184 | 10281 |
| 6138 | 10235 | 6185 | 10282 |
| 6139 | 10236 | 6186 | 10283 |
| 6140 | 10237 | 6187 | 10284 |
| 6141 | 10238 | 6188 | 10285 |
| 6142 | 10239 | 6189 | 10286 |
| 6143 | 10240 | 6190 | 10287 |
| 6144 | 10241 | 6191 | 10288 |
| 6145 | 10242 | 6192 | 10289 |
| 6146 | 10243 | 6193 | 10290 |
| 6194 | 10291 | 6241 | 10338 |
| 6195 | 10292 | 6242 | 10339 |
| 6196 | 10293 | 6243 | 10340 |
| 6197 | 10294 | 6244 | 10341 |
| 6198 | 10295 | 6245 | 10342 |
| 6199 | 10296 | 6246 | 10343 |
| 6200 | 10297 | 6247 | 10344 |
| 6201 | 10298 | 6248 | 10345 |
| 6202 | 10299 | 6249 | 10346 |
| 6203 | 10300 | 6250 | 10347 |
| 6204 | 10301 | 6251 | 10348 |
| 6205 | 10302 | 6252 | 10349 |
| 6206 | 10303 | 6253 | 10350 |
| 6207 | 10304 | 6254 | 10351 |
| 6208 | 10305 | 6255 | 10352 |
| 6209 | 10306 | 6256 | 10353 |
| 6210 | 10307 | 6257 | 10354 |
| 6211 | 10308 | 6258 | 10355 |
| 6212 | 10309 | 6259 | 10356 |
| 6213 | 10310 | 6260 | 10357 |
| 6214 | 10311 | 6261 | 10358 |
| 6215 | 10312 | 6262 | 10359 |
| 6216 | 10313 | 6263 | 10360 |
| 6217 | 10314 | 6264 | 10361 |
| 6218 | 10315 | 6265 | 10362 |
| 6219 | 10316 | 6266 | 10363 |
| 6220 | 10317 | 6267 | 10364 |
| 6221 | 10318 | 6268 | 10365 |
| 6222 | 10319 | 6269 | 10366 |
| 6223 | 10320 | 6270 | 10367 |
| 6224 | 10321 | 6271 | 10368 |
| 6225 | 10322 | 6272 | 10369 |
| 6226 | 10323 | 6273 | 10370 |
| 6227 | 10324 | 6274 | 10371 |
| 6228 | 10325 | 6275 | 10372 |
| 6229 | 10326 | 6276 | 10373 |
| 6230 | 10327 | 6277 | 10374 |
| 6231 | 10328 | 6278 | 10375 |
| 6232 | 10329 | 6279 | 10376 |
| 6233 | 10330 | 6280 | 10377 |
| 6234 | 10331 | 6281 | 10378 |
| 6235 | 10332 | 6282 | 10379 |
| 6236 | 10333 | 6283 | 10380 |
| 6237 | 10334 | 6284 | 10381 |
| 6238 | 10335 | 6285 | 10382 |
| 6239 | 10336 | 6286 | 10383 |
| 6240 | 10337 | 6287 | 10384 |
| 6288 | 10385 | 6335 | 10432 |
| 6289 | 10386 | 6336 | 10433 |
| 6290 | 10387 | 6337 | 10434 |
| 6291 | 10388 | 6338 | 10435 |
| 6292 | 10389 | 6339 | 10436 |
| 6293 | 10390 | 6340 | 10437 |
| 6294 | 10391 | 6341 | 10438 |
| 6295 | 10392 | 6342 | 10439 |
| 6296 | 10393 | 6343 | 10440 |
| 6297 | 10394 | 6344 | 10441 |
| 6298 | 10395 | 6345 | 10442 |
| 6299 | 10396 | 6346 | 10443 |
| 6300 | 10397 | 6347 | 10444 |
| 6301 | 10398 | 6348 | 10445 |
| 6302 | 10399 | 6349 | 10446 |
| 6303 | 10400 | 6350 | 10447 |
| 6304 | 10401 | 6351 | 10448 |
| 6305 | 10402 | 6352 | 10449 |
| 6306 | 10403 | 6353 | 10450 |
| 6307 | 10404 | 6354 | 10451 |
| 6308 | 10405 | 6355 | 10452 |
| 6309 | 10406 | 6356 | 10453 |
| 6310 | 10407 | 6357 | 10454 |
| 6311 | 10408 | 6358 | 10455 |
| 6312 | 10409 | 6359 | 10456 |
| 6313 | 10410 | 6360 | 10457 |
| 6314 | 10411 | 6361 | 10458 |
| 6315 | 10412 | 6362 | 10459 |
| 6316 | 10413 | 6363 | 10460 |
| 6317 | 10414 | 6364 | 10461 |
| 6318 | 10415 | 6365 | 10462 |
| 6319 | 10416 | 6366 | 10463 |
| 6320 | 10417 | 6367 | 10464 |
| 6321 | 10418 | 6368 | 10465 |
| 6322 | 10419 | 6369 | 10466 |
| 6323 | 10420 | 6370 | 10467 |
| 6324 | 10421 | 6371 | 10468 |
| 6325 | 10422 | 6372 | 10469 |
| 6326 | 10423 | 6373 | 10470 |
| 6327 | 10424 | 6374 | 10471 |
| 6328 | 10425 | 6375 | 10472 |
| 6329 | 10426 | 6376 | 10473 |
| 6330 | 10427 | 6377 | 10474 |
| 6331 | 10428 | 6378 | 10475 |
| 6332 | 10429 | 6379 | 10476 |
| 6333 | 10430 | 6380 | 10477 |
| 6334 | 10431 | 6381 | 10478 |
| 6382 | 10479 | 6429 | 10526 |
| 6383 | 10480 | 6430 | 10527 |
| 6384 | 10481 | 6431 | 10528 |
| 6385 | 10482 | 6432 | 10529 |
| 6386 | 10483 | 6433 | 10530 |
| 6387 | 10484 | 6434 | 10531 |
| 6388 | 10485 | 6435 | 10532 |
| 6389 | 10486 | 6436 | 10533 |
| 6390 | 10487 | 6437 | 10534 |
| 6391 | 10488 | 6438 | 10535 |
| 6392 | 10489 | 6439 | 10536 |
| 6393 | 10490 | 6440 | 10537 |
| 6394 | 10491 | 6441 | 10538 |
| 6395 | 10492 | 6442 | 10539 |
| 6396 | 10493 | 6443 | 10540 |
| 6397 | 10494 | 6444 | 10541 |
| 6398 | 10495 | 6445 | 10542 |
| 6399 | 10496 | 6446 | 10543 |
| 6400 | 10497 | 6447 | 10544 |
| 6401 | 10498 | 6448 | 10545 |
| 6402 | 10499 | 6449 | 10546 |
| 6403 | 10500 | 6450 | 10547 |
| 6404 | 10501 | 6451 | 10548 |
| 6405 | 10502 | 6452 | 10549 |
| 6406 | 10503 | 6453 | 10550 |
| 6407 | 10504 | 6454 | 10551 |
| 6408 | 10505 | 6455 | 10552 |
| 6409 | 10506 | 6456 | 10553 |
| 6410 | 10507 | 6457 | 10554 |
| 6411 | 10508 | 6458 | 10555 |
| 6412 | 10509 | 6459 | 10556 |
| 6413 | 10510 | 6460 | 10557 |
| 6414 | 10511 | 6461 | 10558 |
| 6415 | 10512 | 6462 | 10559 |
| 6416 | 10513 | 6463 | 10560 |
| 6417 | 10514 | 6464 | 10561 |
| 6418 | 10515 | 6465 | 10562 |
| 6419 | 10516 | 6466 | 10563 |
| 6420 | 10517 | 6467 | 10564 |
| 6421 | 10518 | 6468 | 10565 |
| 6422 | 10519 | 6469 | 10566 |
| 6423 | 10520 | 6470 | 10567 |
| 6424 | 10521 | 6471 | 10568 |
| 6425 | 10522 | 6472 | 10569 |
| 6426 | 10523 | 6473 | 10570 |
| 6427 | 10524 | 6474 | 10571 |
| 6428 | 10525 | 6475 | 10572 |
| 6476 | 10573 | 6523 | 10620 |
| 6477 | 10574 | 6524 | 10621 |
| 6478 | 10575 | 6525 | 10622 |
| 6479 | 10576 | 6526 | 10623 |
| 6480 | 10577 | 6527 | 10624 |
| 6481 | 10578 | 6528 | 10625 |
| 6482 | 10579 | 6529 | 10626 |
| 6483 | 10580 | 6530 | 10627 |
| 6484 | 10581 | 6531 | 10628 |
| 6485 | 10582 | 6532 | 10629 |
| 6486 | 10583 | 6533 | 10630 |
| 6487 | 10584 | 6534 | 10631 |
| 6488 | 10585 | 6535 | 10632 |
| 6489 | 10586 | 6536 | 10633 |
| 6490 | 10587 | 6537 | 10634 |
| 6491 | 10588 | 6538 | 10635 |
| 6492 | 10589 | 6539 | 10636 |
| 6493 | 10590 | 6540 | 10637 |
| 6494 | 10591 | 6541 | 10638 |
| 6495 | 10592 | 6542 | 10639 |
| 6496 | 10593 | 6543 | 10640 |
| 6497 | 10594 | 6544 | 10641 |
| 6498 | 10595 | 6545 | 10642 |
| 6499 | 10596 | 6546 | 10643 |
| 6500 | 10597 | 6547 | 10644 |
| 6501 | 10598 | 6548 | 10645 |
| 6502 | 10599 | 6549 | 10646 |
| 6503 | 10600 | 6550 | 10647 |
| 6504 | 10601 | 6551 | 10648 |
| 6505 | 10602 | 6552 | 10649 |
| 6506 | 10603 | 6553 | 10650 |
| 6507 | 10604 | 6554 | 10651 |
| 6508 | 10605 | 6555 | 10652 |
| 6509 | 10606 | 6556 | 10653 |
| 6510 | 10607 | 6557 | 10654 |
| 6511 | 10608 | 6558 | 10655 |
| 6512 | 10609 | 6559 | 10656 |
| 6513 | 10610 | 6560 | 10657 |
| 6514 | 10611 | 6561 | 10658 |
| 6515 | 10612 | 6562 | 10659 |
| 6516 | 10613 | 6563 | 10660 |
| 6517 | 10614 | 6564 | 10661 |
| 6518 | 10615 | 6565 | 10662 |
| 6519 | 10616 | 6566 | 10663 |
| 6520 | 10617 | 6567 | 10664 |
| 6521 | 10618 | 6568 | 10665 |
| 6522 | 10619 | 6569 | 10666 |
| 6570 | 10667 | 6617 | 10714 |
| 6571 | 10668 | 6618 | 10715 |
| 6572 | 10669 | 6619 | 10716 |
| 6573 | 10670 | 6620 | 10717 |
| 6574 | 10671 | 6621 | 10718 |
| 6575 | 10672 | 6622 | 10719 |
| 6576 | 10673 | 6623 | 10720 |
| 6577 | 10674 | 6624 | 10721 |
| 6578 | 10675 | 6625 | 10722 |
| 6579 | 10676 | 6626 | 10723 |
| 6580 | 10677 | 6627 | 10724 |
| 6581 | 10678 | 6628 | 10725 |
| 6582 | 10679 | 6629 | 10726 |
| 6583 | 10680 | 6630 | 10727 |
| 6584 | 10681 | 6631 | 10728 |
| 6585 | 10682 | 6632 | 10729 |
| 6586 | 10683 | 6633 | 10730 |
| 6587 | 10684 | 6634 | 10731 |
| 6588 | 10685 | 6635 | 10732 |
| 6589 | 10686 | 6636 | 10733 |
| 6590 | 10687 | 6637 | 10734 |
| 6591 | 10688 | 6638 | 10735 |
| 6592 | 10689 | 6639 | 10736 |
| 6593 | 10690 | 6640 | 10737 |
| 6594 | 10691 | 6641 | 10738 |
| 6595 | 10692 | 6642 | 10739 |
| 6596 | 10693 | 6643 | 10740 |
| 6597 | 10694 | 6644 | 10741 |
| 6598 | 10695 | 6645 | 10742 |
| 6599 | 10696 | 6646 | 10743 |
| 6600 | 10697 | 6647 | 10744 |
| 6601 | 10698 | 6648 | 10745 |
| 6602 | 10699 | 6649 | 10746 |
| 6603 | 10700 | 6650 | 10747 |
| 6604 | 10701 | 6651 | 10748 |
| 6605 | 10702 | 6652 | 10749 |
| 6606 | 10703 | 6653 | 10750 |
| 6607 | 10704 | 6654 | 10751 |
| 6608 | 10705 | 6655 | 10752 |
| 6609 | 10706 | 6656 | 10753 |
| 6610 | 10707 | 6657 | 10754 |
| 6611 | 10708 | 6658 | 10755 |
| 6612 | 10709 | 6659 | 10756 |
| 6613 | 10710 | 6660 | 10757 |
| 6614 | 10711 | 6661 | 10758 |
| 6615 | 10712 | 6662 | 10759 |
| 6616 | 10713 | 6663 | 10760 |
| 6664 | 10761 | 6711 | 10808 |
| 6665 | 10762 | 6712 | 10809 |
| 6666 | 10763 | 6713 | 10810 |
| 6667 | 10764 | 6714 | 10811 |
| 6668 | 10765 | 6715 | 10812 |
| 6669 | 10766 | 6716 | 10813 |
| 6670 | 10767 | 6717 | 10814 |
| 6671 | 10768 | 6718 | 10815 |
| 6672 | 10769 | 6719 | 10816 |
| 6673 | 10770 | 6720 | 10817 |
| 6674 | 10771 | 6721 | 10818 |
| 6675 | 10772 | 6722 | 10819 |
| 6676 | 10773 | 6723 | 10820 |
| 6677 | 10774 | 6724 | 10821 |
| 6678 | 10775 | 6725 | 10822 |
| 6679 | 10776 | 6726 | 10823 |
| 6680 | 10777 | 6727 | 10824 |
| 6681 | 10778 | 6728 | 10825 |
| 6682 | 10779 | 6729 | 10826 |
| 6683 | 10780 | 6730 | 10827 |
| 6684 | 10781 | 6731 | 10828 |
| 6685 | 10782 | 6732 | 10829 |
| 6686 | 10783 | 6733 | 10830 |
| 6687 | 10784 | 6734 | 10831 |
| 6688 | 10785 | 6735 | 10832 |
| 6689 | 10786 | 6736 | 10833 |
| 6690 | 10787 | 6737 | 10834 |
| 6691 | 10788 | 6738 | 10835 |
| 6692 | 10789 | 6739 | 10836 |
| 6693 | 10790 | 6740 | 10837 |
| 6694 | 10791 | 6741 | 10838 |
| 6695 | 10792 | 6742 | 10839 |
| 6696 | 10793 | 6743 | 10840 |
| 6697 | 10794 | 6744 | 10841 |
| 6698 | 10795 | 6745 | 10842 |
| 6699 | 10796 | 6746 | 10843 |
| 6700 | 10797 | 6747 | 10844 |
| 6701 | 10798 | 6748 | 10845 |
| 6702 | 10799 | 6749 | 10846 |
| 6703 | 10800 | 6750 | 10847 |
| 6704 | 10801 | 6751 | 10848 |
| 6705 | 10802 | 6752 | 10849 |
| 6706 | 10803 | 6753 | 10850 |
| 6707 | 10804 | 6754 | 10851 |
| 6708 | 10805 | 6755 | 10852 |
| 6709 | 10806 | 6756 | 10853 |
| 6710 | 10807 | 6757 | 10854 |
| 6758 | 10855 | 6805 | 10902 |
| 6759 | 10856 | 6806 | 10903 |
| 6760 | 10857 | 6807 | 10904 |
| 6761 | 10858 | 6808 | 10905 |
| 6762 | 10859 | 6809 | 10906 |
| 6763 | 10860 | 6810 | 10907 |
| 6764 | 10861 | 6811 | 10908 |
| 6765 | 10862 | 6812 | 10909 |
| 6766 | 10863 | 6813 | 10910 |
| 6767 | 10864 | 6814 | 10911 |
| 6768 | 10865 | 6815 | 10912 |
| 6769 | 10866 | 6816 | 10913 |
| 6770 | 10867 | 6817 | 10914 |
| 6771 | 10868 | 6818 | 10915 |
| 6772 | 10869 | 6819 | 10916 |
| 6773 | 10870 | 6820 | 10917 |
| 6774 | 10871 | 6821 | 10918 |
| 6775 | 10872 | 6822 | 10919 |
| 6776 | 10873 | 6823 | 10920 |
| 6777 | 10874 | 6824 | 10921 |
| 6778 | 10875 | 6825 | 10922 |
| 6779 | 10876 | 6826 | 10923 |
| 6780 | 10877 | 6827 | 10924 |
| 6781 | 10878 | 6828 | 10925 |
| 6782 | 10879 | 6829 | 10926 |
| 6783 | 10880 | 6830 | 10927 |
| 6784 | 10881 | 6831 | 10928 |
| 6785 | 10882 | 6832 | 10929 |
| 6786 | 10883 | 6833 | 10930 |
| 6787 | 10884 | 6834 | 10931 |
| 6788 | 10885 | 6835 | 10932 |
| 6789 | 10886 | 6836 | 10933 |
| 6790 | 10887 | 6837 | 10934 |
| 6791 | 10888 | 6838 | 10935 |
| 6792 | 10889 | 6839 | 10936 |
| 6793 | 10890 | 6840 | 10937 |
| 6794 | 10891 | 6841 | 10938 |
| 6795 | 10892 | 6842 | 10939 |
| 6796 | 10893 | 6843 | 10940 |
| 6797 | 10894 | 6844 | 10941 |
| 6798 | 10895 | 6845 | 10942 |
| 6799 | 10896 | 6846 | 10943 |
| 6800 | 10897 | 6847 | 10944 |
| 6801 | 10898 | 6848 | 10945 |
| 6802 | 10899 | 6849 | 10946 |
| 6803 | 10900 | 6850 | 10947 |
| 6804 | 10901 | 6851 | 10948 |
| 6852 | 10949 | 6899 | 10996 |
| 6853 | 10950 | 6900 | 10997 |
| 6854 | 10951 | 6901 | 10998 |
| 6855 | 10952 | 6902 | 10999 |
| 6856 | 10953 | 6903 | 11000 |
| 6857 | 10954 | 6904 | 11001 |
| 6858 | 10955 | 6905 | 11002 |
| 6859 | 10956 | 6906 | 11003 |
| 6860 | 10957 | 6907 | 11004 |
| 6861 | 10958 | 6908 | 11005 |
| 6862 | 10959 | 6909 | 11006 |
| 6863 | 10960 | 6910 | 11007 |
| 6864 | 10961 | 6911 | 11008 |
| 6865 | 10962 | 6912 | 11009 |
| 6866 | 10963 | 6913 | 11010 |
| 6867 | 10964 | 6914 | 11011 |
| 6868 | 10965 | 6915 | 11012 |
| 6869 | 10966 | 6916 | 11013 |
| 6870 | 10967 | 6917 | 11014 |
| 6871 | 10968 | 6918 | 11015 |
| 6872 | 10969 | 6919 | 11016 |
| 6873 | 10970 | 6920 | 11017 |
| 6874 | 10971 | 6921 | 11018 |
| 6875 | 10972 | 6922 | 11019 |
| 6876 | 10973 | 6923 | 11020 |
| 6877 | 10974 | 6924 | 11021 |
| 6878 | 10975 | 6925 | 11022 |
| 6879 | 10976 | 6926 | 11023 |
| 6880 | 10977 | 6927 | 11024 |
| 6881 | 10978 | 6928 | 11025 |
| 6882 | 10979 | 6929 | 11026 |
| 6883 | 10980 | 6930 | 11027 |
| 6884 | 10981 | 6931 | 11028 |
| 6885 | 10982 | 6932 | 11029 |
| 6886 | 10983 | 6933 | 11030 |
| 6887 | 10984 | 6934 | 11031 |
| 6888 | 10985 | 6935 | 11032 |
| 6889 | 10986 | 6936 | 11033 |
| 6890 | 10987 | 6937 | 11034 |
| 6891 | 10988 | 6938 | 11035 |
| 6892 | 10989 | 6939 | 11036 |
| 6893 | 10990 | 6940 | 11037 |
| 6894 | 10991 | 6941 | 11038 |
| 6895 | 10992 | 6942 | 11039 |
| 6896 | 10993 | 6943 | 11040 |
| 6897 | 10994 | 6944 | 11041 |
| 6898 | 10995 | 6945 | 11042 |
| 6946 | 11043 | 6993 | 11090 |
| 6947 | 11044 | 6994 | 11091 |
| 6948 | 11045 | 6995 | 11092 |
| 6949 | 11046 | 6996 | 11093 |
| 6950 | 11047 | 6997 | 11094 |
| 6951 | 11048 | 6998 | 11095 |
| 6952 | 11049 | 6999 | 11096 |
| 6953 | 11050 | 7000 | 11097 |
| 6954 | 11051 | 7001 | 11098 |
| 6955 | 11052 | 7002 | 11099 |
| 6956 | 11053 | 7003 | 11100 |
| 6957 | 11054 | 7004 | 11101 |
| 6958 | 11055 | 7005 | 11102 |
| 6959 | 11056 | 7006 | 11103 |
| 6960 | 11057 | 7007 | 11104 |
| 6961 | 11058 | 7008 | 11105 |
| 6962 | 11059 | 7009 | 11106 |
| 6963 | 11060 | 7010 | 11107 |
| 6964 | 11061 | 7011 | 11108 |
| 6965 | 11062 | 7012 | 11109 |
| 6966 | 11063 | 7013 | 11110 |
| 6967 | 11064 | 7014 | 11111 |
| 6968 | 11065 | 7015 | 11112 |
| 6969 | 11066 | 7016 | 11113 |
| 6970 | 11067 | 7017 | 11114 |
| 6971 | 11068 | 7018 | 11115 |
| 6972 | 11069 | 7019 | 11116 |
| 6973 | 11070 | 7020 | 11117 |
| 6974 | 11071 | 7021 | 11118 |
| 6975 | 11072 | 7022 | 11119 |
| 6976 | 11073 | 7023 | 11120 |
| 6977 | 11074 | 7024 | 11121 |
| 6978 | 11075 | 7025 | 11122 |
| 6979 | 11076 | 7026 | 11123 |
| 6980 | 11077 | 7027 | 11124 |
| 6981 | 11078 | 7028 | 11125 |
| 6982 | 11079 | 7029 | 11126 |
| 6983 | 11080 | 7030 | 11127 |
| 6984 | 11081 | 7031 | 11128 |
| 6985 | 11082 | 7032 | 11129 |
| 6986 | 11083 | 7033 | 11130 |
| 6987 | 11084 | 7034 | 11131 |
| 6988 | 11085 | 7035 | 11132 |
| 6989 | 11086 | 7036 | 11133 |
| 6990 | 11087 | 7037 | 11134 |
| 6991 | 11088 | 7038 | 11135 |
| 6992 | 11089 | 7039 | 11136 |
| 7040 | 11137 | 7087 | 11184 |
| 7041 | 11138 | 7088 | 11185 |
| 7042 | 11139 | 7089 | 11186 |
| 7043 | 11140 | 7090 | 11187 |
| 7044 | 11141 | 7091 | 11188 |
| 7045 | 11142 | 7092 | 11189 |
| 7046 | 11143 | 7093 | 11190 |
| 7047 | 11144 | 7094 | 11191 |
| 7048 | 11145 | 7095 | 11192 |
| 7049 | 11146 | 7096 | 11193 |
| 7050 | 11147 | 7097 | 11194 |
| 7051 | 11148 | 7098 | 11195 |
| 7052 | 11149 | 7099 | 11196 |
| 7053 | 11150 | 7100 | 11197 |
| 7054 | 11151 | 7101 | 11198 |
| 7055 | 11152 | 7102 | 11199 |
| 7056 | 11153 | 7103 | 11200 |
| 7057 | 11154 | 7104 | 11201 |
| 7058 | 11155 | 7105 | 11202 |
| 7059 | 11156 | 7106 | 11203 |
| 7060 | 11157 | 7107 | 11204 |
| 7061 | 11158 | 7108 | 11205 |
| 7062 | 11159 | 7109 | 11206 |
| 7063 | 11160 | 7110 | 11207 |
| 7064 | 11161 | 7111 | 11208 |
| 7065 | 11162 | 7112 | 11209 |
| 7066 | 11163 | 7113 | 11210 |
| 7067 | 11164 | 7114 | 11211 |
| 7068 | 11165 | 7115 | 11212 |
| 7069 | 11166 | 7116 | 11213 |
| 7070 | 11167 | 7117 | 11214 |
| 7071 | 11168 | 7118 | 11215 |
| 7072 | 11169 | 7119 | 11216 |
| 7073 | 11170 | 7120 | 11217 |
| 7074 | 11171 | 7121 | 11218 |
| 7075 | 11172 | 7122 | 11219 |
| 7076 | 11173 | 7123 | 11220 |
| 7077 | 11174 | 7124 | 11221 |
| 7078 | 11175 | 7125 | 11222 |
| 7079 | 11176 | 7126 | 11223 |
| 7080 | 11177 | 7127 | 11224 |
| 7081 | 11178 | 7128 | 11225 |
| 7082 | 11179 | 7129 | 11226 |
| 7083 | 11180 | 7130 | 11227 |
| 7084 | 11181 | 7131 | 11228 |
| 7085 | 11182 | 7132 | 11229 |
| 7086 | 11183 | 7133 | 11230 |
| 7134 | 11231 | 7181 | 11278 |
| 7135 | 11232 | 7182 | 11279 |
| 7136 | 11233 | 7183 | 11280 |
| 7137 | 11234 | 7184 | 11281 |
| 7138 | 11235 | 7185 | 11282 |
| 7139 | 11236 | 7186 | 11283 |
| 7140 | 11237 | 7187 | 11284 |
| 7141 | 11238 | 7188 | 11285 |
| 7142 | 11239 | 7189 | 11286 |
| 7143 | 11240 | 7190 | 11287 |
| 7144 | 11241 | 7191 | 11288 |
| 7145 | 11242 | 7192 | 11289 |
| 7146 | 11243 | 7193 | 11290 |
| 7147 | 11244 | 7194 | 11291 |
| 7148 | 11245 | 7195 | 11292 |
| 7149 | 11246 | 7196 | 11293 |
| 7150 | 11247 | 7197 | 11294 |
| 7151 | 11248 | 7198 | 11295 |
| 7152 | 11249 | 7199 | 11296 |
| 7153 | 11250 | 7200 | 11297 |
| 7154 | 11251 | 7201 | 11298 |
| 7155 | 11252 | 7202 | 11299 |
| 7156 | 11253 | 7203 | 11300 |
| 7157 | 11254 | 7204 | 11301 |
| 7158 | 11255 | 7205 | 11302 |
| 7159 | 11256 | 7206 | 11303 |
| 7160 | 11257 | 7207 | 11304 |
| 7161 | 11258 | 7208 | 11305 |
| 7162 | 11259 | 7209 | 11306 |
| 7163 | 11260 | 7210 | 11307 |
| 7164 | 11261 | 7211 | 11308 |
| 7165 | 11262 | 7212 | 11309 |
| 7166 | 11263 | 7213 | 11310 |
| 7167 | 11264 | 7214 | 11311 |
| 7168 | 11265 | 7215 | 11312 |
| 7169 | 11266 | 7216 | 11313 |
| 7170 | 11267 | 7217 | 11314 |
| 7171 | 11268 | 7218 | 11315 |
| 7172 | 11269 | 7219 | 11316 |
| 7173 | 11270 | 7220 | 11317 |
| 7174 | 11271 | 7221 | 11318 |
| 7175 | 11272 | 7222 | 11319 |
| 7176 | 11273 | 7223 | 11320 |
| 7177 | 11274 | 7224 | 11321 |
| 7178 | 11275 | 7225 | 11322 |
| 7179 | 11276 | 7226 | 11323 |
| 7180 | 11277 | 7227 | 11324 |
| 7228 | 11325 | 7275 | 11372 |
| 7229 | 11326 | 7276 | 11373 |
| 7230 | 11327 | 7277 | 11374 |
| 7231 | 11328 | 7278 | 11375 |
| 7232 | 11329 | 7279 | 11376 |
| 7233 | 11330 | 7280 | 11377 |
| 7234 | 11331 | 7281 | 11378 |
| 7235 | 11332 | 7282 | 11379 |
| 7236 | 11333 | 7283 | 11380 |
| 7237 | 11334 | 7284 | 11381 |
| 7238 | 11335 | 7285 | 11382 |
| 7239 | 11336 | 7286 | 11383 |
| 7240 | 11337 | 7287 | 11384 |
| 7241 | 11338 | 7288 | 11385 |
| 7242 | 11339 | 7289 | 11386 |
| 7243 | 11340 | 7290 | 11387 |
| 7244 | 11341 | 7291 | 11388 |
| 7245 | 11342 | 7292 | 11389 |
| 7246 | 11343 | 7293 | 11390 |
| 7247 | 11344 | 7294 | 11391 |
| 7248 | 11345 | 7295 | 11392 |
| 7249 | 11346 | 7296 | 11393 |
| 7250 | 11347 | 7297 | 11394 |
| 7251 | 11348 | 7298 | 11395 |
| 7252 | 11349 | 7299 | 11396 |
| 7253 | 11350 | 7300 | 11397 |
| 7254 | 11351 | 7301 | 11398 |
| 7255 | 11352 | 7302 | 11399 |
| 7256 | 11353 | 7303 | 11400 |
| 7257 | 11354 | 7304 | 11401 |
| 7258 | 11355 | 7305 | 11402 |
| 7259 | 11356 | 7306 | 11403 |
| 7260 | 11357 | 7307 | 11404 |
| 7261 | 11358 | 7308 | 11405 |
| 7262 | 11359 | 7309 | 11406 |
| 7263 | 11360 | 7310 | 11407 |
| 7264 | 11361 | 7311 | 11408 |
| 7265 | 11362 | 7312 | 11409 |
| 7266 | 11363 | 7313 | 11410 |
| 7267 | 11364 | 7314 | 11411 |
| 7268 | 11365 | 7315 | 11412 |
| 7269 | 11366 | 7316 | 11413 |
| 7270 | 11367 | 7317 | 11414 |
| 7271 | 11368 | 7318 | 11415 |
| 7272 | 11369 | 7319 | 11416 |
| 7273 | 11370 | 7320 | 11417 |
| 7274 | 11371 | 7321 | 11418 |
| 7322 | 11419 | 7369 | 11466 |
| 7323 | 11420 | 7370 | 11467 |
| 7324 | 11421 | 7371 | 11468 |
| 7325 | 11422 | 7372 | 11469 |
| 7326 | 11423 | 7373 | 11470 |
| 7327 | 11424 | 7374 | 11471 |
| 7328 | 11425 | 7375 | 11472 |
| 7329 | 11426 | 7376 | 11473 |
| 7330 | 11427 | 7377 | 11474 |
| 7331 | 11428 | 7378 | 11475 |
| 7332 | 11429 | 7379 | 11476 |
| 7333 | 11430 | 7380 | 11477 |
| 7334 | 11431 | 7381 | 11478 |
| 7335 | 11432 | 7382 | 11479 |
| 7336 | 11433 | 7383 | 11480 |
| 7337 | 11434 | 7384 | 11481 |
| 7338 | 11435 | 7385 | 11482 |
| 7339 | 11436 | 7386 | 11483 |
| 7340 | 11437 | 7387 | 11484 |
| 7341 | 11438 | 7388 | 11485 |
| 7342 | 11439 | 7389 | 11486 |
| 7343 | 11440 | 7390 | 11487 |
| 7344 | 11441 | 7391 | 11488 |
| 7345 | 11442 | 7392 | 11489 |
| 7346 | 11443 | 7393 | 11490 |
| 7347 | 11444 | 7394 | 11491 |
| 7348 | 11445 | 7395 | 11492 |
| 7349 | 11446 | 7396 | 11493 |
| 7350 | 11447 | 7397 | 11494 |
| 7351 | 11448 | 7398 | 11495 |
| 7352 | 11449 | 7399 | 11496 |
| 7353 | 11450 | 7400 | 11497 |
| 7354 | 11451 | 7401 | 11498 |
| 7355 | 11452 | 7402 | 11499 |
| 7356 | 11453 | 7403 | 11500 |
| 7357 | 11454 | 7404 | 11501 |
| 7358 | 11455 | 7405 | 11502 |
| 7359 | 11456 | 7406 | 11503 |
| 7360 | 11457 | 7407 | 11504 |
| 7361 | 11458 | 7408 | 11505 |
| 7362 | 11459 | 7409 | 11506 |
| 7363 | 11460 | 7410 | 11507 |
| 7364 | 11461 | 7411 | 11508 |
| 7365 | 11462 | 7412 | 11509 |
| 7366 | 11463 | 7413 | 11510 |
| 7367 | 11464 | 7414 | 11511 |
| 7368 | 11465 | 7415 | 11512 |
| 7416 | 11513 | 7463 | 11560 |
| 7417 | 11514 | 7464 | 11561 |
| 7418 | 11515 | 7465 | 11562 |
| 7419 | 11516 | 7466 | 11563 |
| 7420 | 11517 | 7467 | 11564 |
| 7421 | 11518 | 7468 | 11565 |
| 7422 | 11519 | 7469 | 11566 |
| 7423 | 11520 | 7470 | 11567 |
| 7424 | 11521 | 7471 | 11568 |
| 7425 | 11522 | 7472 | 11569 |
| 7426 | 11523 | 7473 | 11570 |
| 7427 | 11524 | 7474 | 11571 |
| 7428 | 11525 | 7475 | 11572 |
| 7429 | 11526 | 7476 | 11573 |
| 7430 | 11527 | 7477 | 11574 |
| 7431 | 11528 | 7478 | 11575 |
| 7432 | 11529 | 7479 | 11576 |
| 7433 | 11530 | 7480 | 11577 |
| 7434 | 11531 | 7481 | 11578 |
| 7435 | 11532 | 7482 | 11579 |
| 7436 | 11533 | 7483 | 11580 |
| 7437 | 11534 | 7484 | 11581 |
| 7438 | 11535 | 7485 | 11582 |
| 7439 | 11536 | 7486 | 11583 |
| 7440 | 11537 | 7487 | 11584 |
| 7441 | 11538 | 7488 | 11585 |
| 7442 | 11539 | 7489 | 11586 |
| 7443 | 11540 | 7490 | 11587 |
| 7444 | 11541 | 7491 | 11588 |
| 7445 | 11542 | 7492 | 11589 |
| 7446 | 11543 | 7493 | 11590 |
| 7447 | 11544 | 7494 | 11591 |
| 7448 | 11545 | 7495 | 11592 |
| 7449 | 11546 | 7496 | 11593 |
| 7450 | 11547 | 7497 | 11594 |
| 7451 | 11548 | 7498 | 11595 |
| 7452 | 11549 | 7499 | 11596 |
| 7453 | 11550 | 7500 | 11597 |
| 7454 | 11551 | 7501 | 11598 |
| 7455 | 11552 | 7502 | 11599 |
| 7456 | 11553 | 7503 | 11600 |
| 7457 | 11554 | 7504 | 11601 |
| 7458 | 11555 | 7505 | 11602 |
| 7459 | 11556 | 7506 | 11603 |
| 7460 | 11557 | 7507 | 11604 |
| 7461 | 11558 | 7508 | 11605 |
| 7462 | 11559 | 7509 | 11606 |
| 7510 | 11607 | 7557 | 11654 |
| 7511 | 11608 | 7558 | 11655 |
| 7512 | 11609 | 7559 | 11656 |
| 7513 | 11610 | 7560 | 11657 |
| 7514 | 11611 | 7561 | 11658 |
| 7515 | 11612 | 7562 | 11659 |
| 7516 | 11613 | 7563 | 11660 |
| 7517 | 11614 | 7564 | 11661 |
| 7518 | 11615 | 7565 | 11662 |
| 7519 | 11616 | 7566 | 11663 |
| 7520 | 11617 | 7567 | 11664 |
| 7521 | 11618 | 7568 | 11665 |
| 7522 | 11619 | 7569 | 11666 |
| 7523 | 11620 | 7570 | 11667 |
| 7524 | 11621 | 7571 | 11668 |
| 7525 | 11622 | 7572 | 11669 |
| 7526 | 11623 | 7573 | 11670 |
| 7527 | 11624 | 7574 | 11671 |
| 7528 | 11625 | 7575 | 11672 |
| 7529 | 11626 | 7576 | 11673 |
| 7530 | 11627 | 7577 | 11674 |
| 7531 | 11628 | 7578 | 11675 |
| 7532 | 11629 | 7579 | 11676 |
| 7533 | 11630 | 7580 | 11677 |
| 7534 | 11631 | 7581 | 11678 |
| 7535 | 11632 | 7582 | 11679 |
| 7536 | 11633 | 7583 | 11680 |
| 7537 | 11634 | 7584 | 11681 |
| 7538 | 11635 | 7585 | 11682 |
| 7539 | 11636 | 7586 | 11683 |
| 7540 | 11637 | 7587 | 11684 |
| 7541 | 11638 | 7588 | 11685 |
| 7542 | 11639 | 7589 | 11686 |
| 7543 | 11640 | 7590 | 11687 |
| 7544 | 11641 | 7591 | 11688 |
| 7545 | 11642 | 7592 | 11689 |
| 7546 | 11643 | 7593 | 11690 |
| 7547 | 11644 | 7594 | 11691 |
| 7548 | 11645 | 7595 | 11692 |
| 7549 | 11646 | 7596 | 11693 |
| 7550 | 11647 | 7597 | 11694 |
| 7551 | 11648 | 7598 | 11695 |
| 7552 | 11649 | 7599 | 11696 |
| 7553 | 11650 | 7600 | 11697 |
| 7554 | 11651 | 7601 | 11698 |
| 7555 | 11652 | 7602 | 11699 |
| 7556 | 11653 | 7603 | 11700 |
| 7604 | 11701 | 7651 | 11748 |
| 7605 | 11702 | 7652 | 11749 |
| 7606 | 11703 | 7653 | 11750 |
| 7607 | 11704 | 7654 | 11751 |
| 7608 | 11705 | 7655 | 11752 |
| 7609 | 11706 | 7656 | 11753 |
| 7610 | 11707 | 7657 | 11754 |
| 7611 | 11708 | 7658 | 11755 |
| 7612 | 11709 | 7659 | 11756 |
| 7613 | 11710 | 7660 | 11757 |
| 7614 | 11711 | 7661 | 11758 |
| 7615 | 11712 | 7662 | 11759 |
| 7616 | 11713 | 7663 | 11760 |
| 7617 | 11714 | 7664 | 11761 |
| 7618 | 11715 | 7665 | 11762 |
| 7619 | 11716 | 7666 | 11763 |
| 7620 | 11717 | 7667 | 11764 |
| 7621 | 11718 | 7668 | 11765 |
| 7622 | 11719 | 7669 | 11766 |
| 7623 | 11720 | 7670 | 11767 |
| 7624 | 11721 | 7671 | 11768 |
| 7625 | 11722 | 7672 | 11769 |
| 7626 | 11723 | 7673 | 11770 |
| 7627 | 11724 | 7674 | 11771 |
| 7628 | 11725 | 4052 | 5107 |
| 7629 | 11726 | 4053 | 5108 |
| 7630 | 11727 | 4054 | 5109 |
| 7631 | 11728 | 4055 | 5110 |
| 7632 | 11729 | 4056 | 5111 |
| 7633 | 11730 | 4057 | 5112 |
| 7634 | 11731 | 4058 | 5113 |
| 7635 | 11732 | 4059 | 5114 |
| 7636 | 11733 | 4060 | 5115 |
| 7637 | 11734 | 4061 | 5116 |
| 7638 | 11735 | 4062 | 5117 |
| 7639 | 11736 | 4063 | 5118 |
| 7640 | 11737 | 4064 | 5119 |
| 7641 | 11738 | 4065 | 5120 |
| 7642 | 11739 | 4066 | 5121 |
| 7643 | 11740 | 4067 | 5122 |
| 7644 | 11741 | 4068 | 5123 |
| 7645 | 11742 | 4069 | 5124 |
| 7646 | 11743 | 4070 | 5125 |
| 7647 | 11744 | 4071 | 5126 |
| 7648 | 11745 | 4072 | 5127 |
| 7649 | 11746 | 4073 | 5128 |
| 7650 | 11747 | 4074 | 5129 |
| 4075 | 5130 | 4122 | 5177 |
| 4076 | 5131 | 4123 | 5178 |
| 4077 | 5132 | 4124 | 5179 |
| 4078 | 5133 | 4125 | 5180 |
| 4079 | 5134 | 4126 | 5181 |
| 4080 | 5135 | 4127 | 5182 |
| 4081 | 5136 | 4128 | 5183 |
| 4082 | 5137 | 4129 | 5184 |
| 4083 | 5138 | 4130 | 5185 |
| 4084 | 5139 | 4131 | 5186 |
| 4085 | 5140 | 4132 | 5187 |
| 4086 | 5141 | 4133 | 5188 |
| 4087 | 5142 | 4134 | 5189 |
| 4088 | 5143 | 4135 | 5190 |
| 4089 | 5144 | 4136 | 5191 |
| 4090 | 5145 | 4137 | 5192 |
| 4091 | 5146 | 4138 | 5193 |
| 4092 | 5147 | 4139 | 5194 |
| 4093 | 5148 | 4140 | 5195 |
| 4094 | 5149 | 4141 | 5196 |
| 4095 | 5150 | 4142 | 5197 |
| 4096 | 5151 | 4143 | 5198 |
| 4097 | 5152 | 4144 | 5199 |
| 4098 | 5153 | 4145 | 5200 |
| 4099 | 5154 | 4146 | 5201 |
| 4100 | 5155 | 4147 | 5202 |
| 4101 | 5156 | 4148 | 5203 |
| 4102 | 5157 | 4149 | 5204 |
| 4103 | 5158 | 4150 | 5205 |
| 4104 | 5159 | 4151 | 5206 |
| 4105 | 5160 | 4152 | 5207 |
| 4106 | 5161 | 4153 | 5208 |
| 4107 | 5162 | 4154 | 5209 |
| 4108 | 5163 | 4155 | 5210 |
| 4109 | 5164 | 4156 | 5211 |
| 4110 | 5165 | 4157 | 5212 |
| 4111 | 5166 | 4158 | 5213 |
| 4112 | 5167 | 4159 | 5214 |
| 4113 | 5168 | 4160 | 5215 |
| 4114 | 5169 | 4161 | 5216 |
| 4115 | 5170 | 4162 | 5217 |
| 4116 | 5171 | 4163 | 5218 |
| 4117 | 5172 | 4164 | 5219 |
| 4118 | 5173 | 4165 | 5220 |
| 4119 | 5174 | 3998 | 5053 |
| 4120 | 5175 | 3999 | 5054 |
| 4121 | 5176 | 4000 | 5055 |
| 4001 | 5056 | 4048 | 5103 |
| 4002 | 5057 | 4049 | 5104 |
| 4003 | 5058 | 4050 | 5105 |
| 4004 | 5059 | 4051 | 5106 |
| 4005 | 5060 | 7675 | 11772 |
| 4006 | 5061 | 7676 | 11773 |
| 4007 | 5062 | 7677 | 11774 |
| 4008 | 5063 | 7678 | 11775 |
| 4009 | 5064 | 7676 | 11776 |
| 4010 | 5065 | 7679 | 11777 |
| 4011 | 5066 | 7680 | 11778 |
| 4012 | 5067 | 7681 | 11779 |
| 4013 | 5068 | 7682 | 11780 |
| 4014 | 5069 | 7683 | 11781 |
| 4015 | 5070 | 7684 | 11782 |
| 4016 | 5071 | 7685 | 11783 |
| 4017 | 5072 | 7686 | 11784 |
| 4018 | 5073 | 7687 | 11785 |
| 4019 | 5074 | 7688 | 11786 |
| 4020 | 5075 | 7689 | 11787 |
| 4021 | 5076 | 7690 | 11788 |
| 4022 | 5077 | 7691 | 11789 |
| 4023 | 5078 | 7692 | 11790 |
| 4024 | 5079 | 7693 | 11791 |
| 4025 | 5080 | 7694 | 11792 |
| 4026 | 5081 | 7695 | 11793 |
| 4027 | 5082 | 7696 | 11794 |
| 4028 | 5083 | 7697 | 11795 |
| 4029 | 5084 | 7698 | 11796 |
| 4030 | 5085 | 7699 | 11797 |
| 4031 | 5086 | 7700 | 11798 |
| 4032 | 5087 | 7701 | 11799 |
| 4033 | 5088 | 7702 | 11800 |
| 4034 | 5089 | 7703 | 11801 |
| 4035 | 5090 | 7704 | 11802 |
| 4036 | 5091 | 7705 | 11803 |
| 4037 | 5092 | 7706 | 11804 |
| 4038 | 5093 | 7707 | 11805 |
| 4039 | 5094 | 7708 | 11806 |
| 4040 | 5095 | 7709 | 11807 |
| 4041 | 5096 | 7710 | 11808 |
| 4042 | 5097 | 7711 | 11809 |
| 4043 | 5098 | 7712 | 11810 |
| 4044 | 5099 | 7713 | 11811 |
| 4045 | 5100 | 7714 | 11812 |
| 4046 | 5101 | 7715 | 11813 |
| 4047 | 5102 | 7716 | 11814 |
| 7717 | 11815 | 7764 | 11862 |
| 7718 | 11816 | 7765 | 11863 |
| 7719 | 11817 | 7766 | 11864 |
| 7720 | 11818 | 7767 | 11865 |
| 7721 | 11819 | 7768 | 11866 |
| 7722 | 11820 | 7769 | 11867 |
| 7723 | 11821 | 7770 | 11868 |
| 7724 | 11822 | 7771 | 11869 |
| 7725 | 11823 | 7772 | 11870 |
| 7726 | 11824 | 7773 | 11871 |
| 7727 | 11825 | 7774 | 11872 |
| 7728 | 11826 | 7775 | 11873 |
| 7729 | 11827 | 7776 | 11874 |
| 7730 | 11828 | 7777 | 11875 |
| 7731 | 11829 | 7778 | 11876 |
| 7732 | 11830 | 7779 | 11877 |
| 7733 | 11831 | 7780 | 11878 |
| 7734 | 11832 | 7781 | 11879 |
| 7735 | 11833 | 7782 | 11880 |
| 7736 | 11834 | 7783 | 11881 |
| 7737 | 11835 | 7784 | 11882 |
| 7738 | 11836 | 7785 | 11883 |
| 7739 | 11837 | 7786 | 11884 |
| 7740 | 11838 | 7787 | 11885 |
| 7741 | 11839 | 7788 | 11886 |
| 7742 | 11840 | 7789 | 11887 |
| 7743 | 11841 | 7790 | 11888 |
| 7744 | 11842 | 7791 | 11889 |
| 7745 | 11843 | 7792 | 11890 |
| 7746 | 11844 | 7793 | 11891 |
| 7747 | 11845 | 7794 | 11892 |
| 7748 | 11846 | 7795 | 11893 |
| 7749 | 11847 | 7796 | 11894 |
| 7750 | 11848 | 7797 | 11895 |
| 7751 | 11849 | 7798 | 11896 |
| 7752 | 11850 | 7799 | 11897 |
| 7753 | 11851 | 7800 | 11898 |
| 7754 | 11852 | 7801 | 11899 |
| 7755 | 11853 | 7802 | 11900 |
| 7756 | 11854 | 7803 | 11901 |
| 7757 | 11855 | 7804 | 11902 |
| 7758 | 11856 | 7805 | 11903 |
| 7759 | 11857 | 7806 | 11904 |
| 7760 | 11858 | 7807 | 11905 |
| 7761 | 11859 | 7808 | 11906 |
| 7762 | 11860 | 7809 | 11907 |
| 7763 | 11861 | 7810 | 11908 |
| 7811 | 11909 | 7858 | 11956 |
| 7812 | 11910 | 7859 | 11957 |
| 7813 | 11911 | 7860 | 11958 |
| 7814 | 11912 | 7861 | 11959 |
| 7815 | 11913 | 7862 | 11960 |
| 7816 | 11914 | 7863 | 11961 |
| 7817 | 11915 | 7864 | 11962 |
| 7818 | 11916 | 7865 | 11963 |
| 7819 | 11917 | 7866 | 11964 |
| 7820 | 11918 | 7867 | 11965 |
| 7821 | 11919 | 7868 | 11966 |
| 7822 | 11920 | 7869 | 11967 |
| 7823 | 11921 | 7870 | 11968 |
| 7824 | 11922 | 7871 | 11969 |
| 7825 | 11923 | 7872 | 11970 |
| 7826 | 11924 | 7873 | 11971 |
| 7827 | 11925 | 7874 | 11972 |
| 7828 | 11926 | 7875 | 11973 |
| 7829 | 11927 | 7876 | 11974 |
| 7830 | 11928 | 7877 | 11975 |
| 7831 | 11929 | 7878 | 11976 |
| 7832 | 11930 | 7879 | 11977 |
| 7833 | 11931 | 7880 | 11978 |
| 7834 | 11932 | 7881 | 11979 |
| 7835 | 11933 | 7882 | 11980 |
| 7836 | 11934 | 7883 | 11981 |
| 7837 | 11935 | 7884 | 11982 |
| 7838 | 11936 | 7885 | 11983 |
| 7839 | 11937 | 7886 | 11984 |
| 7840 | 11938 | 7887 | 11985 |
| 7841 | 11939 | 7888 | 11986 |
| 7842 | 11940 | 7889 | 11987 |
| 7843 | 11941 | 7890 | 11988 |
| 7844 | 11942 | 7891 | 11989 |
| 7845 | 11943 | 7892 | 11990 |
| 7846 | 11944 | 7893 | 11991 |
| 7847 | 11945 | 7894 | 11992 |
| 7848 | 11946 | 7895 | 11993 |
| 7849 | 11947 | 7896 | 11994 |
| 7850 | 11948 | 7897 | 11995 |
| 7851 | 11949 | 7898 | 11996 |
| 7852 | 11950 | 7899 | 11997 |
| 7853 | 11951 | 7900 | 11998 |
| 7854 | 11952 | 7901 | 11999 |
| 7855 | 11953 | 7902 | 12000 |
| 7856 | 11954 | 7903 | 12001 |
| 7857 | 11955 | 7904 | 12002 |
| 7905 | 12003 | 7952 | 12050 |
| 7906 | 12004 | 7953 | 12051 |
| 7907 | 12005 | 7954 | 12052 |
| 7908 | 12006 | 7955 | 12053 |
| 7909 | 12007 | 7956 | 12054 |
| 7910 | 12008 | 7957 | 12055 |
| 7911 | 12009 | 7958 | 12056 |
| 7912 | 12010 | 7959 | 12057 |
| 7913 | 12011 | 7960 | 12058 |
| 7914 | 12012 | 7961 | 12059 |
| 7915 | 12013 | 7962 | 12060 |
| 7916 | 12014 | 7963 | 12061 |
| 7917 | 12015 | 7964 | 12062 |
| 7918 | 12016 | 7965 | 12063 |
| 7919 | 12017 | 7966 | 12064 |
| 7920 | 12018 | 7967 | 12065 |
| 7921 | 12019 | 7968 | 12066 |
| 7922 | 12020 | 7969 | 12067 |
| 7923 | 12021 | 7970 | 12068 |
| 7924 | 12022 | 7971 | 12069 |
| 7925 | 12023 | 7972 | 12070 |
| 7926 | 12024 | 7973 | 12071 |
| 7927 | 12025 | 7974 | 12072 |
| 7928 | 12026 | 7975 | 12073 |
| 7929 | 12027 | 7976 | 12074 |
| 7930 | 12028 | 7977 | 12075 |
| 7931 | 12029 | 7978 | 12076 |
| 7932 | 12030 | 7979 | 12077 |
| 7933 | 12031 | 7980 | 12078 |
| 7934 | 12032 | 7981 | 12079 |
| 7935 | 12033 | 7982 | 12080 |
| 7936 | 12034 | 7983 | 12081 |
| 7937 | 12035 | 7984 | 12082 |
| 7938 | 12036 | 7985 | 12083 |
| 7939 | 12037 | 7986 | 12084 |
| 7940 | 12038 | 7987 | 12085 |
| 7941 | 12039 | 7988 | 12086 |
| 7942 | 12040 | 7989 | 12087 |
| 7943 | 12041 | 7990 | 12088 |
| 7944 | 12042 | 7991 | 12089 |
| 7945 | 12043 | 7992 | 12090 |
| 7946 | 12044 | 7993 | 12091 |
| 7947 | 12045 | 7994 | 12092 |
| 7948 | 12046 | 7995 | 12093 |
| 7949 | 12047 | 7996 | 12094 |
| 7950 | 12048 | 7997 | 12095 |
| 7951 | 12049 | 7998 | 12096 |
| 7999 | 12097 | 8046 | 12144 |
| 8000 | 12098 | 8047 | 12145 |
| 8001 | 12099 | 8048 | 12146 |
| 8002 | 12100 | 8049 | 12147 |
| 8003 | 12101 | 8050 | 12148 |
| 8004 | 12102 | 8051 | 12149 |
| 8005 | 12103 | 8052 | 12150 |
| 8006 | 12104 | 8053 | 12151 |
| 8007 | 12105 | 8054 | 12152 |
| 8008 | 12106 | 8055 | 12153 |
| 8009 | 12107 | 8056 | 12154 |
| 8010 | 12108 | 8057 | 12155 |
| 8011 | 12109 | 8058 | 12156 |
| 8012 | 12110 | 8059 | 12157 |
| 8013 | 12111 | 8060 | 12158 |
| 8014 | 12112 | 8061 | 12159 |
| 8015 | 12113 | 8062 | 12160 |
| 8016 | 12114 | 8063 | 12161 |
| 8017 | 12115 | 8064 | 12162 |
| 8018 | 12116 | 8065 | 12163 |
| 8019 | 12117 | 8066 | 12164 |
| 8020 | 12118 | 8067 | 12165 |
| 8021 | 12119 | 8068 | 12166 |
| 8022 | 12120 | 8069 | 12167 |
| 8023 | 12121 | 8070 | 12168 |
| 8024 | 12122 | 8071 | 12169 |
| 8025 | 12123 | 8072 | 12170 |
| 8026 | 12124 | 8073 | 12171 |
| 8027 | 12125 | 8074 | 12172 |
| 8028 | 12126 | 8075 | 12173 |
| 8029 | 12127 | 8076 | 12174 |
| 8030 | 12128 | 8077 | 12175 |
| 8031 | 12129 | 8078 | 12176 |
| 8032 | 12130 | 8079 | 12177 |
| 8033 | 12131 | 8080 | 12178 |
| 8034 | 12132 | 8081 | 12179 |
| 8035 | 12133 | 8082 | 12180 |
| 8036 | 12134 | 8083 | 12181 |
| 8037 | 12135 | 8084 | 12182 |
| 8038 | 12136 | 8085 | 12183 |
| 8039 | 12137 | 8086 | 12184 |
| 8040 | 12138 | 8087 | 12185 |
| 8041 | 12139 | 8088 | 12186 |
| 8042 | 12140 | 8089 | 12187 |
| 8043 | 12141 | 8090 | 12188 |
| 8044 | 12142 | 8091 | 12189 |
| 8045 | 12143 | 8092 | 12190 |
| 8093 | 12191 | 8140 | 12238 |
| 8094 | 12192 | 8141 | 12239 |
| 8095 | 12193 | 8142 | 12240 |
| 8096 | 12194 | 8143 | 12241 |
| 8097 | 12195 | 8144 | 12242 |
| 8098 | 12196 | 8145 | 12243 |
| 8099 | 12197 | 8146 | 12244 |
| 8100 | 12198 | 8147 | 12245 |
| 8101 | 12199 | 8148 | 12246 |
| 8102 | 12200 | 8149 | 12247 |
| 8103 | 12201 | 8150 | 12248 |
| 8104 | 12202 | 8151 | 12249 |
| 8105 | 12203 | 8152 | 12250 |
| 8106 | 12204 | 8153 | 12251 |
| 8107 | 12205 | 8154 | 12252 |
| 8108 | 12206 | 8155 | 12253 |
| 8109 | 12207 | 8156 | 12254 |
| 8110 | 12208 | 8157 | 12255 |
| 8111 | 12209 | 8158 | 12256 |
| 8112 | 12210 | 8159 | 12257 |
| 8113 | 12211 | 8160 | 12258 |
| 8114 | 12212 | 8161 | 12259 |
| 8115 | 12213 | 8162 | 12260 |
| 8116 | 12214 | 8163 | 12261 |
| 8117 | 12215 | 8164 | 12262 |
| 8118 | 12216 | 8165 | 12263 |
| 8119 | 12217 | 8166 | 12264 |
| 8120 | 12218 | 8167 | 12265 |
| 8121 | 12219 | 8168 | 12266 |
| 8122 | 12220 | 8169 | 12267 |
| 8123 | 12221 | 8170 | 12268 |
| 8124 | 12222 | 8171 | 12269 |
| 8125 | 12223 | 8172 | 12270 |
| 8126 | 12224 | 8173 | 12271 |
| 8127 | 12225 | 8174 | 12272 |
| 8128 | 12226 | 8175 | 12273 |
| 8129 | 12227 | 8176 | 12274 |
| 8130 | 12228 | 8177 | 12275 |
| 8131 | 12229 | 8178 | 12276 |
| 8132 | 12230 | 8179 | 12277 |
| 8133 | 12231 | 8180 | 12278 |
| 8134 | 12232 | 8181 | 12279 |
| 8135 | 12233 | 8182 | 12280 |
| 8136 | 12234 | 8183 | 12281 |
| 8137 | 12235 | 8184 | 12282 |
| 8138 | 12236 | 8185 | 12283 |
| 8139 | 12237 | 8186 | 12284 |
| 8187 | 12285 | 8234 | 12332 |
| 8188 | 12286 | 8235 | 12333 |
| 8189 | 12287 | 8236 | 12334 |
| 8190 | 12288 | 8237 | 12335 |
| 8191 | 12289 | 8238 | 12336 |
| 8192 | 12290 | 8239 | 12337 |
| 8193 | 12291 | 8240 | 12338 |
| 8194 | 12292 | 8241 | 12339 |
| 8195 | 12293 | 8242 | 12340 |
| 8196 | 12294 | 8243 | 12341 |
| 8197 | 12295 | 8244 | 12342 |
| 8198 | 12296 | 8245 | 12343 |
| 8199 | 12297 | 8246 | 12344 |
| 8200 | 12298 | 8247 | 12345 |
| 8201 | 12299 | 8248 | 12346 |
| 8202 | 12300 | 8249 | 12347 |
| 8203 | 12301 | 8250 | 12348 |
| 8204 | 12302 | 8251 | 12349 |
| 8205 | 12303 | 8252 | 12350 |
| 8206 | 12304 | 8253 | 12351 |
| 8207 | 12305 | 8254 | 12352 |
| 8208 | 12306 | 8255 | 12353 |
| 8209 | 12307 | 8256 | 12354 |
| 8210 | 12308 | 8257 | 12355 |
| 8211 | 12309 | 8258 | 12356 |
| 8212 | 12310 | 8259 | 12357 |
| 8213 | 12311 | 8260 | 12358 |
| 8214 | 12312 | 8261 | 12359 |
| 8215 | 12313 | 8262 | 12360 |
| 8216 | 12314 | 8263 | 12361 |
| 8217 | 12315 | 8264 | 12362 |
| 8218 | 12316 | 8265 | 12363 |
| 8219 | 12317 | 8266 | 12364 |
| 8220 | 12318 | 8267 | 12365 |
| 8221 | 12319 | 8268 | 12366 |
| 8222 | 12320 | 8269 | 12367 |
| 8223 | 12321 | 8270 | 12368 |
| 8224 | 12322 | 8271 | 12369 |
| 8225 | 12323 | 8272 | 12370 |
| 8226 | 12324 | 8273 | 12371 |
| 8227 | 12325 | 8274 | 12372 |
| 8228 | 12326 | 8275 | 12373 |
| 8229 | 12327 | 8276 | 12374 |
| 8230 | 12328 | 8277 | 12375 |
| 8231 | 12329 | 8278 | 12376 |
| 8232 | 12330 | 8279 | 12377 |
| 8233 | 12331 | 8280 | 12378 |
| 8281 | 12379 | 8328 | 12426 |
| 8282 | 12380 | 8329 | 12427 |
| 8283 | 12381 | 8330 | 12428 |
| 8284 | 12382 | 8331 | 12429 |
| 8285 | 12383 | 8332 | 12430 |
| 8286 | 12384 | 8333 | 12431 |
| 8287 | 12385 | 8334 | 12432 |
| 8288 | 12386 | 8335 | 12433 |
| 8289 | 12387 | 8336 | 12434 |
| 8290 | 12388 | 8337 | 12435 |
| 8291 | 12389 | 8338 | 12436 |
| 8292 | 12390 | 8339 | 12437 |
| 8293 | 12391 | 8340 | 12438 |
| 8294 | 12392 | 8341 | 12439 |
| 8295 | 12393 | 8342 | 12440 |
| 8296 | 12394 | 8343 | 12441 |
| 8297 | 12395 | 8344 | 12442 |
| 8298 | 12396 | 8345 | 12443 |
| 8299 | 12397 | 8346 | 12444 |
| 8300 | 12398 | 8347 | 12445 |
| 8301 | 12399 | 8348 | 12446 |
| 8302 | 12400 | 8349 | 12447 |
| 8303 | 12401 | 8350 | 12448 |
| 8304 | 12402 | 8351 | 12449 |
| 8305 | 12403 | 8352 | 12450 |
| 8306 | 12404 | 8353 | 12451 |
| 8307 | 12405 | 8354 | 12452 |
| 8308 | 12406 | 8355 | 12453 |
| 8309 | 12407 | 8356 | 12454 |
| 8310 | 12408 | 8357 | 12455 |
| 8311 | 12409 | 8358 | 12456 |
| 8312 | 12410 | 8359 | 12457 |
| 8313 | 12411 | 8360 | 12458 |
| 8314 | 12412 | 8361 | 12459 |
| 8315 | 12413 | 8362 | 12460 |
| 8316 | 12414 | 8363 | 12461 |
| 8317 | 12415 | 8364 | 12462 |
| 8318 | 12416 | 8365 | 12463 |
| 8319 | 12417 | 8366 | 12464 |
| 8320 | 12418 | 8367 | 12465 |
| 8321 | 12419 | 8368 | 12466 |
| 8322 | 12420 | 8369 | 12467 |
| 8323 | 12421 | 8370 | 12468 |
| 8324 | 12422 | 8371 | 12469 |
| 8325 | 12423 | 8372 | 12470 |
| 8326 | 12424 | 8373 | 12471 |
| 8327 | 12425 | 8374 | 12472 |
| 8375 | 12473 | 8422 | 12520 |
| 8376 | 12474 | 8423 | 12521 |
| 8377 | 12475 | 8424 | 12522 |
| 8378 | 12476 | 8425 | 12523 |
| 8379 | 12477 | 8426 | 12524 |
| 8380 | 12478 | 8427 | 12525 |
| 8381 | 12479 | 8428 | 12526 |
| 8382 | 12480 | 8429 | 12527 |
| 8383 | 12481 | 8430 | 12528 |
| 8384 | 12482 | 8431 | 12529 |
| 8385 | 12483 | 8432 | 12530 |
| 8386 | 12484 | 8433 | 12531 |
| 8387 | 12485 | 8434 | 12532 |
| 8388 | 12486 | 8435 | 12533 |
| 8389 | 12487 | 8436 | 12534 |
| 8390 | 12488 | 8437 | 12535 |
| 8391 | 12489 | 8438 | 12536 |
| 8392 | 12490 | 8439 | 12537 |
| 8393 | 12491 | 8440 | 12538 |
| 8394 | 12492 | 8441 | 12539 |
| 8395 | 12493 | 8442 | 12540 |
| 8396 | 12494 | 8443 | 12541 |
| 8397 | 12495 | 8444 | 12542 |
| 8398 | 12496 | 8445 | 12543 |
| 8399 | 12497 | 8446 | 12544 |
| 8400 | 12498 | 8447 | 12545 |
| 8401 | 12499 | 8448 | 12546 |
| 8402 | 12500 | 8449 | 12547 |
| 8403 | 12501 | 8450 | 12548 |
| 8404 | 12502 | 8451 | 12549 |
| 8405 | 12503 | 8452 | 12550 |
| 8406 | 12504 | 8453 | 12551 |
| 8407 | 12505 | 8454 | 12552 |
| 8408 | 12506 | 8455 | 12553 |
| 8409 | 12507 | 8456 | 12554 |
| 8410 | 12508 | 8457 | 12555 |
| 8411 | 12509 | 8458 | 12556 |
| 8412 | 12510 | 8459 | 12557 |
| 8413 | 12511 | 8460 | 12558 |
| 8414 | 12512 | 8461 | 12559 |
| 8415 | 12513 | 8462 | 12560 |
| 8416 | 12514 | 8463 | 12561 |
| 8417 | 12515 | 8464 | 12562 |
| 8418 | 12516 | 8465 | 12563 |
| 8419 | 12517 | 8466 | 12564 |
| 8420 | 12518 | 8467 | 12565 |
| 8421 | 12519 | 8468 | 12566 |
| 8469 | 12567 | 8516 | 12614 |
| 8470 | 12568 | 8517 | 12615 |
| 8471 | 12569 | 8518 | 12616 |
| 8472 | 12570 | 8519 | 12617 |
| 8473 | 12571 | 8520 | 12618 |
| 8474 | 12572 | 8521 | 12619 |
| 8475 | 12573 | 8522 | 12620 |
| 8476 | 12574 | 8523 | 12621 |
| 8477 | 12575 | 8524 | 12622 |
| 8478 | 12576 | 8525 | 12623 |
| 8479 | 12577 | 8526 | 12624 |
| 8480 | 12578 | 8527 | 12625 |
| 8481 | 12579 | 8528 | 12626 |
| 8482 | 12580 | 8529 | 12627 |
| 8483 | 12581 | 8530 | 12628 |
| 8484 | 12582 | 8531 | 12629 |
| 8485 | 12583 | 8532 | 12630 |
| 8486 | 12584 | 8533 | 12631 |
| 8487 | 12585 | 8534 | 12632 |
| 8488 | 12586 | 8535 | 12633 |
| 8489 | 12587 | 8536 | 12634 |
| 8490 | 12588 | 8537 | 12635 |
| 8491 | 12589 | 8538 | 12636 |
| 8492 | 12590 | 8539 | 12637 |
| 8493 | 12591 | 8540 | 12638 |
| 8494 | 12592 | 8541 | 12639 |
| 8495 | 12593 | 8542 | 12640 |
| 8496 | 12594 | 8543 | 12641 |
| 8497 | 12595 | 8544 | 12642 |
| 8498 | 12596 | 8545 | 12643 |
| 8499 | 12597 | 8546 | 12644 |
| 8500 | 12598 | 8547 | 12645 |
| 8501 | 12599 | 8548 | 12646 |
| 8502 | 12600 | 8549 | 12647 |
| 8503 | 12601 | 8550 | 12648 |
| 8504 | 12602 | 8551 | 12649 |
| 8505 | 12603 | 8552 | 12650 |
| 8506 | 12604 | 8553 | 12651 |
| 8507 | 12605 | 8554 | 12652 |
| 8508 | 12606 | 8555 | 12653 |
| 8509 | 12607 | 8556 | 12654 |
| 8510 | 12608 | 8557 | 12655 |
| 8511 | 12609 | 8558 | 12656 |
| 8512 | 12610 | 8559 | 12657 |
| 8513 | 12611 | 8560 | 12658 |
| 8514 | 12612 | 8561 | 12659 |
| 8515 | 12613 | 8562 | 12660 |
| 8563 | 12661 | 8610 | 12708 |
| 8564 | 12662 | 8611 | 12709 |
| 8565 | 12663 | 8612 | 12710 |
| 8566 | 12664 | 8613 | 12711 |
| 8567 | 12665 | 8614 | 12712 |
| 8568 | 12666 | 8615 | 12713 |
| 8569 | 12667 | 8616 | 12714 |
| 8570 | 12668 | 8617 | 12715 |
| 8571 | 12669 | 8618 | 12716 |
| 8572 | 12670 | 8619 | 12717 |
| 8573 | 12671 | 8620 | 12718 |
| 8574 | 12672 | 8621 | 12719 |
| 8575 | 12673 | 8622 | 12720 |
| 8576 | 12674 | 8623 | 12721 |
| 8577 | 12675 | 8624 | 12722 |
| 8578 | 12676 | 8625 | 12723 |
| 8579 | 12677 | 8626 | 12724 |
| 8580 | 12678 | 8627 | 12725 |
| 8581 | 12679 | 8628 | 12726 |
| 8582 | 12680 | 8629 | 12727 |
| 8583 | 12681 | 8630 | 12728 |
| 8584 | 12682 | 8631 | 12729 |
| 8585 | 12683 | 8632 | 12730 |
| 8586 | 12684 | 8633 | 12731 |
| 8587 | 12685 | 8634 | 12732 |
| 8588 | 12686 | 8635 | 12733 |
| 8589 | 12687 | 8636 | 12734 |
| 8590 | 12688 | 8637 | 12735 |
| 8591 | 12689 | 8638 | 12736 |
| 8592 | 12690 | 8639 | 12737 |
| 8593 | 12691 | 8640 | 12738 |
| 8594 | 12692 | 8641 | 12739 |
| 8595 | 12693 | 8642 | 12740 |
| 8596 | 12694 | 8643 | 12741 |
| 8597 | 12695 | 8644 | 12742 |
| 8598 | 12696 | 8645 | 12743 |
| 8599 | 12697 | 8646 | 12744 |
| 8600 | 12698 | 8647 | 12745 |
| 8601 | 12699 | 8648 | 12746 |
| 8602 | 12700 | 8649 | 12747 |
| 8603 | 12701 | 8650 | 12748 |
| 8604 | 12702 | 8651 | 12749 |
| 8605 | 12703 | 8652 | 12750 |
| 8606 | 12704 | 8653 | 12751 |
| 8607 | 12705 | 8654 | 12752 |
| 8608 | 12706 | 8655 | 12753 |
| 8609 | 12707 | 8656 | 12754 |
| 8657 | 12755 | 8704 | 12802 |
| 8658 | 12756 | 8705 | 12803 |
| 8659 | 12757 | 8706 | 12804 |
| 8660 | 12758 | 8707 | 12805 |
| 8661 | 12759 | 8708 | 12806 |
| 8662 | 12760 | 8709 | 12807 |
| 8663 | 12761 | 8710 | 12808 |
| 8664 | 12762 | 8711 | 12809 |
| 8665 | 12763 | 8712 | 12810 |
| 8666 | 12764 | 8713 | 12811 |
| 8667 | 12765 | 8714 | 12812 |
| 8668 | 12766 | 8715 | 12813 |
| 8669 | 12767 | 8716 | 12814 |
| 8670 | 12768 | 8717 | 12815 |
| 8671 | 12769 | 8718 | 12816 |
| 8672 | 12770 | 8719 | 12817 |
| 8673 | 12771 | 8720 | 12818 |
| 8674 | 12772 | 8721 | 12819 |
| 8675 | 12773 | 8722 | 12820 |
| 8676 | 12774 | 8723 | 12821 |
| 8677 | 12775 | 8724 | 12822 |
| 8678 | 12776 | 8725 | 12823 |
| 8679 | 12777 | 8726 | 12824 |
| 8680 | 12778 | 8727 | 12825 |
| 8681 | 12779 | 8728 | 12826 |
| 8682 | 12780 | 8729 | 12827 |
| 8683 | 12781 | 8730 | 12828 |
| 8684 | 12782 | 8731 | 12829 |
| 8685 | 12783 | 8732 | 12830 |
| 8686 | 12784 | 8733 | 12831 |
| 8687 | 12785 | 8734 | 12832 |
| 8688 | 12786 | 8735 | 12833 |
| 8689 | 12787 | 8736 | 12834 |
| 8690 | 12788 | 8737 | 12835 |
| 8691 | 12789 | 8738 | 12836 |
| 8692 | 12790 | 8739 | 12837 |
| 8693 | 12791 | 8740 | 12838 |
| 8694 | 12792 | 8741 | 12839 |
| 8695 | 12793 | 8742 | 12840 |
| 8696 | 12794 | 8743 | 12841 |
| 8697 | 12795 | 8744 | 12842 |
| 8698 | 12796 | 8745 | 12843 |
| 8699 | 12797 | 8746 | 12844 |
| 8700 | 12798 | 8747 | 12845 |
| 8701 | 12799 | 8748 | 12846 |
| 8702 | 12800 | 8749 | 12847 |
| 8703 | 12801 | 8750 | 12848 |
| 8751 | 12849 | 8798 | 12896 |
| 8752 | 12850 | 8799 | 12897 |
| 8753 | 12851 | 8800 | 12898 |
| 8754 | 12852 | 8801 | 12899 |
| 8755 | 12853 | 8802 | 12900 |
| 8756 | 12854 | 8803 | 12901 |
| 8757 | 12855 | 8804 | 12902 |
| 8758 | 12856 | 8805 | 12903 |
| 8759 | 12857 | 8806 | 12904 |
| 8760 | 12858 | 8807 | 12905 |
| 8761 | 12859 | 8808 | 12906 |
| 8762 | 12860 | 8809 | 12907 |
| 8763 | 12861 | 8810 | 12908 |
| 8764 | 12862 | 8811 | 12909 |
| 8765 | 12863 | 8812 | 12910 |
| 8766 | 12864 | 8813 | 12911 |
| 8767 | 12865 | 8814 | 12912 |
| 8768 | 12866 | 8815 | 12913 |
| 8769 | 12867 | 8816 | 12914 |
| 8770 | 12868 | 8817 | 12915 |
| 8771 | 12869 | 8818 | 12916 |
| 8772 | 12870 | 8819 | 12917 |
| 8773 | 12871 | 8820 | 12918 |
| 8774 | 12872 | 8821 | 12919 |
| 8775 | 12873 | 8822 | 12920 |
| 8776 | 12874 | 8823 | 12921 |
| 8777 | 12875 | 8824 | 12922 |
| 8778 | 12876 | 8825 | 12923 |
| 8779 | 12877 | 8826 | 12924 |
| 8780 | 12878 | 8827 | 12925 |
| 8781 | 12879 | 8828 | 12926 |
| 8782 | 12880 | 8829 | 12927 |
| 8783 | 12881 | 8830 | 12928 |
| 8784 | 12882 | 8831 | 12929 |
| 8785 | 12883 | 8832 | 12930 |
| 8786 | 12884 | 8833 | 12931 |
| 8787 | 12885 | 8834 | 12932 |
| 8788 | 12886 | 8835 | 12933 |
| 8789 | 12887 | 8836 | 12934 |
| 8790 | 12888 | 8837 | 12935 |
| 8791 | 12889 | 8838 | 12936 |
| 8792 | 12890 | 8839 | 12937 |
| 8793 | 12891 | 8840 | 12938 |
| 8794 | 12892 | 8841 | 12939 |
| 8795 | 12893 | 8842 | 12940 |
| 8796 | 12894 | 8843 | 12941 |
| 8797 | 12895 | 8844 | 12942 |
| 8845 | 12943 | 8892 | 12990 |
| 8846 | 12944 | 8893 | 12991 |
| 8847 | 12945 | 8894 | 12992 |
| 8848 | 12946 | 8895 | 12993 |
| 8849 | 12947 | 8896 | 12994 |
| 8850 | 12948 | 8897 | 12995 |
| 8851 | 12949 | 8898 | 12996 |
| 8852 | 12950 | 8899 | 12997 |
| 8853 | 12951 | 8900 | 12998 |
| 8854 | 12952 | 8901 | 12999 |
| 8855 | 12953 | 8902 | 13000 |
| 8856 | 12954 | 8903 | 13001 |
| 8857 | 12955 | 8904 | 13002 |
| 8858 | 12956 | 8905 | 13003 |
| 8859 | 12957 | 8906 | 13004 |
| 8860 | 12958 | 8907 | 13005 |
| 8861 | 12959 | 8908 | 13006 |
| 8862 | 12960 | 8909 | 13007 |
| 8863 | 12961 | 8910 | 13008 |
| 8864 | 12962 | 8911 | 13009 |
| 8865 | 12963 | 8912 | 13010 |
| 8866 | 12964 | 8913 | 13011 |
| 8867 | 12965 | 8914 | 13012 |
| 8868 | 12966 | 8915 | 13013 |
| 8869 | 12967 | 8916 | 13014 |
| 8870 | 12968 | 8917 | 13015 |
| 8871 | 12969 | 8918 | 13016 |
| 8872 | 12970 | 8919 | 13017 |
| 8873 | 12971 | 8920 | 13018 |
| 8874 | 12972 | 8921 | 13019 |
| 8875 | 12973 | 8922 | 13020 |
| 8876 | 12974 | 8923 | 13021 |
| 8877 | 12975 | 8924 | 13022 |
| 8878 | 12976 | 8925 | 13023 |
| 8879 | 12977 | 8926 | 13024 |
| 8880 | 12978 | 8927 | 13025 |
| 8881 | 12979 | 8928 | 13026 |
| 8882 | 12980 | 8929 | 13027 |
| 8883 | 12981 | 8930 | 13028 |
| 8884 | 12982 | 8931 | 13029 |
| 8885 | 12983 | 8932 | 13030 |
| 8886 | 12984 | 8933 | 13031 |
| 8887 | 12985 | 8934 | 13032 |
| 8888 | 12986 | 8935 | 13033 |
| 8889 | 12987 | 8936 | 13034 |
| 8890 | 12988 | 8937 | 13035 |
| 8891 | 12989 | 8938 | 13036 |
| 8939 | 13037 | 8986 | 13084 |
| 8940 | 13038 | 8987 | 13085 |
| 8941 | 13039 | 8988 | 13086 |
| 8942 | 13040 | 8989 | 13087 |
| 8943 | 13041 | 8990 | 13088 |
| 8944 | 13042 | 8991 | 13089 |
| 8945 | 13043 | 8992 | 13090 |
| 8946 | 13044 | 8993 | 13091 |
| 8947 | 13045 | 8994 | 13092 |
| 8948 | 13046 | 8995 | 13093 |
| 8949 | 13047 | 8996 | 13094 |
| 8950 | 13048 | 8997 | 13095 |
| 8951 | 13049 | 8998 | 13096 |
| 8952 | 13050 | 8999 | 13097 |
| 8953 | 13051 | 9000 | 13098 |
| 8954 | 13052 | 9001 | 13099 |
| 8955 | 13053 | 9002 | 13100 |
| 8956 | 13054 | 9003 | 13101 |
| 8957 | 13055 | 9004 | 13102 |
| 8958 | 13056 | 9005 | 13103 |
| 8959 | 13057 | 9006 | 13104 |
| 8960 | 13058 | 9007 | 13105 |
| 8961 | 13059 | 9008 | 13106 |
| 8962 | 13060 | 9009 | 13107 |
| 8963 | 13061 | 9010 | 13108 |
| 8964 | 13062 | 9011 | 13109 |
| 8965 | 13063 | 9012 | 13110 |
| 8966 | 13064 | 9013 | 13111 |
| 8967 | 13065 | 9014 | 13112 |
| 8968 | 13066 | 9015 | 13113 |
| 8969 | 13067 | 9016 | 13114 |
| 8970 | 13068 | 9017 | 13115 |
| 8971 | 13069 | 9018 | 13116 |
| 8972 | 13070 | 9019 | 13117 |
| 8973 | 13071 | 9020 | 13118 |
| 8974 | 13072 | 9021 | 13119 |
| 8975 | 13073 | 9022 | 13120 |
| 8976 | 13074 | 9023 | 13121 |
| 8977 | 13075 | 9024 | 13122 |
| 8978 | 13076 | 9025 | 13123 |
| 8979 | 13077 | 9026 | 13124 |
| 8980 | 13078 | 9027 | 13125 |
| 8981 | 13079 | 9028 | 13126 |
| 8982 | 13080 | 9029 | 13127 |
| 8983 | 13081 | 9030 | 13128 |
| 8984 | 13082 | 9031 | 13129 |
| 8985 | 13083 | 9032 | 13130 |
| 9033 | 13131 | 9080 | 13178 |
| 9034 | 13132 | 9081 | 13179 |
| 9035 | 13133 | 9082 | 13180 |
| 9036 | 13134 | 9083 | 13181 |
| 9037 | 13135 | 9084 | 13182 |
| 9038 | 13136 | 9085 | 13183 |
| 9039 | 13137 | 9086 | 13184 |
| 9040 | 13138 | 9087 | 13185 |
| 9041 | 13139 | 9088 | 13186 |
| 9042 | 13140 | 9089 | 13187 |
| 9043 | 13141 | 9090 | 13188 |
| 9044 | 13142 | 9091 | 13189 |
| 9045 | 13143 | 9092 | 13190 |
| 9046 | 13144 | 9093 | 13191 |
| 9047 | 13145 | 9094 | 13192 |
| 9048 | 13146 | 9095 | 13193 |
| 9049 | 13147 | 9096 | 13194 |
| 9050 | 13148 | 9097 | 13195 |
| 9051 | 13149 | 9098 | 13196 |
| 9052 | 13150 | 9099 | 13197 |
| 9053 | 13151 | 9100 | 13198 |
| 9054 | 13152 | 9101 | 13199 |
| 9055 | 13153 | 9102 | 13200 |
| 9056 | 13154 | 9103 | 13201 |
| 9057 | 13155 | 9104 | 13202 |
| 9058 | 13156 | 9105 | 13203 |
| 9059 | 13157 | 9106 | 13204 |
| 9060 | 13158 | 9107 | 13205 |
| 9061 | 13159 | 9108 | 13206 |
| 9062 | 13160 | 9109 | 13207 |
| 9063 | 13161 | 9110 | 13208 |
| 9064 | 13162 | 9111 | 13209 |
| 9065 | 13163 | 9112 | 13210 |
| 9066 | 13164 | 9113 | 13211 |
| 9067 | 13165 | 9114 | 13212 |
| 9068 | 13166 | 9115 | 13213 |
| 9069 | 13167 | 9116 | 13214 |
| 9070 | 13168 | 9117 | 13215 |
| 9071 | 13169 | 9118 | 13216 |
| 9072 | 13170 | 9119 | 13217 |
| 9073 | 13171 | 9120 | 13218 |
| 9074 | 13172 | 9121 | 13219 |
| 9075 | 13173 | 9122 | 13220 |
| 9076 | 13174 | 9123 | 13221 |
| 9077 | 13175 | 9124 | 13222 |
| 9078 | 13176 | 9125 | 13223 |
| 9079 | 13177 | 9126 | 13224 |
| 9127 | 13225 | 9174 | 13272 |
| 9128 | 13226 | 9175 | 13273 |
| 9129 | 13227 | 9176 | 13274 |
| 9130 | 13228 | 9177 | 13275 |
| 9131 | 13229 | 9178 | 13276 |
| 9132 | 13230 | 9179 | 13277 |
| 9133 | 13231 | 9180 | 13278 |
| 9134 | 13232 | 9181 | 13279 |
| 9135 | 13233 | 9182 | 13280 |
| 9136 | 13234 | 9183 | 13281 |
| 9137 | 13235 | 9184 | 13282 |
| 9138 | 13236 | 9185 | 13283 |
| 9139 | 13237 | 9186 | 13284 |
| 9140 | 13238 | 9187 | 13285 |
| 9141 | 13239 | 9188 | 13286 |
| 9142 | 13240 | 9189 | 13287 |
| 9143 | 13241 | 9190 | 13288 |
| 9144 | 13242 | 9191 | 13289 |
| 9145 | 13243 | 9192 | 13290 |
| 9146 | 13244 | 9193 | 13291 |
| 9147 | 13245 | 9194 | 13292 |
| 9148 | 13246 | 9195 | 13293 |
| 9149 | 13247 | 9196 | 13294 |
| 9150 | 13248 | 9197 | 13295 |
| 9151 | 13249 | 9198 | 13296 |
| 9152 | 13250 | 9199 | 13297 |
| 9153 | 13251 | 9200 | 13298 |
| 9154 | 13252 | 9201 | 13299 |
| 9155 | 13253 | 9202 | 13300 |
| 9156 | 13254 | 9203 | 13301 |
| 9157 | 13255 | 9204 | 13302 |
| 9158 | 13256 | 9205 | 13303 |
| 9159 | 13257 | 9206 | 13304 |
| 9160 | 13258 | 9207 | 13305 |
| 9161 | 13259 | 9208 | 13306 |
| 9162 | 13260 | 9209 | 13307 |
| 9163 | 13261 | 9210 | 13308 |
| 9164 | 13262 | 9211 | 13309 |
| 9165 | 13263 | 9212 | 13310 |
| 9166 | 13264 | 9213 | 13311 |
| 9167 | 13265 | 9214 | 13312 |
| 9168 | 13266 | 9215 | 13313 |
| 9169 | 13267 | 9216 | 13314 |
| 9170 | 13268 | 9217 | 13315 |
| 9171 | 13269 | 9218 | 13316 |
| 9172 | 13270 | 9219 | 13317 |
| 9173 | 13271 | 9220 | 13318 |
| 9221 | 13319 | 9268 | 13366 |
| 9222 | 13320 | 9269 | 13367 |
| 9223 | 13321 | 9270 | 13368 |
| 9224 | 13322 | 9271 | 13369 |
| 9225 | 13323 | 9272 | 13370 |
| 9226 | 13324 | 9273 | 13371 |
| 9227 | 13325 | 9274 | 13372 |
| 9228 | 13326 | 9275 | 13373 |
| 9229 | 13327 | 9276 | 13374 |
| 9230 | 13328 | 9277 | 13375 |
| 9231 | 13329 | 9278 | 13376 |
| 9232 | 13330 | 9279 | 13377 |
| 9233 | 13331 | 9280 | 13378 |
| 9234 | 13332 | 9281 | 13379 |
| 9235 | 13333 | 9282 | 13380 |
| 9236 | 13334 | 9283 | 13381 |
| 9237 | 13335 | 9284 | 13382 |
| 9238 | 13336 | 9285 | 13383 |
| 9239 | 13337 | 9286 | 13384 |
| 9240 | 13338 | 9287 | 13385 |
| 9241 | 13339 | 9288 | 13386 |
| 9242 | 13340 | 9289 | 13387 |
| 9243 | 13341 | 9290 | 13388 |
| 9244 | 13342 | 9291 | 13389 |
| 9245 | 13343 | 9292 | 13390 |
| 9246 | 13344 | 9293 | 13391 |
| 9247 | 13345 | 9294 | 13392 |
| 9248 | 13346 | 9295 | 13393 |
| 9249 | 13347 | 9296 | 13394 |
| 9250 | 13348 | 9297 | 13395 |
| 9251 | 13349 | 9298 | 13396 |
| 9252 | 13350 | 9299 | 13397 |
| 9253 | 13351 | 9300 | 13398 |
| 9254 | 13352 | 9301 | 13399 |
| 9255 | 13353 | 9302 | 13400 |
| 9256 | 13354 | 9303 | 13401 |
| 9257 | 13355 | 9304 | 13402 |
| 9258 | 13356 | 9305 | 13403 |
| 9259 | 13357 | 9306 | 13404 |
| 9260 | 13358 | 9307 | 13405 |
| 9261 | 13359 | 9308 | 13406 |
| 9262 | 13360 | 9309 | 13407 |
| 9263 | 13361 | 9310 | 13408 |
| 9264 | 13362 | 9311 | 13409 |
| 9265 | 13363 | 9312 | 13410 |
| 9266 | 13364 | 9313 | 13411 |
| 9267 | 13365 | 9314 | 13412 |
| 9315 | 13413 | 9362 | 13460 |
| 9316 | 13414 | 9363 | 13461 |
| 9317 | 13415 | 9364 | 13462 |
| 9318 | 13416 | 9365 | 13463 |
| 9319 | 13417 | 9366 | 13464 |
| 9320 | 13418 | 9367 | 13465 |
| 9321 | 13419 | 9368 | 13466 |
| 9322 | 13420 | 9369 | 13467 |
| 9323 | 13421 | 9370 | 13468 |
| 9324 | 13422 | 9371 | 13469 |
| 9325 | 13423 | 9372 | 13470 |
| 9326 | 13424 | 9373 | 13471 |
| 9327 | 13425 | 9374 | 13472 |
| 9328 | 13426 | 9375 | 13473 |
| 9329 | 13427 | 9376 | 13474 |
| 9330 | 13428 | 9377 | 13475 |
| 9331 | 13429 | 9378 | 13476 |
| 9332 | 13430 | 9379 | 13477 |
| 9333 | 13431 | 9380 | 13478 |
| 9334 | 13432 | 9381 | 13479 |
| 9335 | 13433 | 9382 | 13480 |
| 9336 | 13434 | 9383 | 13481 |
| 9337 | 13435 | 9384 | 13482 |
| 9338 | 13436 | 9385 | 13483 |
| 9339 | 13437 | 9386 | 13484 |
| 9340 | 13438 | 9387 | 13485 |
| 9341 | 13439 | 9388 | 13486 |
| 9342 | 13440 | 9389 | 13487 |
| 9343 | 13441 | 9390 | 13488 |
| 9344 | 13442 | 9391 | 13489 |
| 9345 | 13443 | 9392 | 13490 |
| 9346 | 13444 | 9393 | 13491 |
| 9347 | 13445 | 9394 | 13492 |
| 9348 | 13446 | 9395 | 13493 |
| 9349 | 13447 | 9396 | 13494 |
| 9350 | 13448 | 9397 | 13495 |
| 9351 | 13449 | 9398 | 13496 |
| 9352 | 13450 | 9399 | 13497 |
| 9353 | 13451 | 9400 | 13498 |
| 9354 | 13452 | 9401 | 13499 |
| 9355 | 13453 | 9402 | 13500 |
| 9356 | 13454 | 9403 | 13501 |
| 9357 | 13455 | 9404 | 13502 |
| 9358 | 13456 | 9405 | 13503 |
| 9359 | 13457 | 9406 | 13504 |
| 9360 | 13458 | 9407 | 13505 |
| 9361 | 13459 | 9408 | 13506 |
| 9409 | 13507 | 9456 | 13554 |
| 9410 | 13508 | 9457 | 13555 |
| 9411 | 13509 | 9458 | 13556 |
| 9412 | 13510 | 9459 | 13557 |
| 9413 | 13511 | 9460 | 13558 |
| 9414 | 13512 | 9461 | 13559 |
| 9415 | 13513 | 9462 | 13560 |
| 9416 | 13514 | 9463 | 13561 |
| 9417 | 13515 | 9464 | 13562 |
| 9418 | 13516 | 9465 | 13563 |
| 9419 | 13517 | 9466 | 13564 |
| 9420 | 13518 | 9467 | 13565 |
| 9421 | 13519 | 9468 | 13566 |
| 9422 | 13520 | 9469 | 13567 |
| 9423 | 13521 | 9470 | 13568 |
| 9424 | 13522 | 9471 | 13569 |
| 9425 | 13523 | 9472 | 13570 |
| 9426 | 13524 | 9473 | 13571 |
| 9427 | 13525 | 9474 | 13572 |
| 9428 | 13526 | 9475 | 13573 |
| 9429 | 13527 | 9476 | 13574 |
| 9430 | 13528 | 9477 | 13575 |
| 9431 | 13529 | 9478 | 13576 |
| 9432 | 13530 | 9479 | 13577 |
| 9433 | 13531 | 9480 | 13578 |
| 9434 | 13532 | 9481 | 13579 |
| 9435 | 13533 | 9482 | 13580 |
| 9436 | 13534 | 9483 | 13581 |
| 9437 | 13535 | 9484 | 13582 |
| 9438 | 13536 | 9485 | 13583 |
| 9439 | 13537 | 9486 | 13584 |
| 9440 | 13538 | 9487 | 13585 |
| 9441 | 13539 | 9488 | 13586 |
| 9442 | 13540 | 9489 | 13587 |
| 9443 | 13541 | 9490 | 13588 |
| 9444 | 13542 | 9491 | 13589 |
| 9445 | 13543 | 9492 | 13590 |
| 9446 | 13544 | 9493 | 13591 |
| 9447 | 13545 | 9494 | 13592 |
| 9448 | 13546 | 9495 | 13593 |
| 9449 | 13547 | 9496 | 13594 |
| 9450 | 13548 | 9497 | 13595 |
| 9451 | 13549 | 9498 | 13596 |
| 9452 | 13550 | 9499 | 13597 |
| 9453 | 13551 | 9500 | 13598 |
| 9454 | 13552 | 9501 | 13599 |
| 9455 | 13553 | 9502 | 13600 |
| 9503 | 13601 | 9550 | 13648 |
| 9504 | 13602 | 9551 | 13649 |
| 9505 | 13603 | 9552 | 13650 |
| 9506 | 13604 | 9553 | 13651 |
| 9507 | 13605 | 9554 | 13652 |
| 9508 | 13606 | 9555 | 13653 |
| 9509 | 13607 | 9556 | 13654 |
| 9510 | 13608 | 9557 | 13655 |
| 9511 | 13609 | 9558 | 13656 |
| 9512 | 13610 | 9559 | 13657 |
| 9513 | 13611 | 9560 | 13658 |
| 9514 | 13612 | 9561 | 13659 |
| 9515 | 13613 | 9562 | 13660 |
| 9516 | 13614 | 9563 | 13661 |
| 9517 | 13615 | 9564 | 13662 |
| 9518 | 13616 | 9565 | 13663 |
| 9519 | 13617 | 9566 | 13664 |
| 9520 | 13618 | 9567 | 13665 |
| 9521 | 13619 | 9568 | 13666 |
| 9522 | 13620 | 9569 | 13667 |
| 9523 | 13621 | 9570 | 13668 |
| 9524 | 13622 | 9571 | 13669 |
| 9525 | 13623 | 9572 | 13670 |
| 9526 | 13624 | 9573 | 13671 |
| 9527 | 13625 | 9574 | 13672 |
| 9528 | 13626 | 9575 | 13673 |
| 9529 | 13627 | 9576 | 13674 |
| 9530 | 13628 | 9577 | 13675 |
| 9531 | 13629 | 9578 | 13676 |
| 9532 | 13630 | 9579 | 13677 |
| 9533 | 13631 | 9580 | 13678 |
| 9534 | 13632 | 9581 | 13679 |
| 9535 | 13633 | 9582 | 13680 |
| 9536 | 13634 | 9583 | 13681 |
| 9537 | 13635 | 9584 | 13682 |
| 9538 | 13636 | 9585 | 13683 |
| 9539 | 13637 | 9586 | 13684 |
| 9540 | 13638 | 9587 | 13685 |
| 9541 | 13639 | 9588 | 13686 |
| 9542 | 13640 | 9589 | 13687 |
| 9543 | 13641 | 9590 | 13688 |
| 9544 | 13642 | 9591 | 13689 |
| 9545 | 13643 | 9592 | 13690 |
| 9546 | 13644 | 9593 | 13691 |
| 9547 | 13645 | 9594 | 13692 |
| 9548 | 13646 | 9595 | 13693 |
| 9549 | 13647 | 9596 | 13694 |
| 9597 | 13695 | 9644 | 13742 |
| 9598 | 13696 | 9645 | 13743 |
| 9599 | 13697 | 9646 | 13744 |
| 9600 | 13698 | 9647 | 13745 |
| 9601 | 13699 | 9648 | 13746 |
| 9602 | 13700 | 9649 | 13747 |
| 9603 | 13701 | 9650 | 13748 |
| 9604 | 13702 | 9651 | 13749 |
| 9605 | 13703 | 9652 | 13750 |
| 9606 | 13704 | 9653 | 13751 |
| 9607 | 13705 | 9654 | 13752 |
| 9608 | 13706 | 9655 | 13753 |
| 9609 | 13707 | 9656 | 13754 |
| 9610 | 13708 | 9657 | 13755 |
| 9611 | 13709 | 9658 | 13756 |
| 9612 | 13710 | 9659 | 13757 |
| 9613 | 13711 | 9660 | 13758 |
| 9614 | 13712 | 9661 | 13759 |
| 9615 | 13713 | 9662 | 13760 |
| 9616 | 13714 | 9663 | 13761 |
| 9617 | 13715 | 9664 | 13762 |
| 9618 | 13716 | 9665 | 13763 |
| 9619 | 13717 | 9666 | 13764 |
| 9620 | 13718 | 9667 | 13765 |
| 9621 | 13719 | 9668 | 13766 |
| 9622 | 13720 | 9669 | 13767 |
| 9623 | 13721 | 9670 | 13768 |
| 9624 | 13722 | 9671 | 13769 |
| 9625 | 13723 | 9672 | 13770 |
| 9626 | 13724 | 9673 | 13771 |
| 9627 | 13725 | 9674 | 13772 |
| 9628 | 13726 | 9675 | 13773 |
| 9629 | 13727 | 9676 | 13774 |
| 9630 | 13728 | 9677 | 13775 |
| 9631 | 13729 | 9678 | 13776 |
| 9632 | 13730 | 9679 | 13777 |
| 9633 | 13731 | 9680 | 13778 |
| 9634 | 13732 | 9681 | 13779 |
| 9635 | 13733 | 9682 | 13780 |
| 9636 | 13734 | 9683 | 13781 |
| 9637 | 13735 | 9684 | 13782 |
| 9638 | 13736 | 9685 | 13783 |
| 9639 | 13737 | 9686 | 13784 |
| 9640 | 13738 | 9687 | 13785 |
| 9641 | 13739 | 9688 | 13786 |
| 9642 | 13740 | 9689 | 13787 |
| 9643 | 13741 | 9690 | 13788 |
| 9691 | 13789 | 9738 | 13836 |
| 9692 | 13790 | 9739 | 13837 |
| 9693 | 13791 | 9740 | 13838 |
| 9694 | 13792 | 9741 | 13839 |
| 9695 | 13793 | 9742 | 13840 |
| 9696 | 13794 | 9743 | 13841 |
| 9697 | 13795 | 9744 | 13842 |
| 9698 | 13796 | 9745 | 13843 |
| 9699 | 13797 | 9746 | 13844 |
| 9700 | 13798 | 9747 | 13845 |
| 9701 | 13799 | 9748 | 13846 |
| 9702 | 13800 | 9749 | 13847 |
| 9703 | 13801 | 9750 | 13848 |
| 9704 | 13802 | 9751 | 13849 |
| 9705 | 13803 | 9752 | 13850 |
| 9706 | 13804 | 9753 | 13851 |
| 9707 | 13805 | 9754 | 13852 |
| 9708 | 13806 | 9755 | 13853 |
| 9709 | 13807 | 9756 | 13854 |
| 9710 | 13808 | 9757 | 13855 |
| 9711 | 13809 | 9758 | 13856 |
| 9712 | 13810 | 9759 | 13857 |
| 9713 | 13811 | 9760 | 13858 |
| 9714 | 13812 | 9761 | 13859 |
| 9715 | 13813 | 9762 | 13860 |
| 9716 | 13814 | 9763 | 13861 |
| 9717 | 13815 | 9764 | 13862 |
| 9718 | 13816 | 9765 | 13863 |
| 9719 | 13817 | 9766 | 13864 |
| 9720 | 13818 | 9767 | 13865 |
| 9721 | 13819 | 9768 | 13866 |
| 9722 | 13820 | 9769 | 13867 |
| 9723 | 13821 | 9770 | 13868 |
| 9724 | 13822 | 9771 | 13869 |
| 9725 | 13823 | 9772 | 13870 |
| 9726 | 13824 | 9773 | 13871 |
| 9727 | 13825 | 9774 | 13872 |
| 9728 | 13826 | 9775 | 13873 |
| 9729 | 13827 | 9776 | 13874 |
| 9730 | 13828 | 9777 | 13875 |
| 9731 | 13829 | 9778 | 13876 |
| 9732 | 13830 | 9779 | 13877 |
| 9733 | 13831 | 9780 | 13878 |
| 9734 | 13832 | 9781 | 13879 |
| 9735 | 13833 | 9782 | 13880 |
| 9736 | 13834 | 9783 | 13881 |
| 9737 | 13835 | 9784 | 13882 |
| 9785 | 13883 | 9832 | 13930 |
| 9786 | 13884 | 9833 | 13931 |
| 9787 | 13885 | 9834 | 13932 |
| 9788 | 13886 | 9835 | 13933 |
| 9789 | 13887 | 9836 | 13934 |
| 9790 | 13888 | 9837 | 13935 |
| 9791 | 13889 | 9838 | 13936 |
| 9792 | 13890 | 9839 | 13937 |
| 9793 | 13891 | 9840 | 13938 |
| 9794 | 13892 | 9841 | 13939 |
| 9795 | 13893 | 9842 | 13940 |
| 9796 | 13894 | 9843 | 13941 |
| 9797 | 13895 | 9844 | 13942 |
| 9798 | 13896 | 9845 | 13943 |
| 9799 | 13897 | 9846 | 13944 |
| 9800 | 13898 | 9847 | 13945 |
| 9801 | 13899 | 9848 | 13946 |
| 9802 | 13900 | 9849 | 13947 |
| 9803 | 13901 | 9850 | 13948 |
| 9804 | 13902 | 9851 | 13949 |
| 9805 | 13903 | 9852 | 13950 |
| 9806 | 13904 | 9853 | 13951 |
| 9807 | 13905 | 9854 | 13952 |
| 9808 | 13906 | 9855 | 13953 |
| 9809 | 13907 | 9856 | 13954 |
| 9810 | 13908 | 9857 | 13955 |
| 9811 | 13909 | 9858 | 13956 |
| 9812 | 13910 | 9859 | 13957 |
| 9813 | 13911 | 9860 | 13958 |
| 9814 | 13912 | 9861 | 13959 |
| 9815 | 13913 | 9862 | 13960 |
| 9816 | 13914 | 9863 | 13961 |
| 9817 | 13915 | 9864 | 13962 |
| 9818 | 13916 | 9865 | 13963 |
| 9819 | 13917 | 9866 | 13964 |
| 9820 | 13918 | 9867 | 13965 |
| 9821 | 13919 | 9868 | 13966 |
| 9822 | 13920 | 9869 | 13967 |
| 9823 | 13921 | 9870 | 13968 |
| 9824 | 13922 | 9871 | 13969 |
| 9825 | 13923 | 9872 | 13970 |
| 9826 | 13924 | 9873 | 13971 |
| 9827 | 13925 | 9874 | 13972 |
| 9828 | 13926 | 9875 | 13973 |
| 9829 | 13927 | 9876 | 13974 |
| 9830 | 13928 | 9877 | 13975 |
| 9831 | 13929 | 9878 | 13976 |
| 9879 | 13977 | 9926 | 14024 |
| 9880 | 13978 | 9927 | 14025 |
| 9881 | 13979 | 9928 | 14026 |
| 9882 | 13980 | 9929 | 14027 |
| 9883 | 13981 | 9930 | 14028 |
| 9884 | 13982 | 9931 | 14029 |
| 9885 | 13983 | 9932 | 14030 |
| 9886 | 13984 | 9933 | 14031 |
| 9887 | 13985 | 9934 | 14032 |
| 9888 | 13986 | 9935 | 14033 |
| 9889 | 13987 | 9936 | 14034 |
| 9890 | 13988 | 9937 | 14035 |
| 9891 | 13989 | 9938 | 14036 |
| 9892 | 13990 | 9939 | 14037 |
| 9893 | 13991 | 9940 | 14038 |
| 9894 | 13992 | 9941 | 14039 |
| 9895 | 13993 | 9942 | 14040 |
| 9896 | 13994 | 9943 | 14041 |
| 9897 | 13995 | 9944 | 14042 |
| 9898 | 13996 | 9945 | 14043 |
| 9899 | 13997 | 9946 | 14044 |
| 9900 | 13998 | 9947 | 14045 |
| 9901 | 13999 | 9948 | 14046 |
| 9902 | 14000 | 9949 | 14047 |
| 9903 | 14001 | 9950 | 14048 |
| 9904 | 14002 | 9951 | 14049 |
| 9905 | 14003 | 9952 | 14050 |
| 9906 | 14004 | 9953 | 14051 |
| 9907 | 14005 | 9954 | 14052 |
| 9908 | 14006 | 9955 | 14053 |
| 9909 | 14007 | 9956 | 14054 |
| 9910 | 14008 | 9957 | 14055 |
| 9911 | 14009 | 9958 | 14056 |
| 9912 | 14010 | 9959 | 14057 |
| 9913 | 14011 | 9960 | 14058 |
| 9914 | 14012 | 9961 | 14059 |
| 9915 | 14013 | 9962 | 14060 |
| 9916 | 14014 | 9963 | 14061 |
| 9917 | 14015 | 9964 | 14062 |
| 9918 | 14016 | 9965 | 14063 |
| 9919 | 14017 | 9966 | 14064 |
| 9920 | 14018 | 9967 | 14065 |
| 9921 | 14019 | 9968 | 14066 |
| 9922 | 14020 | 9969 | 14067 |
| 9923 | 14021 | 9970 | 14068 |
| 9924 | 14022 | 9971 | 14069 |
| 9925 | 14023 | 9972 | 14070 |
| 9973 | 14071 | | |
| 9974 | 14072 | | |
| 9975 | 14073 | | |
| 9976 | 14074 | | |
| 9977 | 14075 | | |
| 9978 | 14076 | | |
| 9979 | 14077 | | |
| 9980 | 14078 | | |
| 9981 | 14079 | | |
| 9982 | 14080 | | |
| 9983 | 14081 | | |
| 9984 | 14082 | | |
| 9985 | 14083 | | |
| 9986 | 14084 | | |
| 9987 | 14085 | | |
| 9988 | 14086 | | |
| 9989 | 14087 | | |
| 9990 | 14088 | | |
| 9991 | 14089 | | |
| 9992 | 14090 | | |
| 9993 | 14091 | | |
| 9994 | 14092 | | |
| 9995 | 14093 | | |
| 9996 | 14094 | | |
| 9997 | 14095 | | |
| 9998 | 14096 | | |
| 9999 | 14097 | | |
| 10000 | 14098 | | |
| 10001 | 14099 | | |
| 10002 | 14100 | | |
| 10003 | 14101 | | |
| 10004 | 14102 | | |
| 10005 | 14103 | | |
| 10006 | 14104 | | |
| 10007 | 14105 | | |
| 10008 | 14106 | | |
| 10009 | 14107 | | |
| 10010 | 14108 | | |
| 10011 | 14109 | | |
| 10012 | 14110 | | |

[0878] TABLE IA

| SeqID | Clone name | Organism |
|---|---|---|
| 8 | E3M10000001A02 | Enterococcus faecalis |
| 9 | E3M10000001A06 | Enterococcus faecalis |
| 10 | E3M10000001B01 | Enterococcus faecalis |
| 11 | E3M10000001B02 | Enterococcus faecalis |
| 12 | E3M10000001B05 | Enterococcus faecalis |
| 13 | E3M10000001B06 | Enterococcus faecalis |
| 14 | E3M10000001B08 | Enterococcus faecalis |
| 15 | E3M10000001B10 | Enterococcus faecalis |
| 16 | E3M10000001C02 | Enterococcus faecalis |
| 17 | E3M10000001C09 | Enterococcus faecalis |
| 18 | E3M10000001D02 | Enterococcus faecalis |
| 19 | E3M10000001D04 | Enterococcus faecalis |
| 20 | E3M10000001D05 | Enterococcus faecalis |
| 21 | E3M10000001D09 | Enterococcus faecalis |
| 22 | E3M10000001E01 | Enterococcus faecalis |
| 23 | E3M10000001E02 | Enterococcus faecalis |
| 24 | E3M10000001E03 | Enterococcus faecalis |
| 25 | E3M10000001E04 | Enterococcus faecalis |
| 26 | E3M10000001E08 | Enterococcus faecalis |
| 27 | E3M10000001E09 | Enterococcus faecalis |
| 28 | E3M10000001F02 | Enterococcus faecalis |
| 29 | E3M10000001F04 | Enterococcus faecalis |
| 30 | E3M10000001F06 | Enterococcus faecalis |
| 31 | E3M10000001F07 | Enterococcus faecalis |
| 32 | E3M10000001G02 | Enterococcus faecalis |
| 33 | E3M10000001G03 | Enterococcus faecalis |
| 34 | E3M10000001G04 | Enterococcus faecalis |
| 35 | E3M10000001G05 | Enterococcus faecalis |
| 36 | E3M10000001H02 | Enterococcus faecalis |
| 37 | E3M10000001H03 | Enterococcus faecalis |
| 38 | E3M10000001H04 | Enterococcus faecalis |
| 39 | E3M10000004A04 | Enterococcus faecalis |
| 40 | E3M10000004C03 | Enterococcus faecalis |
| 41 | E3M10000004D01 | Enterococcus faecalis |
| 42 | E3M10000004D02 | Enterococcus faecalis |
| 43 | E3M10000004D10 | Enterococcus faecalis |
| 44 | E3M10000004E11 | Enterococcus faecalis |
| 45 | E3M10000004F08 | Enterococcus faecalis |
| 46 | E3M10000004F10 | Enterococcus faecalis |
| 47 | E3M10000004G01 | Enterococcus faecalis |
| 48 | E3M10000004H11 | Enterococcus faecalis |
| 49 | E3M10000005A07 | Enterococcus faecalis |
| 50 | E3M10000005B01 | Enterococcus faecalis |
| 51 | E3M10000005B08 | Enterococcus faecalis |
| 52 | E3M10000005C01 | Enterococcus faecalis |
| 53 | E3M10000005C03 | Enterococcus faecalis |
| 54 | E3M10000005C04 | Enterococcus faecalis |
| 55 | E3M10000005D03 | Enterococcus faecalis |
| 56 | E3M10000005D04 | Enterococcus faecalis |
| 57 | E3M10000005D10 | Enterococcus faecalis |
| 58 | E3M10000005E01 | Enterococcus faecalis |
| 59 | E3M10000005E02 | Enterococcus faecalis |
| 60 | E3M10000005E03 | Enterococcus faecalis |
| 61 | E3M10000005E08 | Enterococcus faecalis |
| 62 | E3M10000005F07 | Enterococcus faecalis |
| 63 | E3M10000005F10 | Enterococcus faecalis |
| 64 | E3M10000005G05 | Enterococcus faecalis |
| 65 | E3M10000005H04 | Enterococcus faecalis |
| 66 | E3M10000006B03 | Enterococcus faecalis |
| 67 | E3M10000006C01 | Enterococcus faecalis |
| 68 | E3M10000006C12 | Enterococcus faecalis |
| 69 | E3M10000006D03 | Enterococcus faecalis |
| 70 | E3M10000006E11 | Enterococcus faecalis |
| 71 | E3M10000006F04 | Enterococcus faecalis |
| 72 | E3M10000006G04 | Enterococcus faecalis |
| 73 | E3M10000006G12 | Enterococcus faecalis |
| 74 | E3M10000006H09 | Enterococcus faecalis |
| 75 | E3M10000007A02 | Enterococcus faecalis |
| 76 | E3M10000007B02 | Enterococcus faecalis |
| 77 | E3M10000007B03 | Enterococcus faecalis |
| 78 | E3M10000007C03 | Enterococcus faecalis |
| 79 | E3M10000007C04 | Enterococcus faecalis |
| 80 | E3M10000007D03 | Enterococcus faecalis |
| 81 | E3M10000007E05 | Enterococcus faecalis |
| 82 | E3M10000007F01 | Enterococcus faecalis |
| 83 | E3M10000007F06 | Enterococcus faecalis |
| 84 | E3M10000007G01 | Enterococcus faecalis |
| 85 | E3M10000008C03 | Enterococcus faecalis |
| 86 | E3M10000008C08 | Enterococcus faecalis |
| 87 | E3M10000008C09 | Enterococcus faecalis |
| 88 | E3M10000008D08 | Enterococcus faecalis |
| 89 | E3M10000008E02 | Enterococcus faecalis |
| 90 | E3M10000008G05 | Enterococcus faecalis |
| 91 | E3M10000008G09 | Enterococcus faecalis |
| 92 | E3M10000008H02 | Enterococcus faecalis |
| 93 | E3M10000009C07 | Enterococcus faecalis |
| 94 | E3M10000009C09 | Enterococcus faecalis |
| 95 | E3M10000009D01 | Enterococcus faecalis |
| 96 | E3M10000009E02 | Enterococcus faecalis |
| 97 | E3M10000009E03 | Enterococcus faecalis |
| 98 | E3M10000009E05 | Enterococcus faecalis |
| 99 | E3M10000009G02 | Enterococcus faecalis |
| 100 | E3M10000010C08 | Enterococcus faecalis |
| 101 | E3M10000010D05 | Enterococcus faecalis |
| 102 | E3M10000010F01 | Enterococcus faecalis |
| 103 | E3M10000010G05 | Enterococcus faecalis |
| 104 | E3M10000010G07 | Enterococcus faecalis |
| 105 | E3M10000010G09 | Enterococcus faecalis |
| 106 | E3M10000010G10 | Enterococcus faecalis |
| 107 | E3M10000010H02 | Enterococcus faecalis |
| 108 | E3M10000011A09 | Enterococcus faecalis |
| 109 | E3M10000011B03 | Enterococcus faecalis |
| 110 | E3M10000011B09 | Enterococcus faecalis |
| 111 | E3M10000011C07 | Enterococcus faecalis |
| 112 | E3M10000011D03 | Enterococcus faecalis |
| 113 | E3M10000011H02 | Enterococcus faecalis |
| 114 | E3M10000011H05 | Enterococcus faecalis |
| 115 | E3M10000012B01 | Enterococcus faecalis |
| 116 | E3M10000012B02 | Enterococcus faecalis |
| 117 | E3M10000012B07 | Enterococcus faecalis |
| 118 | E3M10000012B08 | Enterococcus faecalis |
| 119 | E3M10000012C01 | Enterococcus faecalis |
| 120 | E3M10000012D10 | Enterococcus faecalis |
| 121 | E3M10000012E08 | Enterococcus faecalis |
| 122 | E3M10000012F05 | Enterococcus faecalis |
| 123 | E3M10000012F06 | Enterococcus faecalis |
| 124 | E3M10000012F07 | Enterococcus faecalis |
| 125 | E3M10000012F10 | Enterococcus faecalis |
| 126 | E3M10000012G02 | Enterococcus faecalis |
| 127 | E3M10000012G07 | Enterococcus faecalis |
| 128 | E3M10000013A06 | Enterococcus faecalis |
| 129 | E3M10000013A07 | Enterococcus faecalis |
| 130 | E3M10000013C05 | Enterococcus faecalis |
| 131 | E3M10000013D02 | Enterococcus faecalis |
| 132 | E3M10000013D08 | Enterococcus faecalis |
| 133 | E3M10000013D10 | Enterococcus faecalis |
| 134 | E3M10000013E02 | Enterococcus faecalis |
| 135 | E3M10000013E08 | Enterococcus faecalis |
| 136 | E3M10000013F05 | Enterococcus faecalis |
| 137 | E3M10000013F12 | Enterococcus faecalis |
| 138 | E3M10000013G10 | Enterococcus faecalis |
| 139 | E3M10000013H03 | Enterococcus faecalis |
| 140 | E3M10000013H05 | Enterococcus faecalis |
| 141 | E3M10000013H10 | Enterococcus faecalis |
| 142 | E3M10000014B12 | Enterococcus faecalis |
| 143 | E3M10000014E12 | Enterococcus faecalis |
| 144 | E3M10000014G09 | Enterococcus faecalis |
| 145 | E3M10000015B04 | Enterococcus faecalis |
| 146 | E3M10000015B12 | Enterococcus faecalis |
| 147 | E3M10000015E12 | Enterococcus faecalis |
| 148 | E3M10000016A03 | Enterococcus faecalis |
| 149 | E3M10000016A04 | Enterococcus faecalis |
| 150 | E3M10000016C11 | Enterococcus faecalis |
| 151 | E3M10000016D03 | Enterococcus faecalis |
| 152 | E3M10000016F06 | Enterococcus faecalis |
| 153 | E3M10000016F10 | Enterococcus faecalis |
| 154 | E3M10000016H05 | Enterococcus faecalis |
| 155 | E3M10000016H10 | Enterococcus faecalis |
| 156 | E3M10000017A09 | Enterococcus faecalis |
| 157 | E3M10000017D09 | Enterococcus faecalis |
| 158 | E3M10000018A07 | Enterococcus faecalis |
| 159 | E3M10000018C02 | Enterococcus faecalis |
| 160 | E3M10000018E01 | Enterococcus faecalis |
| 161 | E3M10000018G09 | Enterococcus faecalis |
| 162 | E3M10000018H06 | Enterococcus faecalis |
| 163 | E3M10000019B06 | Enterococcus faecalis |
| 164 | E3M10000019D02 | Enterococcus faecalis |
| 165 | E3M10000019E03 | Enterococcus faecalis |
| 166 | E3M10000019E04 | Enterococcus faecalis |
| 167 | E3M10000020G04 | Enterococcus faecalis |
| 168 | E3M10000020H05 | Enterococcus faecalis |
| 169 | E3M10000021A08 | Enterococcus faecalis |
| 170 | E3M10000021A11 | Enterococcus faecalis |
| 171 | E3M10000021B10 | Enterococcus faecalis |
| 172 | E3M10000021C03 | Enterococcus faecalis |
| 173 | E3M10000021C04 | Enterococcus faecalis |
| 174 | E3M10000021C08 | Enterococcus faecalis |
| 175 | E3M10000021D04 | Enterococcus faecalis |
| 176 | E3M10000021E10 | Enterococcus faecalis |
| 177 | E3M10000021G04 | Enterococcus faecalis |
| 178 | E3M10000021G10 | Enterococcus faecalis |
| 179 | E3M10000021G11 | Enterococcus faecalis |
| 180 | E3M10000021H11 | Enterococcus faecalis |
| 181 | E3M10000022A04 | Enterococcus faecalis |
| 182 | E3M10000022A11 | Enterococcus faecalis |
| 183 | E3M10000022B04 | Enterococcus faecalis |
| 184 | E3M10000022B05 | Enterococcus faecalis |
| 185 | E3M10000022B07 | Enterococcus faecalis |
| 186 | E3M10000022C05 | Enterococcus faecalis |
| 187 | E3M10000022C06 | Enterococcus faecalis |
| 188 | E3M10000022C09 | Enterococcus faecalis |
| 189 | E3M10000022D04 | Enterococcus faecalis |
| 190 | E3M10000022F05 | Enterococcus faecalis |
| 191 | E3M10000022F06 | Enterococcus faecalis |
| 192 | E3M10000022F08 | Enterococcus faecalis |
| 193 | E3M10000022G02 | Enterococcus faecalis |
| 194 | E3M10000022G12 | Enterococcus faecalis |
| 195 | E3M10000023A03 | Enterococcus faecalis |
| 196 | E3M10000023A06 | Enterococcus faecalis |
| 197 | E3M10000023A07 | Enterococcus faecalis |
| 198 | E3M10000023A09 | Enterococcus faecalis |
| 199 | E3M10000023B02 | Enterococcus faecalis |
| 200 | E3M10000023B06 | Enterococcus faecalis |
| 201 | E3M10000023C03 | Enterococcus faecalis |
| 202 | E3M10000023C04 | Enterococcus faecalis |
| 203 | E3M10000023C06 | Enterococcus faecalis |
| 204 | E3M10000023C08 | Enterococcus faecalis |
| 205 | E3M10000023C09 | Enterococcus faecalis |
| 206 | E3M10000023D02 | Enterococcus faecalis |
| 207 | E3M10000023D04 | Enterococcus faecalis |
| 208 | E3M10000023D10 | Enterococcus faecalis |
| 209 | E3M10000023E04 | Enterococcus faecalis |
| 210 | E3M10000023E07 | Enterococcus faecalis |
| 211 | E3M10000023E09 | Enterococcus faecalis |
| 212 | E3M10000023F02 | Enterococcus faecalis |
| 213 | E3M10000023F10 | Enterococcus faecalis |
| 214 | E3M10000023G02 | Enterococcus faecalis |
| 215 | E3M10000023G04 | Enterococcus faecalis |
| 216 | E3M10000023G10 | Enterococcus faecalis |
| 217 | E3M10000023H08 | Enterococcus faecalis |
| 218 | E3M10000024A03 | Enterococcus faecalis |
| 219 | E3M10000024A04 | Enterococcus faecalis |
| 220 | E3M10000024A08 | Enterococcus faecalis |
| 221 | E3M10000024C06 | Enterococcus faecalis |
| 222 | E3M10000025A06 | Enterococcus faecalis |
| 223 | E3M10000025B01 | Enterococcus faecalis |
| 224 | E3M10000025B03 | Enterococcus faecalis |
| 225 | E3M10000025B05 | Enterococcus faecalis |
| 226 | E3M10000025B10 | Enterococcus faecalis |
| 227 | E3M10000025C01 | Enterococcus faecalis |
| 228 | E3M10000025C04 | Enterococcus faecalis |
| 229 | E3M10000025C05 | Enterococcus faecalis |
| 230 | E3M10000025C07 | Enterococcus faecalis |
| 231 | E3M10000025C08 | Enterococcus faecalis |
| 232 | E3M10000025C09 | Enterococcus faecalis |
| 233 | E3M10000025C11 | Enterococcus faecalis |
| 234 | E3M10000025D0I | Enterococcus faecalis |
| 235 | E3M10000025D10 | Enterococcus faecalis |
| 236 | E3M10000025E07 | Enterococcus faecalis |
| 237 | E3M10000025E08 | Enterococcus faecalis |
| 238 | E3M10000025E12 | Enterococcus faecalis |
| 239 | E3M10000025F04 | Enterococcus faecalis |
| 240 | E3M10000025F06 | Enterococcus faecalis |
| 241 | E3M10000025F08 | Enterococcus faecalis |
| 242 | E3M10000025F09 | Enterococcus faecalis |
| 243 | E3M10000025F10 | Enterococcus faecalis |
| 244 | E3M10000025F11 | Enterococcus faecalis |
| 245 | E3M10000025F12 | Enterococcus faecalis |
| 246 | E3M10000025G02 | Enterococcus faecalis |
| 247 | E3M10000025G07 | Enterococcus faecalis |
| 248 | E3M10000025G09 | Enterococcus faecalis |
| 249 | E3M10000027A02 | Enterococcus faecalis |
| 250 | F3M10000027A07 | Enterococcus faecalis |
| 251 | E3M10000027A09 | Enterococcus faecalis |
| 252 | E3M10000027B07 | Enterococcus faecalis |
| 253 | E3M10000027B08 | Enterococcus faecalis |
| 254 | E3M10000027B09 | Enterococcus faecalis |
| 255 | E3M10000027C02 | Enterococcus faecalis |
| 256 | E3M10000027C03 | Enterococcus faecalis |
| 257 | E3M10000027C08 | Enterococcus faecalis |
| 258 | E3M10000027D03 | Enterococcus faecalis |
| 259 | E3M10000027D05 | Enterococcus faecalis |
| 260 | E3M10000027D08 | Enterococcus faecalis |
| 261 | E3M10000027D10 | Enterococcus faecalis |
| 262 | E3M10000027G01 | Enterococcus faecalis |
| 263 | E3M10000027G08 | Enterococcus faecalis |
| 264 | E3M10000027H04 | Enterococcus faecalis |
| 265 | E3M10000027H07 | Enterococcus faecalis |
| 266 | E3M10000028A02 | Enterococcus faecalis |
| 267 | E3M10000028A03 | Enterococcus faecalis |
| 268 | E3M10000028A04 | Enterococcus faecalis |
| 269 | E3M10000028A05 | Enterococcus faecalis |
| 270 | E3M10000028A06 | Enterococcus faecalis |
| 271 | E3M10000028A08 | Enterococcus faecalis |
| 272 | E3M10000028B01 | Enterococcus faecalis |
| 273 | E3M10000028B02 | Enterococcus faecalis |
| 274 | E3M10000028B03 | Enterococcus faecalis |
| 275 | E3M10000028B04 | Enterococcus faecalis |
| 276 | E3M10000028B05 | Enterococcus faecalis |
| 277 | E3M10000028B06 | Enterococcus faecalis |
| 278 | E3M10000028B07 | Enterococcus faecalis |
| 279 | E3M10000028B08 | Enterococcus faecalis |
| 280 | E3M10000028C01 | Enterococcus faecalis |
| 281 | E3M10000028C02 | Enterococcus faecalis |
| 282 | E3M10000028C04 | Enterococcus faecalis |
| 283 | E3M10000028C05 | Enterococcus faecalis |
| 284 | E3M10000028C06 | Enterococcus faecalis |
| 285 | E3M10000028C07 | Enterococcus faecalis |
| 286 | E3M10000028C08 | Enterococcus faecalis |
| 287 | E3M10000028D01 | Enterococcus faecalis |
| 288 | E3M10000028D02 | Enterococcus faecalis |
| 289 | E3M10000028D05 | Enterococcus faecalis |
| 290 | E3M10000028D06 | Enterococcus faecalis |
| 291 | E3M10000028D08 | Enterococcus faecalis |
| 292 | E3M10000028E01 | Enterococcus faecalis |
| 293 | E3M10000028E04 | Enterococcus faecalis |
| 294 | E3M10000028E07 | Enterococcus faecalis |
| 295 | E3M10000028F02 | Enterococcus faecalis |
| 296 | E3M10000028F03 | Enterococcus faecalis |
| 297 | E3M10000028F04 | Enterococcus faecalis |
| 298 | E3M10000028F05 | Enterococcus faecalis |
| 299 | E3M10000028F06 | Enterococcus faecalis |
| 300 | E3M10000028F07 | Enterococcus faecalis |
| 301 | E3M10000028G05 | Enterococcus faecalis |
| 302 | E3M10000028G06 | Enterococcus faecalis |
| 303 | E3M10000028G07 | Enterococcus faecalis |
| 304 | E3M10000028H04 | Enterococcus faecalis |
| 305 | E3M10000028H07 | Enterococcus faecalis |
| 306 | E3M10000029A02 | Enterococcus faecalis |
| 307 | E3M10000029A04 | Enterococcus faecalis |
| 308 | E3M10000029A05 | Enterococcus faecalis |
| 309 | E3M10000029A10 | Enterococcus faecalis |
| 310 | E3M10000029A11 | Enterococcus faecalis |
| 311 | E3M10000029B01 | Enterococcus faecalis |
| 312 | E3M10000029B02 | Enterococcus faecalis |
| 313 | E3M10000029B05 | Enterococcus faecalis |
| 314 | E3M10000029B06 | Enterococcus faecalis |
| 315 | E3M10000029B08 | Enterococcus faecalis |
| 316 | E3M10000029B11 | Enterococcus faecalis |
| 317 | E3M10000029B12 | Enterococcus faecalis |
| 318 | E3M10000029C01 | Enterococcus faecalis |
| 319 | E3M10000029C02 | Enterococcus faecalis |
| 320 | E3M10000029C03 | Enterococcus faecalis |
| 321 | E3M10000029C04 | Enterococcus faecalis |
| 322 | E3M10000029C05 | Enterococcus faecalis |
| 323 | E3M10000029C06 | Enterococcus faecalis |
| 324 | E3M10000029C07 | Enterococcus faecalis |
| 325 | E3M10000029C08 | Enterococcus faecalis |
| 326 | E3M10000029C09 | Enterococcus faecalis |
| 327 | E3M10000029C10 | Enterococcus faecalis |
| 328 | E3M10000029C12 | Enterococcus faecalis |
| 329 | E3M10000029D01 | Enterococcus faecalis |
| 330 | E3M10000029D03 | Enterococcus faecalis |
| 331 | E3M10000029D04 | Enterococcus faecalis |
| 332 | E3M10000029D05 | Enterococcus faecalis |
| 333 | E3M10000029D06 | Enterococcus faecalis |
| 334 | E3M10000029D08 | Enterococcus faecalis |
| 335 | E3M10000029D12 | Enterococcus faecalis |
| 336 | E3M10000029E01 | Enterococcus faecalis |
| 337 | E3M10000029E02 | Enterococcus faecalis |
| 338 | E3M10000029E03 | Enterococcus faecalis |
| 339 | E3M10000029E05 | Enterococcus faecalis |
| 340 | E3M10000029E07 | Enterococcus faecalis |
| 341 | E3M10000029E08 | Enterococcus faecalis |
| 342 | E3M10000029E09 | Enterococcus faecalis |
| 343 | E3M10000029E12 | Enterococcus faecalis |
| 344 | E3M10000029F01 | Enterococcus faecalis |
| 345 | E3M10000029F05 | Enterococcus faecalis |
| 346 | E3M10000029F06 | Enterococcus faecalis |
| 347 | E3M10000029F09 | Enterococcus faecalis |
| 348 | E3M10000029F10 | Enterococcus faecalis |
| 349 | E3M10000029F11 | Enterococcus faecalis |
| 350 | E3M10000029F12 | Enterococcus faecalis |
| 351 | E3M10000029G01 | Enterococcus faecalis |
| 352 | E3M10000029G04 | Enterococcus faecalis |
| 353 | E3M10000029G05 | Enterococcus faecalis |
| 354 | E3M10000029G07 | Enterococcus faecalis |
| 355 | E3M10000029G08 | Enterococcus faecalis |
| 356 | E3M10000029G09 | Enterococcus faecalis |
| 357 | E3M10000029G10 | Enterococcus faecalis |
| 358 | E3M10000029G11 | Enterococcus faecalis |
| 359 | E3M10000029G12 | Enterococcus faecalis |
| 360 | E3M10000029H02 | Enterococcus faecalis |
| 361 | E3M10000029H04 | Enterococcus faecalis |
| 362 | E3M10000029H05 | Enterococcus faecalis |
| 363 | E3M10000029H07 | Enterococcus faecalis |
| 364 | E3M10000029H08 | Enterococcus faecalis |
| 365 | E3M10000029H11 | Enterococcus faecalis |
| 366 | E3M10000030A05 | Enterococcus faecalis |
| 367 | E3M10000030A08 | Enterococcus faecalis |
| 368 | E3M10000030A09 | Enterococcus faecalis |
| 369 | E3M10000030A11 | Enterococcus faecalis |
| 370 | E3M10000030B03 | Enterococcus faecalis |
| 371 | E3M10000030B04 | Enterococcus faecalis |
| 372 | E3M10000030B05 | Enterococcus faecalis |
| 373 | E3M10000030B06 | Enterococcus faecalis |
| 374 | E3M10000030B07 | Enterococcus faecalis |
| 375 | E3M10000030B08 | Enterococcus faecalis |
| 376 | E3M10000030B10 | Enterococcus faecalis |
| 377 | E3M10000030B11 | Enterococcus faecalis |
| 378 | E3M10000030B12 | Enterococcus faecalis |
| 379 | E3M10000030C03 | Enterococcus faecalis |
| 380 | E3M10000030C04 | Enterococcus faecalis |
| 381 | E3M10000030C12 | Enterococcus faecalis |
| 382 | E3M10000030D02 | Enterococcus faecalis |
| 383 | E3M10000030D05 | Enterococcus faecalis |
| 384 | E3M10000030D08 | Enterococcus faecalis |
| 385 | E3M10000030D09 | Enterococcus faecalis |
| 386 | E3M10000030D10 | Enterococcus faecalis |
| 387 | E3M10000030D12 | Enterococcus faecalis |
| 388 | E3M10000030E01 | Enterococcus faecalis |
| 389 | E3M10000030E02 | Enterococcus faecalis |
| 390 | E3M10000030E04 | Enterococcus faecalis |
| 391 | E3M10000030E08 | Enterococcus faecalis |
| 392 | E3M10000030E09 | Enterococcus faecalis |
| 393 | E3M10000030E10 | Enterococcus faecalis |
| 394 | E3M10000030F01 | Enterococcus faecalis |
| 395 | E3M10000030F04 | Enterococcus faecalis |
| 396 | E3M10000030F06 | Enterococcus faecalis |
| 397 | E3M10000030F07 | Enterococcus faecalis |
| 398 | E3M10000030F10 | Enterococcus faecalis |
| 399 | E3M10000030F12 | Enterococcus faecalis |
| 400 | E3M10000030G01 | Enterococcus faecalis |
| 401 | E3M10000030G03 | Enterococcus faecalis |
| 402 | E3M10000030G06 | Enterococcus faecalis |
| 403 | E3M10000030G08 | Enterococcus faecalis |
| 404 | E3M10000030G09 | Enterococcus faecalis |
| 405 | E3M10000030G12 | Enterococcus faecalis |
| 406 | E3M10000030H03 | Enterococcus faecalis |
| 407 | E3M10000030H04 | Enterococcus faecalis |
| 408 | E3M10000030H06 | Enterococcus faecalis |
| 409 | E3M10000030H07 | Enterococcus faecalis |
| 410 | E3M10000030H08 | Enterococcus faecalis |
| 411 | E3M10000030H10 | Enterococcus faecalis |
| 412 | E3M10000030H11 | Enterococcus faecalis |
| 413 | E3M10000031A02 | Enterococcus faecalis |
| 414 | E3M10000031A06 | Enterococcus faecalis |
| 415 | E3M10000031A07 | Enterococcus faecalis |
| 416 | E3M10000031A08 | Enterococcus faecalis |
| 417 | E3M10000031B02 | Enterococcus faecalis |
| 418 | E3M10000031B03 | Enterococcus faecalis |
| 419 | E3M10000031B04 | Enterococcus faecalis |
| 420 | E3M10000031B09 | Enterococcus faecalis |
| 421 | E3M10000031B10 | Enterococcus faecalis |
| 422 | E3M10000031B11 | Enterococcus faecalis |
| 423 | E3M10000031B12 | Enterococcus faecalis |
| 424 | E3M10000031C01 | Enterococcus faecalis |
| 425 | E3M10000031C04 | Enterococcus faecalis |
| 426 | E3M10000031C06 | Enterococcus faecalis |
| 427 | E3M10000031C10 | Enterococcus faecalis |
| 428 | E3M10000031C11 | Enterococcus faecalis |
| 429 | E3M10000031C12 | Enterococcus faecalis |
| 430 | E3M10000031D03 | Enterococcus faecalis |
| 431 | E3M10000031D04 | Enterococcus faecalis |
| 432 | E3M10000031D08 | Enterococcus faecalis |
| 433 | E3M10000031E03 | Enterococcus faecalis |
| 434 | E3M10000031E09 | Enterococcus faecalis |
| 435 | E3M10000031F02 | Enterococcus faecalis |
| 436 | E3M10000031F04 | Enterococcus faecalis |
| 437 | E3M10000031F07 | Enterococcus faecalis |
| 438 | E3M10000031F09 | Enterococcus faecalis |
| 439 | E3M10000031F11 | Enterococcus faecalis |
| 440 | E3M10000031G03 | Enterococcus faecalis |
| 441 | E3M10000031G04 | Enterococcus faecalis |
| 442 | E3M10000031G05 | Enterococcus faecalis |
| 443 | E3M10000031G06 | Enterococcus faecalis |
| 444 | E3M10000031G07 | Enterococcus faecalis |
| 445 | E3M10000031G08 | Enterococcus faecalis |
| 446 | E3M10000031G11 | Enterococcus faecalis |
| 447 | E3M10000031H05 | Enterococcus faecalis |
| 448 | E3M10000031H06 | Enterococcus faecalis |
| 449 | E3M10000031H07 | Enterococcus faecalis |
| 450 | E3M10000031H08 | Enterococcus faecalis |
| 451 | E3M10000031H10 | Enterococcus faecalis |
| 452 | E3M10000031H11 | Enterococcus faecalis |
| 453 | E3M10000032A02 | Enterococcus faecalis |
| 454 | E3M10000032A04 | Enterococcus faecalis |
| 455 | E3M10000032A06 | Enterococcus faecalis |
| 456 | E3M10000032A07 | Enterococcus faecalis |
| 457 | E3M10000032A08 | Enterococcus faecalis |
| 458 | E3M10000032A09 | Enterococcus faecalis |
| 459 | E3M10000032A10 | Enterococcus faecalis |
| 460 | E3M10000032A11 | Enterococcus faecalis |
| 461 | E3M10000032B03 | Enterococcus faecalis |
| 462 | E3M10000032B04 | Enterococcus faecalis |
| 463 | E3M10000032B07 | Enterococcus faecalis |
| 464 | E3M10000032B08 | Enterococcus faecalis |
| 465 | E3M10000032B09 | Enterococcus faecalis |
| 466 | E3M10000032B11 | Enterococcus faecalis |
| 467 | E3M10000032B12 | Enterococcus faecalis |
| 468 | E3M10000032C01 | Enterococcus faecalis |
| 469 | E3M10000032C02 | Enterococcus faecalis |
| 470 | E3M10000032C03 | Enterococcus faecalis |
| 471 | E3M10000032C04 | Enterococcus faecalis |
| 472 | E3M10000032C06 | Enterococcus faecalis |
| 473 | E3M10000032C09 | Enterococcus faecalis |
| 474 | E3M10000032C11 | Enterococcus faecalis |
| 475 | E3M10000032C12 | Enterococcus faecalis |
| 476 | E3M10000032D01 | Enterococcus faecalis |
| 477 | E3M10000032D02 | Enterococcus faecalis |
| 478 | E3M10000032D03 | Enterococcus faecalis |
| 479 | E3M10000032D06 | Enterococcus faecalis |
| 480 | E3M10000032D09 | Enterococcus faecalis |
| 481 | E3M10000032D12 | Enterococcus faecalis |
| 482 | E3M10000032E04 | Enterococcus faecalis |
| 483 | E3M10000032E05 | Enterococcus faecalis |
| 484 | E3M10000032E08 | Enterococcus faecalis |
| 485 | E3M10000032E10 | Enterococcus faecalis |
| 486 | E3M10000032E11 | Enterococcus faecalis |
| 487 | E3M10000032E12 | Enterococcus faecalis |
| 488 | E3M10000032F02 | Enterococcus faecalis |
| 489 | E3M10000032F03 | Enterococcus faecalis |
| 490 | E3M10000032F05 | Enterococcus faecalis |
| 491 | E3M10000032F07 | Enterococcus faecalis |
| 492 | E3M10000032F08 | Enterococcus faecalis |
| 493 | E3M10000032F11 | Enterococcus faecalis |
| 494 | E3M10000032F12 | Enterococcus faecalis |
| 495 | E3M10000032G01 | Enterococcus faecalis |
| 496 | E3M10000032G02 | Enterococcus faecalis |
| 497 | E3M10000032G04 | Enterococcus faecalis |
| 498 | E3M10000032G05 | Enterococcus faecalis |
| 499 | E3M10000032G06 | Enterococcus faecalis |
| 500 | E3M10000032G07 | Enterococcus faecalis |
| 501 | E3M10000032H05 | Enterococcus faecalis |
| 502 | E3M10000032H06 | Enterococcus faecalis |
| 503 | E3M10000032H08 | Enterococcus faecalis |
| 504 | E3M10000032H09 | Enterococcus faecalis |
| 505 | E3M10000032H10 | Enterococcus faecalis |
| 506 | E3M10000033A03 | Enterococcus faecalis |
| 507 | E3M10000033A04 | Enterococcus faecalis |
| 508 | E3M10000033A05 | Enterococcus faecalis |
| 509 | E3M10000033A06 | Enterococcus faecalis |
| 510 | E3M10000033A07 | Enterococcus faecalis |
| 511 | E3M10000033A08 | Enterococcus faecalis |
| 512 | E3M10000033A11 | Enterococcus faecalis |
| 513 | E3M10000033B01 | Enterococcus faecalis |
| 514 | E3M10000033B02 | Enterococcus faecalis |
| 515 | E3M10000033B04 | Enterococcus faecalis |
| 516 | E3M10000033B05 | Enterococcus faecalis |
| 517 | E3M10000033B06 | Enterococcus faecalis |
| 518 | E3M10000033B08 | Enterococcus faecalis |
| 519 | E3M10000033B09 | Enterococcus faecalis |
| 520 | E3M10000033C01 | Enterococcus faecalis |
| 521 | E3M10000033C02 | Enterococcus faecalis |
| 522 | E3M10000033C05 | Enterococcus faecalis |
| 523 | E3M10000033C09 | Enterococcus faecalis |
| 524 | E3M10000033C10 | Enterococcus faecalis |
| 525 | E3M10000033C11 | Enterococcus faecalis |
| 526 | E3M10000033C12 | Enterococcus faecalis |
| 527 | E3M10000033D01 | Enterococcus faecalis |
| 528 | E3M10000033D04 | Enterococcus faecalis |
| 529 | E3M10000033D05 | Enterococcus faecalis |
| 530 | E3M10000033D06 | Enterococcus faecalis |
| 531 | E3M10000033D09 | Enterococcus faecalis |
| 532 | E3M10000033D10 | Enterococcus faecalis |
| 533 | E3M10000033D11 | Enterococcus faecalis |
| 534 | E3M10000033E02 | Enterococcus faecalis |
| 535 | E3M10000033E03 | Enterococcus faecalis |
| 536 | E3M10000033E04 | Enterococcus faecalis |
| 537 | E3M10000033E05 | Enterococcus faecalis |
| 538 | E3M10000033E07 | Enterococcus faecalis |
| 539 | E3M10000033E08 | Enterococcus faecalis |
| 540 | E3M10000033E09 | Enterococcus faecalis |
| 541 | E3M10000033E11 | Enterococcus faecalis |
| 542 | E3M10000033F01 | Enterococcus faecalis |
| 543 | E3M10000033F03 | Enterococcus faecalis |
| 544 | E3M10000033F04 | Enterococcus faecalis |
| 545 | E3M10000033F05 | Enterococcus faecalis |
| 546 | E3M10000033F07 | Enterococcus faecalis |
| 547 | E3M10000033F08 | Enterococcus faecalis |
| 548 | E3M10000033F10 | Enterococcus faecalis |
| 549 | E3M10000033F12 | Enterococcus faecalis |
| 550 | E3M10000033G01 | Enterococcus faecalis |
| 551 | E3M10000033G02 | Enterococcus faecalis |
| 552 | E3M10000033G03 | Enterococcus faecalis |
| 553 | E3M10000033G04 | Enterococcus faecalis |
| 554 | E3M10000033G06 | Enterococcus faecalis |
| 555 | E3M10000033G07 | Enterococcus faecalis |
| 556 | E3M10000033G08 | Enterococcus faecalis |
| 557 | E3M10000033G09 | Enterococcus faecalis |
| 558 | E3M10000033G12 | Enterococcus faecalis |
| 559 | E3M10000033H02 | Enterococcus faecalis |
| 560 | E3M10000033H04 | Enterococcus faecalis |
| 561 | E3M10000033H05 | Enterococcus faecalis |
| 562 | E3M10000033H07 | Enterococcus faecalis |
| 563 | E3M10000033H08 | Enterococcus faecalis |
| 564 | E3M10000033H09 | Enterococcus faecalis |
| 565 | E3M10000033H10 | Enterococcus faecalis |
| 566 | E3M10000033H11 | Enterococcus faecalis |
| 567 | E3M10000034A02 | Enterococcus faecalis |
| 568 | E3M10000034A03 | Enterococcus faecalis |
| 569 | E3M10000034A04 | Enterococcus faecalis |
| 570 | E3M10000034B02 | Enterococcus faecalis |
| 571 | E3M10000034B04 | Enterococcus faecalis |
| 572 | E3M10000034C04 | Enterococcus faecalis |
| 573 | E3M10000034D01 | Enterococcus faecalis |
| 574 | E3M10000034D02 | Enterococcus faecalis |
| 575 | E3M10000034E01 | Enterococcus faecalis |
| 576 | E3M10000034E04 | Enterococcus faecalis |
| 577 | E3M10000034F02 | Enterococcus faecalis |
| 578 | E3M10000034F03 | Enterococcus faecalis |
| 579 | E3M10000034F04 | Enterococcus faecalis |
| 580 | E3M10000034G02 | Enterococcus faecalis |
| 581 | E3M10000034G03 | Enterococcus faecalis |
| 582 | E3M10000034H02 | Enterococcus faecalis |
| 583 | E3M10000034H03 | Enterococcus faecalis |
| 584 | E3M10000035A02 | Enterococcus faecalis |
| 585 | E3M10000035A04 | Enterococcus faecalis |
| 586 | E3M10000035A05 | Enterococcus faecalis |
| 587 | E3M10000035A06 | Enterococcus faecalis |
| 588 | E3M10000035A08 | Enterococcus faecalis |
| 589 | E3M10000035A09 | Enterococcus faecalis |
| 590 | E3M1000003SA11 | Enterococcus faecalis |
| 591 | E3M10000035B01 | Enterococcus faecalis |
| 592 | E3M10000035B03 | Enterococcus faecalis |
| 593 | E3M10000035B06 | Enterococcus faecalis |
| 594 | E3M10000035B07 | Enterococcus faecalis |
| 595 | E3M10000035B08 | Enterococcus faecalis |
| 596 | E3M10000035B10 | Enterococcus faecalis |
| 597 | E3M1000003SB11 | Enterococcus faecalis |
| 598 | E3M10000035B12 | Enterococcus faecalis |
| 599 | E3M10000035C01 | Enterococcus faecalis |
| 600 | E3M10000035C03 | Enterococcus faecalis |
| 601 | E3M10000035C04 | Enterococcus faecalis |
| 602 | E3M1000003SC05 | Enterococcus faecalis |
| 603 | E3M10000035C06 | Enterococcus faecalis |
| 604 | E3M10000035C07 | Enterococcus faecalis |
| 605 | E3M10000035C08 | Enterococcus faecalis |
| 606 | E3M10000035C09 | Enterococcus faecalis |
| 607 | E3M10000035C11 | Enterococcus faecalis |
| 608 | E3M10000035C12 | Enterococcus faecalis |
| 609 | E3M10000035D02 | Enterococcus faecalis |
| 610 | E3M10000035D03 | Enterococcus faecalis |
| 611 | E3M10000035D04 | Enterococcus faecalis |
| 612 | E3M10000035D05 | Enterococcus faecalis |
| 613 | E3M10000035D10 | Enterococcus faecalis |
| 614 | E3M10000035D11 | Enterococcus faecalis |
| 615 | E3M10000035E03 | Enterococcus faecalis |
| 616 | E3M10000035E04 | Enterococcus faecalis |
| 617 | E3M10000035E05 | Enterococcus faecalis |
| 618 | E3M10000035E07 | Enterococcus faecalis |
| 619 | E3M10000035E08 | Enterococcus faecalis |
| 620 | E3M10000035E09 | Enterococcus faecalis |
| 621 | E3M10000035E10 | Enterococcus faecalis |
| 622 | E3M10000035E11 | Enterococcus faecalis |
| 623 | E3M10000035E12 | Enterococcus faecalis |
| 624 | E3M10000035F01 | Enterococcus faecalis |
| 625 | E3M10000035F02 | Enterococcus faecalis |
| 626 | E3M10000035F03 | Enterococcus faecalis |
| 627 | E3M10000035F06 | Enterococcus faecalis |
| 628 | E3M10000035F07 | Enterococcus faecalis |
| 629 | E3M10000035F08 | Enterococcus faecalis |
| 630 | E3M10000035F09 | Enterococcus faecalis |
| 631 | E3M10000035F11 | Enterococcus faecalis |
| 632 | E3M10000035F12 | Enterococcus faecalis |
| 633 | E3M10000035G02 | Enterococcus faecalis |
| 634 | E3M10000035G04 | Enterococcus faecalis |
| 635 | E3M10000035G05 | Enterococcus faecalis |
| 636 | E3M10000035G08 | Enterococcus faecalis |
| 637 | E3M10000035G09 | Enterococcus faecalis |
| 638 | E3M10000035G10 | Enterococcus faecalis |
| 639 | E3M10000035G11 | Enterococcus faecalis |
| 640 | E3M10000035H03 | Enterococcus faecalis |
| 641 | E3M10000035H06 | Enterococcus faecalis |
| 642 | E3M10000035H09 | Enterococcus faecalis |
| 643 | E3M10000035H11 | Enterococcus faecalis |
| 644 | E3M10000036A03 | Enterococcus faecalis |
| 645 | E3M10000036A04 | Enterococcus faecalis |
| 646 | E3M10000036A05 | Enterococcus faecalis |
| 647 | E3M10000036A06 | Enterococcus faecalis |
| 648 | E3M10000036A07 | Enterococcus faecalis |
| 649 | E3M10000036A08 | Enterococcus faecalis |
| 650 | E3M10000036A09 | Enterococcus faecalis |
| 651 | E3M10000036A10 | Enterococcus faecalis |
| 652 | E3M10000036B01 | Enterococcus faecalis |
| 653 | E3M10000036B03 | Enterococcus faecalis |
| 654 | E3M10000036B06 | Enterococcus faecalis |
| 655 | E3M10000036B07 | Enterococcus faecalis |
| 656 | E3M10000036B08 | Enterococcus faecalis |
| 657 | E3M10000036B09 | Enterococcus faecalis |
| 658 | E3M10000036B11 | Enterococcus faecalis |
| 659 | E3M10000036B12 | Enterococcus faecalis |
| 660 | E3M10000036C01 | Enterococcus faecalis |
| 661 | E3M10000036C03 | Enterococcus faecalis |
| 662 | E3M10000036C06 | Enterococcus faecalis |
| 663 | E3M10000036C07 | Enterococcus faecalis |
| 664 | E3M10000036C08 | Enterococcus faecalis |
| 665 | E3M10000036C09 | Enterococcus faecalis |
| 666 | E3M10000036C10 | Enterococcus faecalis |
| 667 | E3M10000036C11 | Enterococcus faecalis |
| 668 | E3M10000036D03 | Enterococcus faecalis |
| 669 | E3M10000036D04 | Enterococcus faecalis |
| 670 | E3M10000036D06 | Enterococcus faecalis |
| 671 | E3M10000036D08 | Enterococcus faecalis |
| 672 | E3M10000036D09 | Enterococcus faecalis |
| 673 | E3M10000036D10 | Enterococcus faecalis |
| 674 | E3M10000036D11 | Enterococcus faecalis |
| 675 | E3M10000036D12 | Enterococcus faecalis |
| 676 | E3M10000036E01 | Enterococcus faecalis |
| 677 | E3M10000036E04 | Enterococcus faecalis |
| 678 | E3M10000036E05 | Enterococcus faecalis |
| 679 | E3M10000036E07 | Enterococcus faecalis |
| 680 | E3M10000036E08 | Enterococcus faecalis |
| 681 | E3M10000036F03 | Enterococcus faecalis |
| 682 | E3M10000036F04 | Enterococcus faecalis |
| 683 | E3M10000036F05 | Enterococcus faecalis |
| 684 | E3M10000036F08 | Enterococcus faecalis |
| 685 | E3M10000036F09 | Enterococcus faecalis |
| 686 | E3M10000036F10 | Enterococcus faecalis |
| 687 | E3M10000036F12 | Enterococcus faecalis |
| 688 | E3M10000036G01 | Enterococcus faecalis |
| 689 | E3M10000036G02 | Enterococcus faecalis |
| 690 | E3M10000036G03 | Enterococcus faecalis |
| 691 | E3M10000036G04 | Enterococcus faecalis |
| 692 | E3M10000036G06 | Enterococcus faecalis |
| 693 | E3M10000036G10 | Enterococcus faecalis |
| 694 | E3M10000036H02 | Enterococcus faecalis |
| 695 | E3M10000036H03 | Enterococcus faecalis |
| 696 | E3M10000036H04 | Enterococcus faecalis |
| 697 | E3M10000036H05 | Enterococcus faecalis |
| 698 | E3M10000036H06 | Enterococcus faecalis |
| 699 | E3M10000036H07 | Enterococcus faecalis |
| 700 | E3M10000036H08 | Enterococcus faecalis |
| 701 | E3M10000036H09 | Enterococcus faecalis |
| 702 | E3M10000036H10 | Enterococcus faecalis |
| 703 | E3M10000037A03 | Enterococcus faecalis |
| 704 | E3M10000037A06 | Enterococcus faecalis |
| 705 | E3M10000037A08 | Enterococcus faecalis |
| 706 | E3M10000037A09 | Enterococcus faecalis |
| 707 | E3M10000037A10 | Enterococcus faecalis |
| 708 | E3M10000037B02 | Enterococcus faecalis |
| 709 | E3M10000037B07 | Enterococcus faecalis |
| 710 | E3M10000037B08 | Enterococcus faecalis |
| 711 | E3M10000037B11 | Enterococcus faecalis |
| 712 | E3M10000037C01 | Enterococcus faecalis |
| 713 | E3M10000037C02 | Enterococcus faecalis |
| 714 | E3M10000037C04 | Enterococcus faecalis |
| 715 | E3M10000037C05 | Enterococcus faecalis |
| 716 | E3M10000037C07 | Enterococcus faecalis |
| 717 | E3M10000037C11 | Enterococcus faecalis |
| 718 | E3M10000037C12 | Enterococcus faecalis |
| 719 | E3M10000037D02 | Enterococcus faecalis |
| 720 | E3M10000037D03 | Enterococcus faecalis |
| 721 | E3M10000037D04 | Enterococcus faecalis |
| 722 | E3M10000037D05 | Enterococcus faecalis |
| 723 | E3M10000037D06 | Enterococcus faecalis |
| 724 | E3M10000037D09 | Enterococcus faecalis |
| 725 | E3M10000037D11 | Enterococcus faecalis |
| 726 | E3M10000037E01 | Enterococcus faecalis |
| 727 | E3M10000037E02 | Enterococcus faecalis |
| 728 | E3M10000037E03 | Enterococcus faecalis |
| 729 | E3M10000037E05 | Enterococcus faecalis |
| 730 | E3M10000037E07 | Enterococcus faecalis |
| 731 | E3M10000037E08 | Enterococcus faecalis |
| 732 | E3M10000037E10 | Enterococcus faecalis |
| 733 | E3M10000037E12 | Enterococcus faecalis |
| 734 | E3M10000037F01 | Enterococcus faecalis |
| 735 | E3M10000037F02 | Enterococcus faecalis |
| 736 | E3M10000037F06 | Enterococcus faecalis |
| 737 | E3M10000037F07 | Enterococcus faecalis |
| 738 | E3M10000037F12 | Enterococcus faecalis |
| 739 | E3M10000037G01 | Enterococcus faecalis |
| 740 | E3M10000037G02 | Enterococcus faecalis |
| 741 | E3M10000037G03 | Enterococcus faecalis |
| 742 | E3M10000037G05 | Enterococcus faecalis |
| 743 | E3M10000037G06 | Enterococcus faecalis |
| 744 | E3M10000037G07 | Enterococcus faecalis |
| 745 | E3M10000037G08 | Enterococcus faecalis |
| 746 | E3M10000037G10 | Enterococcus faecalis |
| 747 | E3M10000037G11 | Enterococcus faecalis |
| 748 | E3M10000037H02 | Enterococcus faecalis |
| 749 | E3M10000037H05 | Enterococcus faecalis |
| 750 | E3M10000037H07 | Enterococcus faecalis |
| 751 | E3M10000037H10 | Enterococcus faecalis |
| 752 | E3M10000037H11 | Enterococcus faecalis |
| 753 | E3M10000038A02 | Enterococcus faecalis |
| 754 | E3M10000038A03 | Enterococcus faecalis |
| 755 | E3M10000038A05 | Enterococcus faecalis |
| 756 | E3M10000038A06 | Enterococcus faecalis |
| 757 | E3M10000038A07 | Enterococcus faecalis |
| 758 | E3M10000038A09 | Enterococcus faecalis |
| 759 | E3M10000038A10 | Enterococcus faecalis |
| 760 | E3M10000038A11 | Enterococcus faecalis |
| 761 | E3M10000038B02 | Enterococcus faecalis |
| 762 | E3M10000038B03 | Enterococcus faecalis |
| 763 | E3M10000038B04 | Enterococcus faecalis |
| 764 | E3M10000038B05 | Enterococcus faecalis |
| 765 | E3M10000038B07 | Enterococcus faecalis |
| 766 | E3M10000038B08 | Enterococcus faecalis |
| 767 | E3M10000038B09 | Enterococcus faecalis |
| 768 | E3M10000038B11 | Enterococcus faecalis |
| 769 | E3M10000038C02 | Enterococcus faecalis |
| 770 | E3M10000038C03 | Enterococcus faecalis |
| 771 | E3M10000038C05 | Enterococcus faecalis |
| 772 | E3M10000038C07 | Enterococcus faecalis |
| 773 | E3M10000038C10 | Enterococcus faecalis |
| 774 | E3M10000038C12 | Enterococcus faecalis |
| 775 | E3M10000038D01 | Enterococcus faecalis |
| 776 | E3M10000038D02 | Enterococcus faecalis |
| 777 | E3M10000038D04 | Enterococcus faecalis |
| 778 | E3M10000038D08 | Enterococcus faecalis |
| 779 | E3M10000038D10 | Enterococcus faecalis |
| 780 | E3M10000038D11 | Enterococcus faecalis |
| 781 | E3M10000038D12 | Enterococcus faecalis |
| 782 | E3M10000038E02 | Enterococcus faecalis |
| 783 | E3M10000038E03 | Enterococcus faecalis |
| 784 | E3M10000038E04 | Enterococcus faecalis |
| 785 | E3M10000038E05 | Enterococcus faecalis |
| 786 | E3M10000038E07 | Enterococcus faecalis |
| 787 | E3M10000038E08 | Enterococcus faecalis |
| 788 | E3M10000038E11 | Enterococcus faecalis |
| 789 | E3M10000038F02 | Enterococcus faecalis |
| 790 | E3M10000038F04 | Enterococcus faecalis |
| 791 | E3M10000038F05 | Enterococcus faecalis |
| 792 | E3M10000038F06 | Enterococcus faecalis |
| 793 | E3M10000038F07 | Enterococcus faecalis |
| 794 | E3M10000038F09 | Enterococcus faecalis |
| 795 | E3M10000038F10 | Enterococcus faecalis |
| 796 | E3M10000038F11 | Enterococcus faecalis |
| 797 | E3M10000038G02 | Enterococcus faecalis |
| 798 | E3M10000038G03 | Enterococcus faecalis |
| 799 | E3M10000038G06 | Enterococcus faecalis |
| 800 | E3M10000038G07 | Enterococcus faecalis |
| 801 | E3M10000038G11 | Enterococcus faecalis |
| 802 | E3M10000038H02 | Enterococcus faecalis |
| 803 | E3M10000038H05 | Enterococcus faecalis |
| 804 | E3M10000038H06 | Enterococcus faecalis |
| 805 | E3M10000038H07 | Enterococcus faecalis |
| 806 | E3M10000038H08 | Enterococcus faecalis |
| 807 | E3M10000038H09 | Enterococcus faecalis |
| 808 | E3M10000038H10 | Enterococcus faecalis |
| 809 | E3M10000039A02 | Enterococcus faecalis |
| 810 | E3M10000039A06 | Enterococcus faecalis |
| 811 | E3M10000039A07 | Enterococcus faecalis |
| 812 | E3M10000039A08 | Enterococcus faecalis |
| 813 | E3M10000039A10 | Enterococcus faecalis |
| 814 | E3M10000039A11 | Enterococcus faecalis |
| 815 | E3M10000039B01 | Enterococcus faecalis |
| 816 | E3M10000039B03 | Enterococcus faecalis |
| 817 | E3M10000039B04 | Enterococcus faecalis |
| 818 | E3M10000039B06 | Enterococcus faecalis |
| 819 | E3M10000039B07 | Enterococcus faecalis |
| 820 | E3M10000039B08 | Enterococcus faecalis |
| 821 | E3M10000039B09 | Enterococcus faecalis |
| 822 | E3M10000039B11 | Enterococcus faecalis |
| 823 | E3M10000039C02 | Enterococcus faecalis |
| 824 | E3M10000039C04 | Enterococcus faecalis |
| 825 | E3M10000039C05 | Enterococcus faecalis |
| 826 | E3M10000039C06 | Enterococcus faecalis |
| 827 | E3M10000039C07 | Enterococcus faecalis |
| 828 | E3M10000039C08 | Enterococcus faecalis |
| 829 | E3M10000039C09 | Enterococcus faecalis |
| 830 | E3M10000039C10 | Enterococcus faecalis |
| 831 | E3M10000039D02 | Enterococcus faecalis |
| 832 | E3M10000039D03 | Enterococcus faecalis |
| 833 | E3M10000039D04 | Enterococcus faecalis |
| 834 | E3M10000039D06 | Enterococcus faecalis |
| 835 | E3M10000039E01 | Enterococcus faecalis |
| 836 | E3M10000039E02 | Enterococcus faecalis |
| 837 | E3M10000039E03 | Enterococcus faecalis |
| 838 | E3M10000039E05 | Enterococcus faecalis |
| 839 | E3M10000039E07 | Enterococcus faecalis |
| 840 | E3M10000039E08 | Enterococcus faecalis |
| 841 | E3M10000039F01 | Enterococcus faecalis |
| 842 | E3M10000039F02 | Enterococcus faecalis |
| 843 | E3M10000039F03 | Enterococcus faecalis |
| 844 | E3M10000039F06 | Enterococcus faecalis |
| 845 | E3M10000039F07 | Enterococcus faecalis |
| 846 | E3M10000039F08 | Enterococcus faecalis |
| 847 | E3M10000039G01 | Enterococcus faecalis |
| 848 | E3M10000039G02 | Enterococcus faecalis |
| 849 | E3M10000039G05 | Enterococcus faecalis |
| 850 | E3M10000039G07 | Enterococcus faecalis |
| 851 | E3M10000039G09 | Enterococcus faecalis |
| 852 | E3M10000039G10 | Enterococcus faecalis |
| 853 | E3M10000039H02 | Enterococcus faecalis |
| 854 | E3M10000039H07 | Enterococcus faecalis |
| 855 | E3M10000039H08 | Enterococcus faecalis |
| 856 | E3M10000039H10 | Enterococcus faecalis |
| 857 | E3M10000039H11 | Enterococcus faecalis |
| 858 | E3M10000040A03 | Enterococcus faecalis |
| 859 | E3M10000040A05 | Enterococcus faecalis |
| 860 | E3M10000040A07 | Enterococcus faecalis |
| 861 | E3M10000040A09 | Enterococcus faecalis |
| 862 | E3M10000040A10 | Enterococcus faecalis |
| 863 | E3M10000040A11 | Enterococcus faecalis |
| 864 | E3M10000040B01 | Enterococcus faecalis |
| 865 | E3M10000040B02 | Enterococcus faecalis |
| 866 | E3M10000040B05 | Enterococcus faecalis |
| 867 | E3M10000040B06 | Enterococcus faecalis |
| 868 | E3M10000040B08 | Enterococcus faecalis |
| 869 | E3M10000040B09 | Enterococcus faecalis |
| 870 | E3M1000004GB10 | Enterococcus faecalis |
| 871 | E3M1000004GB11 | Enterococcus faecalis |
| 872 | E3M1000004GB12 | Enterococcus faecalis |
| 873 | E3M10000040C02 | Enterococcus faecalis |
| 874 | E3M10000040C05 | Enterococcus faecalis |
| 875 | E3M10000040C06 | Enterococcus faecalis |
| 876 | E3M10000040C07 | Enterococcus faecalis |
| 877 | E3M10000040C08 | Enterococcus faecalis |
| 878 | E3M10000040C09 | Enterococcus faecalis |
| 879 | E3M10000040C10 | Enterococcus faecalis |
| 880 | E3M10000040C11 | Enterococcus faecalis |
| 881 | E3M10000040C12 | Enterococcus faecalis |
| 882 | E3M10000040D03 | Enterococcus faecalis |
| 883 | E3M10000040D04 | Enterococcus faecalis |
| 884 | E3M10000040D08 | Enterococcus faecalis |
| 885 | E3M10000040D12 | Enterococcus faecalis |
| 886 | E3M10000040E02 | Enterococcus faecalis |
| 887 | E3M10000040E10 | Enterococcus faecalis |
| 888 | E3M10000040E11 | Enterococcus faecalis |
| 889 | E3M10000040E12 | Enterococcus faecalis |
| 890 | E3M10000040F01 | Enterococcus faecalis |
| 891 | E3M10000040F03 | Enterococcus faecalis |
| 892 | E3M10000040F08 | Enterococcus faecalis |
| 893 | E3M10000040F09 | Enterococcus faecalis |
| 894 | E3M10000040F10 | Enterococcus faecalis |
| 895 | E3M10000040G01 | Enterococcus faecalis |
| 896 | E3M10000040G02 | Enterococcus faecalis |
| 897 | E3M10000040G04 | Enterococcus faecalis |
| 898 | E3M10000040G05 | Enterococcus faecalis |
| 899 | E3M10000040G07 | Enterococcus faecalis |
| 900 | E3M10000040G08 | Enterococcus faecalis |
| 901 | E3M10000040G09 | Enterococcus faecalis |
| 902 | E3M10000040G11 | Enterococcus faecalis |
| 903 | E3M10000040H02 | Enterococcus faecalis |
| 904 | E3M10000040H03 | Enterococcus faecalis |
| 905 | E3M10000040H04 | Enterococcus faecalis |
| 906 | E3M10000040H05 | Enterococcus faecalis |
| 907 | E3M10000040H09 | Enterococcus faecalis |
| 908 | E3M10000041A03 | Enterococcus faecalis |
| 909 | E3M10000041A05 | Enterococcus faecalis |
| 910 | E3M10000041A08 | Enterococcus faecalis |
| 911 | E3M10000041A09 | Enterococcus faecalis |
| 912 | E3M10000041A10 | Enterococcus faecalis |
| 913 | E3M10000041A11 | Enterococcus faecalis |
| 914 | E3M10000041B02 | Enterococcus faecalis |
| 915 | E3M10000041B03 | Enterococcus faecalis |
| 916 | E3M10000041B05 | Enterococcus faecalis |
| 917 | E3M10000041B06 | Enterococcus faecalis |
| 918 | E3M10000041B08 | Enterococcus faecalis |
| 919 | E3M10000041B09 | Enterococcus faecalis |
| 920 | E3M10000041B10 | Enterococcus faecalis |
| 921 | E3M10000041B11 | Enterococcus faecalis |
| 922 | E3M10000041B12 | Enterococcus faecalis |
| 923 | E3M10000041C01 | Enterococcus faecalis |
| 924 | E3M10000041C07 | Enterococcus faecalis |
| 925 | E3M10000041C08 | Enterococcus faecalis |
| 926 | E3M10000041C09 | Enterococcus faecalis |
| 927 | E3M10000041C10 | Enterococcus faecalis |
| 928 | E3M10000041C11 | Enterococcus faecalis |
| 929 | E3M10000041C12 | Enterococcus faecalis |
| 930 | E3M10000041D02 | Enterococcus faecalis |
| 931 | E3M10000041D03 | Enterococcus faecalis |
| 932 | E3M10000041D04 | Enterococcus faecalis |
| 933 | E3M10000041D05 | Enterococcus faecalis |
| 934 | E3M10000041D06 | Enterococcus faecalis |
| 935 | E3M10000041D08 | Enterococcus faecalis |
| 936 | E3M10000041D09 | Enterococcus faecalis |
| 937 | E3M10000041D10 | Enterococcus faecalis |
| 938 | E3M10000041D11 | Enterococcus faecalis |
| 939 | E3M10000041D12 | Enterococcus faecalis |
| 940 | E3M10000041E02 | Enterococcus faecalis |
| 941 | E3M10000041E03 | Enterococcus faecalis |
| 942 | E3M10000041EO5 | Enterococcus faecalis |
| 943 | E3M10000041E07 | Enterococcus faecalis |
| 944 | E3M10000041E10 | Enterococcus faecalis |
| 945 | E3M1000004IE11 | Enterococcus faecalis |
| 946 | E3M10000041F03 | Enterococcus faecalis |
| 947 | E3M10000041F05 | Enterococcus faecalis |
| 948 | E3M10000041F06 | Enterococcus faecalis |
| 949 | E3M10000041F07 | Enterococcus faecalis |
| 950 | E3M10000041F08 | Enterococcus faecalis |
| 951 | E3M10000041F09 | Enterococcus faecalis |
| 952 | E3M10000041F10 | Enterococcus faecalis |
| 953 | E3M10000041F11 | Enterococcus faecalis |
| 954 | E3M10000041G02 | Enterococcus faecalis |
| 955 | E3M10000041G03 | Enterococcus faecalis |
| 956 | E3M10000041G04 | Enterococcus faecalis |
| 957 | E3M10000041G06 | Enterococcus faecalis |
| 958 | E3M10000041G07 | Enterococcus faecalis |
| 959 | E3M10000041G08 | Enterococcus faecalis |
| 960 | E3M10000041G09 | Enterococcus faecalis |
| 961 | E3M10000041G10 | Enterococcus faecalis |
| 962 | E3M10000041G12 | Enterococcus faecalis |
| 963 | E3M10000041H04 | Enterococcus faecalis |
| 964 | E3M10000041H05 | Enterococcus faecalis |
| 965 | E3M10000041H06 | Enterococcus faecalis |
| 966 | E3M10000041H07 | Enterococcus faecalis |
| 967 | E3M10000041H08 | Enterococcus faecalis |
| 968 | E3M10000041H09 | Enterococcus faecalis |
| 969 | E3M10000041H10 | Enterococcus faecalis |
| 970 | E3M10000041H11 | Enterococcus faecalis |
| 971 | E3M10000042A03 | Enterococcus faecalis |
| 972 | E3M10000042A08 | Enterococcus faecalis |
| 973 | E3M10000042A10 | Enterococcus faecalis |
| 974 | E3M10000042B01 | Enterococcus faecalis |
| 975 | E3M10000042B02 | Enterococcus faecalis |
| 976 | E3M10000042B04 | Enterococcus faecalis |
| 977 | E3M10000042B08 | Enterococcus faecalis |
| 978 | E3M10000042B09 | Enterococcus faecalis |
| 979 | E3M10000042B10 | Enterococcus faecalis |
| 980 | E3M10000042B11 | Enterococcus faecalis |
| 981 | E3M10000042C02 | Enterococcus faecalis |
| 982 | E3M10000042C03 | Enterococcus faecalis |
| 983 | E3M10000042C04 | Enterococcus faecalis |
| 984 | E3M10000042C10 | Enterococcus faecalis |
| 985 | E3M10000042D01 | Enterococcus faecalis |
| 986 | E3M10000042D02 | Enterococcus faecalis |
| 987 | E3M10000042D03 | Enterococcus faecalis |
| 988 | E3M10000042D06 | Enterococcus faecalis |
| 989 | E3M10000042D09 | Enterococcus faecalis |
| 990 | E3M10000042D11 | Enterococcus faecalis |
| 991 | E3M10000042D12 | Enterococcus faecalis |
| 992 | E3M10000042E05 | Enterococcus faecalis |
| 993 | E3M10000042E12 | Enterococcus faecalis |
| 994 | E3M10000042F11 | Enterococcus faecalis |
| 995 | E3M10000042G01 | Enterococcus faecalis |
| 996 | E3M10000042G05 | Enterococcus faecalis |
| 997 | E3M10000042G07 | Enterococcus faecalis |
| 998 | E3M10000042G08 | Enterococcus faecalis |
| 999 | E3M10000042G11 | Enterococcus faecalis |
| 1000 | E3M10000042G12 | Enterococcus faecalis |
| 1001 | E3M10000042H06 | Enterococcus faecalis |
| 1002 | E3M10000042H08 | Enterococcus faecalis |
| 1003 | E3M10000042H11 | Enterococcus faecalis |
| 1004 | E3M10000043A02 | Enterococcus faecalis |
| 1005 | E3M10000043A03 | Enterococcus faecalis |
| 1006 | E3M10000043A05 | Enterococcus faecalis |
| 1007 | E3M10000043A08 | Enterococcus faecalis |
| 1008 | E3M10000043A09 | Enterococcus faecalis |
| 1009 | E3M10000043A10 | Enterococcus faecalis |
| 1010 | E3M10000043A11 | Enterococcus faecalis |
| 1011 | E3M10000043B01 | Enterococcus faecalis |
| 1012 | E3M10000043B02 | Enterococcus faecalis |
| 1013 | E3M10000043B03 | Enterococcus faecalis |
| 1014 | E3M10000043B06 | Enterococcus faecalis |
| 1015 | E3M10000043B08 | Enterococcus faecalis |
| 1016 | E3M10000043B09 | Enterococcus faecalis |
| 1017 | E3M10000043B10 | Enterococcus faecalis |
| 1018 | E3M10000043B11 | Enterococcus faecalis |
| 1019 | E3M10000043B12 | Enterococcus faecalis |
| 1020 | E3M10000043C01 | Enterococcus faecalis |
| 1021 | E3M10000043C08 | Enterococcus faecalis |
| 1022 | E3M10000043C09 | Enterococcus faecalis |
| 1023 | E3M10000043D01 | Enterococcus faecalis |
| 1024 | E3M10000043D02 | Enterococcus faecalis |
| 1025 | E3M10000043D09 | Enterococcus faecalis |
| 1026 | E3M10000043D10 | Enterococcus faecalis |
| 1027 | E3M10000043D12 | Enterococcus faecalis |
| 1028 | E3M10000043E03 | Enterococcus faecalis |
| 1029 | E3M10000043E07 | Enterococcus faecalis |
| 1030 | E3M10000043E08 | Enterococcus faecalis |
| 1031 | E3M10000043E10 | Enterococcus faecalis |
| 1032 | E3M10000043E11 | Enterococcus faecalis |
| 1033 | E3M10000043F03 | Enterococcus faecalis |
| 1034 | E3M10000043F04 | Enterococcus faecalis |
| 1035 | E3M10000043F06 | Enterococcus faecalis |
| 1036 | E3M10000043F08 | Enterococcus faecalis |
| 1037 | E3M10000043F10 | Enterococcus faecalis |
| 1038 | E3M10000043F12 | Enterococcus faecalis |
| 1039 | E3M10000043G03 | Enterococcus faecalis |
| 1040 | E3M10000043G04 | Enterococcus faecalis |
| 1041 | E3M10000043G05 | Enterococcus faecalis |
| 1042 | E3M10000043G07 | Enterococcus faecalis |
| 1043 | E3M10000043G08 | Enterococcus faecalis |
| 1044 | E3M10000043G10 | Enterococcus faecalis |
| 1045 | E3M10000043G11 | Enterococcus faecalis |
| 1046 | E3M10000043G12 | Enterococcus faecalis |
| 1047 | E3M10000043H02 | Enterococcus faecalis |
| 1048 | E3M10000043H05 | Enterococcus faecalis |
| 1049 | E3M10000043H08 | Enterococcus faecalis |
| 1050 | E3M10000043H09 | Enterococcus faecalis |
| 1051 | E3M10000043H11 | Enterococcus faecalis |
| 1052 | E3M10000044C02 | Enterococcus faecalis |
| 1053 | E3M10000044E01 | Enterococcus faecalis |
| 1054 | K1M10000002F02 | Klebsiella pneumoniae |
| 1055 | K1M10000003C01 | Klebsiella pneumoniae |
| 1056 | K1M10000004F06 | Klebsiella pneumoniae |
| 1057 | K1M10000007F01 | Klebsiella pneumoniae |
| 1058 | K1M10000008C02 | Klebsiella pneumoniae |
| 1059 | K1M10000008C10 | Klebsiella pneumoniae |
| 1060 | K1M10000008G10 | Klebsiella pneumoniae |
| 1061 | K1M10000009D04 | Klebsiella pneumoniae |
| 1062 | K1M10000013E04 | Klebsiella pneumoniae |
| 1063 | K1M10000013E06 | Klebsiella pneumoniae |
| 1064 | K1M10000019D06 | Klebsiella pneumoniae |
| 1065 | K1M10000020B02 | Klebsiella pneumoniae |
| 1066 | K1M10000021HO6 | Klebsiella pneumoniae |
| 1067 | K1M10000022C10 | Klebsiella pneumoniae |
| 1068 | K1M10000023E09 | Klebsiella pneumoniae |
| 1069 | K1M10000023E10 | Klebsiella pneumoniae |
| 1070 | K1M10000030C07 | Klebsiella pneumoniae |
| 1071 | K1M10000030E07 | Klebsiella pneumoniae |
| 1072 | K1M10000031B11 | Klebsiella pneumoniae |
| 1073 | K1M10000032E11 | Klebsiella pneumoniae |
| 1074 | K1M10000033B02 | Klebsiella pneumoniae |
| 1075 | K1M10000033E01 | Klebsiella pneumoniae |
| 1076 | K1M10000036G08 | Klebsiella pneumoniae |
| 1077 | K1M10000037D10 | Klebsiella pneumoniae |
| 1078 | K1M10000038H09 | Klebsiella pneumoniae |
| 1079 | K1M10000039H03 | Klebsiella pneumoniae |
| 1080 | K1M10000043C01 | Klebsiella pneumoniae |
| 1081 | K1M10000043D05 | Klebsiella pneumoniae |
| 1082 | K1M10000043H10 | Klebsiella pneumoniae |
| 1083 | K1M10000044D05 | Klebsiella pneumoniae |
| 1084 | K1M10000044D08 | Klebsiella pneumoniae |
| 1085 | K1M10000044E05 | Klebsiella pneumoniae |
| 1086 | K1M10000044G05 | Klebsiella pneumoniae |
| 1087 | K1M10000045A07 | Klebsiella pneumoniae |
| 1088 | K1M10000045D10 | Klebsiella pneumoniae |
| 1089 | K1M10000003D03 | Klebsiella pneumoniae |
| 1090 | K1M10000010C02 | Klebsiella pneumoniae |
| 1091 | K1M10000021H10 | Klebsiella pneumoniae |
| 1092 | P1M10000008C06 | Pseudomonas aeruginosa |
| 1093 | P1M10000008G04 | Pseudomonas aeruginosa |
| 1094 | P1M10000010C03 | Pseudomonas aeruginosa |
| 1095 | P1M10000014H10 | Pseudomonas aeruginosa |
| 1096 | P1M10000015C06 | Pseudomonas aeruginosa |
| 1097 | P1M10000015C09 | Pseudomonas aeruginosa |
| 1098 | P1M10000016C04 | Pseudomonas aeruginosa |
| 1099 | P1M10000018B01 | Pseudomonas aeruginosa |
| 1100 | P1M10000018C01 | Pseudomonas aeruginosa |
| 1101 | P1M10000018E01 | Pseudomonas aeruginosa |
| 1102 | P1M10000018G01 | Pseudomonas aeruginosa |
| 1103 | P1M10000019F01 | Pseudomonas aeruginosa |
| 1104 | P1M10000021G03 | Pseudomonas aeruginosa |
| 1105 | P1M10000021G05 | Pseudomonas aeruginosa |
| 1106 | P1M10000022D09 | Pseudomonas aeruginosa |
| 1107 | P1M10000024D06 | Pseudomonas aeruginosa |
| 1108 | P1M10000024E06 | Pseudomonas aeruginosa |
| 1109 | P1M10000024H03 | Pseudomonas aeruginosa |
| 1110 | P1M10000025A06 | Pseudomonas aeruginosa |
| 1111 | P1M10000025G07 | Pseudomonas aeruginosa |
| 1112 | P1M10000025H07 | Pseudomonas aeruginosa |
| 1113 | P1M10000026E06 | Pseudomonas aeruginosa |
| 1114 | P1M10000026F04 | Pseudomonas aeruginosa |
| 1115 | P1M10000026G09 | Pseudomonas aeruginosa |
| 1116 | P1M10000026H02 | Pseudomonas aeruginosa |
| 1117 | P1M10000026H05 | Pseudomonas aeruginosa |
| 1118 | P1M10000027A06 | Pseudomonas aeruginosa |
| 1119 | P1M10000027B02 | Pseudomonas aeruginosa |
| 1120 | P1M10000027G05 | Pseudomonas aeruginosa |
| 1121 | P1M10000028A08 | Pseudomonas aeruginosa |
| 1122 | P1M10000028B01 | Pseudomonas aeruginosa |
| 1123 | P1M10000028E02 | Pseudomonas aeruginosa |
| 1124 | P1M10000029A09 | Pseudomonas aeruginosa |
| 1125 | P1M10000029G03 | Pseudomonas aeruginosa |
| 1126 | P1M10000029H05 | Pseudomonas aeruginosa |
| 1127 | P1M10000032F04 | Pseudomonas aeruginosa |
| 1128 | P1M10000033A02 | Pseudomonas aeruginosa |
| 1129 | P1M10000033B08 | Pseudomonas aeruginosa |
| 1130 | P1M10000033E03 | Pseudomonas aeruginosa |
| 1131 | P1M10000033F01 | Pseudomonas aeruginosa |
| 1132 | P1M10000033G08 | Pseudomonas aeruginosa |
| 1133 | P1M10000035A06 | Pseudomonas aeruginosa |
| 1134 | P1M10000037B12 | Pseudomonas aeruginosa |
| 1135 | P1M10000037G12 | Pseudomonas aeruginosa |
| 1136 | P1M10000038B08 | Pseudomonas aeruginosa |
| 1137 | P1M10000038C03 | Pseudomonas aeruginosa |
| 1138 | P1M10000038C06 | Pseudomonas aeruginosa |
| 1139 | P1M10000038F04 | Pseudomonas aeruginosa |
| 1140 | P1M10000038G02 | Pseudomonas aeruginosa |
| 1141 | P1M10000039G05 | Pseudomonas aeruginosa |
| 1142 | P1M10000039G12 | Pseudomonas aeruginosa |
| 1143 | PIM10000040C01 | Pseudomonas aeruginosa |
| 1144 | P1M10000040C04 | Pseudomonas aeruginosa |
| 1145 | P1M10000040D04 | Pseudomonas aeruginosa |
| 1146 | P1M10000040D05 | Pseudomonas aeruginosa |
| 1147 | P1M10000040E10 | Pseudomonas aeruginosa |
| 1148 | P1M10000040H03 | Pseudomonas aeruginosa |
| 1149 | P1M1OOOOO41A12 | Pseudomonas aeruginosa |
| 1150 | P1M10000041B02 | Pseudomonas aeruginosa |
| 1151 | P1M10000041E01 | Pseudomonas aeruginosa |
| 1152 | P1M10000041F01 | Pseudomonas aeruginosa |
| 1153 | P1M10000042B12 | Pseudomonas aeruginosa |
| 1154 | P1M10000042E08 | Pseudomonas aeruginosa |
| 1155 | P1M10000043A03 | Pseudomonas aeruginosa |
| 1156 | P1M10000043D06 | Pseudomonas aeruginosa |
| 1157 | P1M10000044F07 | Pseudomonas aeruginosa |
| 1158 | P1M10000046B03 | Pseudomonas aeruginosa |
| 1159 | P1M10000046C07 | Pseudomonas aeruginosa |
| 1160 | P1M10000046C08 | Pseudomonas aeruginosa |
| 1161 | P1M10000046C09 | Pseudomonas aeruginosa |
| 1162 | P1M10000046G11 | Pseudomonas aeruginosa |
| 1163 | P1M10000047B04 | Pseudomonas aeruginosa |
| 1164 | P1M10000047E11 | Pseudomonas aeruginosa |
| 1165 | P1M10000047F07 | Pseudomonas aeruginosa |
| 1166 | P1M10000047G10 | Pseudomonas aeruginosa |
| 1167 | P1M10000048A03 | Pseudomonas aeruginosa |
| 1168 | P1M10000049E08 | Pseudomonas aeruginosa |
| 1169 | P1M10000049G10 | Pseudomonas aeruginosa |
| 1170 | P1M10000050G11 | Pseudomonas aeruginosa |
| 1171 | P1M10000051D11 | Pseudomonas aeruginosa |
| 1172 | P1M10000051F01 | Pseudomonas aeruginosa |
| 1173 | P1M10000052C03 | Pseudomonas aeruginosa |
| 1174 | P1M10000052C12 | Pseudomonas aeruginosa |
| 1175 | P1M10000052E04 | Pseudomonas aeruginosa |
| 1176 | P1M10000053B12 | Pseudomonas aeruginosa |
| 1177 | P1M10000053C02 | Pseudomonas aeruginosa |
| 1178 | P1M10000053E07 | Pseudomonas aeruginosa |
| 1179 | P1M10000053F08 | Pseudomonas aeruginosa |
| 1180 | P1M10000055A11 | Pseudomonas aeruginosa |
| 1181 | P1M10000055C08 | Pseudomonas aeruginosa |
| 1182 | P1M10000055E05 | Pseudomonas aeruginosa |
| 1183 | P1M10000056C07 | Pseudomonas aeruginosa |
| 1184 | P1M10000056F05 | Pseudomonas aeruginosa |
| 1185 | P1M10000056F06 | Pseudomonas aeruginosa |
| 1186 | P1M10000056G01 | Pseudomonas aeruginosa |
| 1187 | P1M10000058B07 | Pseudomonas aeruginosa |
| 1188 | P1M10000059B04 | Pseudomonas aeruginosa |
| 1189 | P1M10000059B10 | Pseudomonas aeruginosa |
| 1190 | P1M10000059B11 | Pseudomonas aeruginosa |
| 1191 | P1M10000059D11 | Pseudomonas aeruginosa |
| 1192 | P1M10000059H08 | Pseudomonas aeruginosa |
| 1193 | P1M10000059H09 | Pseudomonas aeruginosa |
| 1194 | P1M10000060E03 | Pseudomonas aeruginosa |
| 1195 | P1M10000060H02 | Pseudomonas aeruginosa |
| 1196 | P1M10000060H04 | Pseudomonas aeruginosa |
| 1197 | P1M10000061B04 | Pseudomonas aeruginosa |
| 1198 | P1M10000061E04 | Pseudomonas aeruginosa |
| 1199 | P1M10000061F04 | Pseudomonas aeruginosa |
| 1200 | P1M10000062A12 | Pseudomonas aeruginosa |
| 1201 | P1M10000062C03 | Pseudomonas aeruginosa |
| 1202 | P1M10000062C04 | Pseudomonas aeruginosa |
| 1203 | P1M10000062C07 | Pseudomonas aeruginosa |
| 1204 | P1M10000062C12 | Pseudomonas aeruginosa |
| 1205 | P1M10000062D07 | Pseudomonas aeruginosa |
| 1206 | P1M10000062D08 | Pseudomonas aeruginosa |
| 1207 | P1M10000062E08 | Pseudomonas aeruginosa |
| 1208 | P1M10000062F06 | Pseudomonas aeruginosa |
| 1209 | P1M10000062G11 | Pseudomonas aeruginosa |
| 1210 | P1M10000062H01 | Pseudomonas aeruginosa |
| 1211 | P1M10000062H04 | Pseudomonas aeruginosa |
| 1212 | P1M10000063F02 | Pseudomonas aeruginosa |
| 1213 | P1M10000063G02 | Pseudomonas aeruginosa |
| 1214 | P1M10000063H02 | Pseudomonas aeruginosa |
| 1215 | P1M10000064A10 | Pseudomonas aeruginosa |
| 1216 | P1M10000064C02 | Pseudomonas aeruginosa |
| 1217 | P1M10000064C03 | Pseudomonas aeruginosa |
| 1218 | P1M10000064D03 | Pseudomonas aeruginosa |
| 1219 | P1M10000064E05 | Pseudomonas aeruginosa |
| 1220 | P1M10000064G12 | Pseudomonas aeruginosa |
| 1221 | P1M10000064H07 | Pseudomonas aeruginosa |
| 1222 | P1M10000065A04 | Pseudomonas aeruginosa |
| 1223 | P1M10000065B07 | Pseudomonas aeruginosa |
| 1224 | P1M10000065C03 | Pseudomonas aeruginosa |
| 1225 | P1M10000065C05 | Pseudomonas aeruginosa |
| 1226 | P1M10000065D06 | Pseudomonas aeruginosa |
| 1227 | P1M10000065F01 | Pseudomonas aeruginosa |
| 1228 | P1M10000065G06 | Pseudomonas aeruginosa |
| 1229 | P1M10000065H07 | Pseudomonas aeruginosa |
| 1230 | P1M10000066A10 | Pseudomonas aeruginosa |
| 1231 | P1M10000066A11 | Pseudomonas aeruginosa |
| 1232 | P1M10000066F04 | Pseudomonas aeruginosa |
| 1233 | P1M10000067A05 | Pseudomonas aeruginosa |
| 1234 | P1M10000067A06 | Pseudomonas aeruginosa |
| 1235 | P1M10000067A08 | Pseudomonas aeruginosa |
| 1236 | P1M10000067C04 | Pseudomonas aeruginosa |
| 1237 | P1M10000067C06 | Pseudomonas aeruginosa |
| 1238 | P1M10000067D05 | Pseudomonas aeruginosa |
| 1239 | P1M10000067F05 | Pseudomonas aeruginosa |
| 1240 | P1M10000067G05 | Pseudomonas aeruginosa |
| 1241 | P1M10000068A09 | Pseudomonas aeruginosa |
| 1242 | P1M10000068D04 | Pseudomonas aeruginosa |
| 1243 | P1M10000068F04 | Pseudomonas aeruginosa |
| 1244 | P1M10000068F08 | Pseudomonas aeruginosa |
| 1245 | P1M10000068G01 | Pseudomonas aeruginosa |
| 1246 | P1M10000068H05 | Pseudomonas aeruginosa |
| 1247 | P1M10000069D09 | Pseudomonas aeruginosa |
| 1248 | P1M10000069G06 | Pseudomonas aeruginosa |
| 1249 | P1M10000069H02 | Pseudomonas aeruginosa |
| 1250 | P1M10000070A05 | Pseudomonas aeruginosa |
| 1251 | P1M10000070B10 | Pseudomonas aeruginosa |
| 1252 | P1M10000070C06 | Pseudomonas aeruginosa |
| 1253 | P1M10000070D08 | Pseudomonas aeruginosa |
| 1254 | P1M10000070E03 | Pseudomonas aeruginosa |
| 1255 | P1M10000070G06 | Pseudomonas aeruginosa |
| 1256 | P1M10000070G12 | Pseudomonas aeruginosa |
| 1257 | P1M10000070H06 | Pseudomonas aeruginosa |
| 1258 | P1M10000071A03 | Pseudomonas aeruginosa |
| 1259 | P1M10000071C01 | Pseudomonas aeruginosa |
| 1260 | P1M10000071E04 | Pseudomonas aeruginosa |
| 1261 | P1M10000071F01 | Pseudomonas aeruginosa |
| 1262 | P1M10000073A06 | Pseudomonas aeruginosa |
| 1263 | P1M10000073B10 | Pseudomonas aeruginosa |
| 1264 | P1M10000073D04 | Pseudomonas aeruginosa |
| 1265 | P1M10000073D09 | Pseudomonas aeruginosa |
| 1266 | P1M10000073G03 | Pseudomonas aeruginosa |
| 1267 | PIM10000074B01 | Pseudomonas aeruginosa |
| 1268 | P1M10000074B04 | Pseudomonas aeruginosa |
| 1269 | P1M10000074E04 | Pseudomonas aeruginosa |
| 1270 | P1M10000074E09 | Pseudomonas aeruginosa |
| 1271 | P1M10000074F10 | Pseudomonas aeruginosa |
| 1272 | P1M10000074G12 | Pseudomonas aeruginosa |
| 1273 | P1M10000075A04 | Pseudomonas aeruginosa |
| 1274 | P1M10000075B03 | Pseudomonas aeruginosa |
| 1275 | P1M10000075F02 | Pseudomonas aeruginosa |
| 1276 | P1M10000075G05 | Pseudomonas aeruginosa |
| 1277 | P1M10000076D05 | Pseudomonas aeruginosa |
| 1278 | P1M10000076D10 | Pseudomonas aeruginosa |
| 1279 | P1M10000077A08 | Pseudomonas aeruginosa |
| 1280 | P1M10000077C08 | Pseudomonas aeruginosa |
| 1281 | P1M10000077E04 | Pseudomonas aeruginosa |
| 1282 | P1M10000077H05 | Pseudomonas aeruginosa |
| 1283 | P1M10000079A10 | Pseudomonas aeruginosa |
| 1284 | P1M10000079B10 | Pseudomonas aeruginosa |
| 1285 | P1M10000079C10 | Pseudomonas aeruginosa |
| 1286 | P1M10000079D01 | Pseudomonas aeruginosa |
| 1287 | P1M10000079D10 | Pseudomonas aeruginosa |
| 1288 | P1M10000079F06 | Pseudomonas aeruginosa |
| 1289 | P1M10000080B01 | Pseudomonas aeruginosa |
| 1290 | P1M10000080B06 | Pseudomonas aeruginosa |
| 1291 | P1M10000080C01 | Pseudomonas aeruginosa |
| 1292 | P1M10000080C06 | Pseudomonas aeruginosa |
| 1293 | P1M10000080E04 | Pseudomonas aeruginosa |
| 1294 | P1M10000081D12 | Pseudomonas aeruginosa |
| 1295 | P1M10000081G05 | Pseudomonas aeruginosa |
| 1296 | P1M10000081H05 | Pseudomonas aeruginosa |
| 1297 | P1M10000082A05 | Pseudomonas aeruginosa |
| 1298 | P1M10000082B04 | Pseudomonas aeruginosa |
| 1299 | P1M10000082C05 | Pseudomonas aeruginosa |
| 1300 | P1M10000082D05 | Pseudomonas aeruginosa |
| 1301 | P1M10000082E05 | Pseudomonas aeruginosa |
| 1302 | P1M10000083A11 | Pseudomonas aeruginosa |
| 1303 | P1M10000083B01 | Pseudomonas aeruginosa |
| 1304 | P1M10000083B12 | Pseudomonas aeruginosa |
| 1305 | P1M10000083C11 | Pseudomonas aeruginosa |
| 1306 | P1M10000083C12 | Pseudomonas aeruginosa |
| 1307 | P1M10000084A04 | Pseudomonas aeruginosa |
| 1308 | P1M10000084D03 | Pseudomonas aeruginosa |
| 1309 | P1M10000084E04 | Pseudomonas aeruginosa |
| 1310 | P1M10000084E11 | Pseudomonas aeruginosa |
| 1311 | P1M10000084F08 | Pseudomonas aeruginosa |
| 1312 | P1M10000085D06 | Pseudomonas aeruginosa |
| 1313 | P1M10000086A02 | Pseudomonas aeruginosa |
| 1314 | P1M10000086B01 | Pseudomonas aeruginosa |
| 1315 | P1M10000086D02 | Pseudomonas aeruginosa |
| 1316 | P1M10000086E05 | Pseudomonas aeruginosa |
| 1317 | P1M10000087A11 | Pseudomonas aeruginosa |
| 1318 | P1M10000087C09 | Pseudomonas aeruginosa |
| 1319 | P1M10000087E04 | Pseudomonas aeruginosa |
| 1320 | P1M10000087F04 | Pseudomonas aeruginosa |
| 1321 | P1M10000087F09 | Pseudomonas aeruginosa |
| 1322 | P1M10000088A07 | Pseudomonas aeruginosa |
| 1323 | P1M10000088D06 | Pseudomonas aeruginosa |
| 1324 | P1M10000089C08 | Pseudomonas aeruginosa |
| 1325 | P1M10000089D11 | Pseudomonas aeruginosa |
| 1326 | P1M10000089G08 | Pseudomonas aeruginosa |
| 1327 | P1M10000090B11 | Pseudomonas aeruginosa |
| 1328 | P1M10000090F06 | Pseudomonas aeruginosa |
| 1329 | P1M10000090F08 | Pseudomonas aeruginosa |
| 1330 | P1M10000091D02 | Pseudomonas aeruginosa |
| 1331 | P1M10000091E09 | Pseudomonas aeruginosa |
| 1332 | P1M10000091G10 | Pseudomonas aeruginosa |
| 1333 | P1M10000092B02 | Pseudomonas aeruginosa |
| 1334 | P1M10000092B10 | Pseudomonas aeruginosa |
| 1335 | P1M10000092D09 | Pseudomonas aeruginosa |
| 1336 | P1M10000092E02 | Pseudomonas aeruginosa |
| 1337 | P1M10000092F05 | Pseudomonas aeruginosa |
| 1338 | P1M10000093A03 | Pseudomonas aeruginosa |
| 1339 | P1M10000093B09 | Pseudomonas aeruginosa |
| 1340 | P1M10000093C08 | Pseudomonas aeruginosa |
| 1341 | P1M10000093E09 | Pseudomonas aeruginosa |
| 1342 | P1M10000093F03 | Pseudomonas aeruginosa |
| 1343 | P1M10000093H07 | Pseudomonas aeruginosa |
| 1344 | P1M10000094F04 | Pseudomonas aeruginosa |
| 1345 | P1M10000094H03 | Pseudomonas aeruginosa |
| 1346 | P1M10000095C01 | Pseudomonas aeruginosa |
| 1347 | P1M10000095C09 | Pseudomonas aeruginosa |
| 1348 | P1M10000095E04 | Pseudomonas aeruginosa |
| 1349 | P1M10000095G04 | Pseudomonas aeruginosa |
| 1350 | P1M10000096E04 | Pseudomonas aeruginosa |
| 1351 | P1M10000096E12 | Pseudomonas aeruginosa |
| 1352 | ID2 | Pseudomonas aeruginosa |
| 1353 | 4.1 | Pseudomonas aeruginosa |
| 1354 | S1M10000001A05 | Staphylococcus aureus |
| 1355 | S1M10000001A08 | Staphylococcus aureus |
| 1356 | S1M10000001A09 | Staphylococcus aureus |
| 1357 | S1M10000001A10 | Staphylococcus aureus |
| 1358 | S1M10000001C06 | Staphylococcus aureus |
| 1359 | S1M10000001D01 | Staphylococcus aureus |
| 1360 | S1M1000000ID02 | Staphylococcus aureus |
| 1361 | S1M1000000ID06 | Staphylococcus aureus |
| 1362 | S1M10000001D07 | Staphylococcus aureus |
| 1363 | S1M10000001E02 | Staphylococcus aureus |
| 1364 | S1M10000001E04 | Staphylococcus aureus |
| 1365 | S1M10000001E05 | Staphylococcus aureus |
| 1366 | S1M10000001E09 | Staphylococcus aureus |
| 1367 | S1M10000001E10 | Staphylococcus aureus |
| 1368 | S1M10000001E11 | Staphylococcus aureus |
| 1369 | S1M10000001F02 | Staphylococcus aureus |
| 1370 | S1M10000001F04 | Staphylococcus aureus |
| 1371 | S1M10000001F08 | Staphylococcus aureus |
| 1372 | S1M10000001F09 | Staphylococcus aureus |
| 1373 | S1M10000001F10 | Staphylococcus aureus |
| 1374 | S1M10000001F11 | Staphylococcus aureus |
| 1375 | S1M10000001G01 | Staphylococcus aureus |
| 1376 | S1M10000001G07 | Staphylococcus aureus |
| 1377 | S1M10000001G08 | Staphylococcus aureus |
| 1378 | S1M10000001G10 | Staphylococcus aureus |
| 1379 | S1M10000002A02 | Staphylococcus aureus |
| 1380 | S1M10000002A09 | Staphylococcus aureus |
| 1381 | S1M10000002A10 | Staphylococcus aureus |
| 1382 | S1M10000002A12 | Staphylococcus aureus |
| 1383 | S1M10000002B01 | Staphylococcus aureus |
| 1384 | S1M10000002B03 | Staphylococcus aureus |
| 1385 | S1M10000002B04 | Staphylococcus aureus |
| 1386 | S1M10000002B05 | Staphylococcus aureus |
| 1387 | S1M10000002B06 | Staphylococcus aureus |
| 1388 | S1M10000002B07 | Staphylococcus aureus |
| 1389 | S1M10000002B09 | Staphylococcus aureus |
| 1390 | S1M10000002B11 | Staphylococcus aureus |
| 1391 | S1M10000002C02 | Staphylococcus aureus |
| 1392 | S1M10000002C09 | Staphylococcus aureus |
| 1393 | S1M10000002C10 | Staphylococcus aureus |
| 1394 | S1M10000002C11 | Staphylococcus aureus |
| 1395 | S1M10000002C12 | Staphylococcus aureus |
| 1396 | S1M10000002D01 | Staphylococcus aureus |
| 1397 | S1M10000002D02 | Staphylococcus aureus |
| 1398 | S1M10000002D03 | Staphylococcus aureus |
| 1399 | S1M10000002D05 | Staphylococcus aureus |
| 1400 | S1M10000002D07 | Staphylococcus aureus |
| 1401 | S1M10000002D08 | Staphylococcus aureus |
| 1402 | S1M10000002D10 | Staphylococcus aureus |
| 1403 | S1M10000002D12 | Staphylococcus aureus |
| 1404 | S1M10000002E01 | Staphylococcus aureus |
| 1405 | S1M10000002E02 | Staphylococcus aureus |
| 1406 | S1M10000002E07 | Staphylococcus aureus |
| 1407 | S1M10000002E09 | Staphylococcus aureus |
| 1408 | S1M10000002E11 | Staphylococcus aureus |
| 1409 | S1M10000002E12 | Staphylococcus aureus |
| 1410 | S1M10000002F01 | Staphylococcus aureus |
| 1411 | S1M10000002F02 | Staphylococcus aureus |
| 1412 | S1M10000002F04 | Staphylococcus aureus |
| 1413 | S1M10000002F09 | Staphylococcus aureus |
| 1414 | S1M10000002F12 | Staphylococcus aureus |
| 1415 | S1M10000002G01 | Staphylococcus aureus |
| 1416 | S1M10000002G03 | Staphylococcus aureus |
| 1417 | S1M10000002G05 | Staphylococcus aureus |
| 1418 | S1M10000002G06 | Staphylococcus aureus |
| 1419 | S1M10000002G07 | Staphylococcus aureus |
| 1420 | S1M10000002G08 | Staphylococcus aureus |
| 1421 | S1M10000002G09 | Staphylococcus aureus |
| 1422 | S1M10000002G10 | Staphylococcus aureus |
| 1423 | S1M10000002G11 | Staphylococcus aureus |
| 1424 | S1M10000002G12 | Staphylococcus aureus |
| 1425 | S1M10000003A01 | Staphylococcus aureus |
| 1426 | S1M10000003A02 | Staphylococcus aureus |
| 1427 | S1M10000003A03 | Staphylococcus aureus |
| 1428 | S1M10000003A04 | Staphylococcus aureus |
| 1429 | S1M10000003A06 | Staphylococcus aureus |
| 1430 | S1M10000003A07 | Staphylococcus aureus |
| 1431 | S1M10000003A08 | Staphylococcus aureus |
| 1432 | S1M10000003A10 | Staphylococcus aureus |
| 1433 | S1M10000003A11 | Staphylococcus aureus |
| 1434 | S1M10000003B06 | Staphylococcus aureus |
| 1435 | S1M10000003B08 | Staphylococcus aureus |
| 1436 | S1M10000003B09 | Staphylococcus aureus |
| 1437 | S1M10000003B12 | Staphylococcus aureus |
| 1438 | S1M10000003C06 | Staphylococcus aureus |
| 1439 | S1M10000003C07 | Staphylococcus aureus |
| 1440 | S1M10000003C10 | Staphylococcus aureus |
| 1441 | S1M10000003C12 | Staphylococcus aureus |
| 1442 | S1M10000003D05 | Staphylococcus aureus |
| 1443 | S1M10000003D06 | Staphylococcus aureus |
| 1444 | S1M10000003D08 | Staphylococcus aureus |
| 1445 | S1M10000003D10 | Staphylococcus aureus |
| 1446 | S1M10000003E07 | Staphylococcus aureus |
| 1447 | S1M10000003E09 | Staphylococcus aureus |
| 1448 | S1M10000003E10 | Staphylococcus aureus |
| 1449 | S1M10000003E11 | Staphylococcus aureus |
| 1450 | S1M10000003F02 | Staphylococcus aureus |
| 1451 | S1M10000003F05 | Staphylococcus aureus |
| 1452 | S1M10000003F06 | Staphylococcus aureus |
| 1453 | S1M10000003F07 | Staphylococcus aureus |
| 1454 | S1M10000003F08 | Staphylococcus aureus |
| 1455 | S1M10000003F12 | Staphylococcus aureus |
| 1456 | S1M10000003G03 | Staphylococcus aureus |
| 1457 | S1M10000003G04 | Staphylococcus aureus |
| 1458 | S1M10000003G08 | Staphylococcus aureus |
| 1459 | S1M10000003G10 | Staphylococcus aureus |
| 1460 | S1M10000004A04 | Staphylococcus aureus |
| 1461 | S1M10000004A06 | Staphylococcus aureus |
| 1462 | S1M10000004A07 | Staphylococcus aureus |
| 1463 | S1M10000004A11 | Staphylococcus aureus |
| 1464 | S1M10000004A12 | Staphylococcus aureus |
| 1465 | S1M10000004B03 | Staphylococcus aureus |
| 1466 | S1M10000004B04 | Staphylococcus aureus |
| 1467 | S1M10000004B06 | Staphylococcus aureus |
| 1468 | S1M10000004B08 | Staphylococcus aureus |
| 1469 | S1M10000004B09 | Staphylococcus aureus |
| 1470 | S1M10000004B11 | Staphylococcus aureus |
| 1471 | S1M10000004C01 | Staphylococcus aureus |
| 1472 | S1M10000004C02 | Staphylococcus aureus |
| 1473 | S1M10000004C03 | Staphylococcus aureus |
| 1474 | S1M10000004C06 | Staphylococcus aureus |
| 1475 | S1M10000004C07 | Staphylococcus aureus |
| 1476 | S1M10000004C08 | Staphylococcus aureus |
| 1477 | S1M10000004C09 | Staphylococcus aureus |
| 1478 | S1M10000004C10 | Staphylococcus aureus |
| 1479 | S1M10000004C12 | Staphylococcus aureus |
| 1480 | S1M10000004D01 | Staphylococcus aureus |
| 1481 | S1M10000004D03 | Staphylococcus aureus |
| 1482 | S1M10000004D04 | Staphylococcus aureus |
| 1483 | S1M10000004D06 | Staphylococcus aureus |
| 1484 | S1M10000004D07 | Staphylococcus aureus |
| 1485 | S1M10000004D08 | Staphylococcus aureus |
| 1486 | S1M10000004D10 | Staphylococcus aureus |
| 1487 | S1M10000004D12 | Staphylococcus aureus |
| 1488 | S1M10000004E03 | Staphylococcus aureus |
| 1489 | S1M10000004E04 | Staphylococcus aureus |
| 1490 | S1M10000004E06 | Staphylococcus aureus |
| 1491 | S1M10000004E07 | Staphylococcus aureus |
| 1492 | S1M10000004E11 | Staphylococcus aureus |
| 1493 | S1M10000004E12 | Staphylococcus aureus |
| 1494 | S1M10000004F01 | Staphylococcus aureus |
| 1495 | S1M10000004F02 | Staphylococcus aureus |
| 1496 | S1M10000004F06 | Staphylococcus aureus |
| 1497 | S1M10000004F07 | Staphylococcus aureus |
| 1498 | S1M10000004F08 | Staphylococcus aureus |
| 1499 | S1M10000004F09 | Staphylococcus aureus |
| 1500 | S1M10000004F12 | Staphylococcus aureus |
| 1501 | S1M10000004G01 | Staphylococcus aureus |
| 1502 | S1M10000004G02 | Staphylococcus aureus |
| 1503 | S1M10000004G03 | Staphylococcus aureus |
| 1504 | S1M10000004G05 | Staphylococcus aureus |
| 1505 | S1M10000004G06 | Staphylococcus aureus |
| 1506 | S1M10000004G07 | Staphylococcus aureus |
| 1507 | S1M10000004G09 | Staphylococcus aureus |
| 1508 | S1M10000004G12 | Staphylococcus aureus |
| 1509 | S1M10000005A01 | Staphylococcus aureus |
| 1510 | S1M10000005A03 | Staphylococcus aureus |
| 1511 | S1M10000005A05 | Staphylococcus aureus |
| 1512 | S1M10000005A06 | Staphylococcus aureus |
| 1513 | S1M10000005A07 | Staphylococcus aureus |
| 1514 | S1M10000005A08 | Staphylococcus aureus |
| 1515 | S1M10000005A09 | Staphylococcus aureus |
| 1516 | S1M10000005A10 | Staphylococcus aureus |
| 1517 | S1M10000005A11 | Staphylococcus aureus |
| 1518 | S1M10000005B02 | Staphylococcus aureus |
| 1519 | S1M10000005B04 | Staphylococcus aureus |
| 1520 | S1M10000005B07 | Staphylococcus aureus |
| 1521 | S1M10000005B08 | Staphylococcus aureus |
| 1522 | S1M10000005B09 | Staphylococcus aureus |
| 1523 | S1M10000005B12 | Staphylococcus aureus |
| 1524 | S1M10000005C01 | Staphylococcus aureus |
| 1525 | S1M10000005C05 | Staphylococcus aureus |
| 1526 | S1M10000005C06 | Staphylococcus aureus |
| 1527 | S1M10000005C09 | Staphylococcus aureus |
| 1528 | S1M10000005C11 | Staphylococcus aureus |
| 1529 | S1M10000005D01 | Staphylococcus aureus |
| 1530 | S1M10000005D02 | Staphylococcus aureus |
| 1531 | S1M10000005D03 | Staphylococcus aureus |
| 1532 | S1M10000005D04 | Staphylococcus aureus |
| 1533 | S1M10000005D05 | Staphylococcus aureus |
| 1534 | S1M10000005D06 | Staphylococcus aureus |
| 1535 | S1M10000005D07 | Staphylococcus aureus |
| 1536 | S1M10000005D08 | Staphylococcus aureus |
| 1537 | S1M10000005D09 | Staphylococcus aureus |
| 1538 | S1M10000005D11 | Staphylococcus aureus |
| 1539 | S1M10000005D12 | Staphylococcus aureus |
| 1540 | S1M10000005E01 | Staphylococcus aureus |
| 1541 | S1M10000005E02 | Staphylococcus aureus |
| 1542 | S1M10000005E05 | Staphylococcus aureus |
| 1543 | S1M10000005E06 | Staphylococcus aureus |
| 1544 | S1M10000005E07 | Staphylococcus aureus |
| 1545 | S1M10000005E08 | Staphylococcus aureus |
| 1546 | S1M10000005E10 | Staphylococcus aureus |
| 1547 | S1M10000005E11 | Staphylococcus aureus |
| 1548 | S1M10000005E12 | Staphylococcus aureus |
| 1549 | S1M10000005F02 | Staphylococcus aureus |
| 1550 | S1M10000005F03 | Staphylococcus aureus |
| 1551 | S1M10000005F04 | Staphylococcus aureus |
| 1552 | S1M10000006A03 | Staphylococcus aureus |
| 1553 | S1M10000006A04 | Staphylococcus aureus |
| 1554 | S1M10000006A05 | Staphylococcus aureus |
| 1555 | S1M10000006A07 | Staphylococcus aureus |
| 1556 | S1M10000006A08 | Staphylococcus aureus |
| 1557 | S1M10000006A10 | Staphylococcus aureus |
| 1558 | S1M10000006A12 | Staphylococcus aureus |
| 1559 | S1M10000006B02 | Staphylococcus aureus |
| 1560 | S1M10000006B03 | Staphylococcus aureus |
| 1561 | S1M10000006B04 | Staphylococcus aureus |
| 1562 | S1M10000006B07 | Staphylococcus aureus |
| 1563 | S1M10000006B10 | Staphylococcus aureus |
| 1564 | S1M10000006B11 | Staphylococcus aureus |
| 1565 | S1M10000006C02 | Staphylococcus aureus |
| 1566 | S1M10000006C04 | Staphylococcus aureus |
| 1567 | S1M10000006C06 | Staphylococcus aureus |
| 1568 | S1M10000006C07 | Staphylococcus aureus |
| 1569 | S1M10000006C08 | Staphylococcus aureus |
| 1570 | S1M10000006C10 | Staphylococcus aureus |
| 1571 | S1M10000006D03 | Staphylococcus aureus |
| 1572 | S1M10000006D05 | Staphylococcus aureus |
| 1573 | S1M10000006D06 | Staphylococcus aureus |
| 1574 | S1M10000006D07 | Staphylococcus aureus |
| 1575 | S1M10000006D08 | Staphylococcus aureus |
| 1576 | S1M10000006E02 | Staphylococcus aureus |
| 1577 | S1M10000006E03 | Staphylococcus aureus |
| 1578 | S1M10000006E04 | Staphylococcus aureus |
| 1579 | S1M10000006E07 | Staphylococcus aureus |
| 1580 | S1M10000006E08 | Staphylococcus aureus |
| 1581 | S1M10000006F01 | Staphylococcus aureus |
| 1582 | S1M10000006F02 | Staphylococcus aureus |
| 1583 | S1M10000006F03 | Staphylococcus aureus |
| 1584 | S1M10000006F04 | Staphylococcus aureus |
| 1585 | S1M10000006F06 | Staphylococcus aureus |
| 1586 | S1M10000006G02 | Staphylococcus aureus |
| 1587 | S1M10000006G03 | Staphylococcus aureus |
| 1588 | S1M10000006G05 | Staphylococcus aureus |
| 1589 | S1M10000006G06 | Staphylococcus aureus |
| 1590 | S1M10000006G07 | Staphylococcus aureus |
| 1591 | S1M10000006G09 | Staphylococcus aureus |
| 1592 | S1M10000006G10 | Staphylococcus aureus |
| 1593 | S1M10000006G11 | Staphylococcus aureus |
| 1594 | S1M10000007A02 | Staphylococcus aureus |
| 1595 | S1M10000007A03 | Staphylococcus aureus |
| 1596 | S1M10000007B02 | Staphylococcus aureus |
| 1597 | S1M10000007B11 | Staphylococcus aureus |
| 1598 | S1M10000007C02 | Staphylococcus aureus |
| 1599 | S1M10000007C04 | Staphylococcus aureus |
| 1600 | S1M10000007C05 | Staphylococcus aureus |
| 1601 | S1M10000007CO6 | Staphylococcus aureus |
| 1602 | S1M10000007C07 | Staphylococcus aureus |
| 1603 | S1M10000007C08 | Staphylococcus aureus |
| 1604 | S1M10000007C09 | Staphylococcus aureus |
| 1605 | S1M10000007D03 | Staphylococcus aureus |
| 1606 | S1M10000007D06 | Staphylococcus aureus |
| 1607 | S1M10000007D08 | Staphylococcus aureus |
| 1608 | S1M10000007D10 | Staphylococcus aureus |
| 1609 | S1M10000007D11 | Staphylococcus aureus |
| 1610 | S1M10000007E04 | Staphylococcus aureus |
| 1611 | S1M10000007E06 | Staphylococcus aureus |
| 1612 | S1M10000007E07 | Staphylococcus aureus |
| 1613 | S1M10000007F01 | Staphylococcus aureus |
| 1614 | S1M10000007F02 | Staphylococcus aureus |
| 1615 | S1M10000007F04 | Staphylococcus aureus |
| 1616 | S1M10000007F08 | Staphylococcus aureus |
| 1617 | S1M10000007F09 | Staphylococcus aureus |
| 1618 | S1M10000007F10 | Staphylococcus aureus |
| 1619 | S1M10000007F11 | Staphylococcus aureus |
| 1620 | S1M10000007F12 | Staphylococcus aureus |
| 1621 | S1M10000007G02 | Staphylococcus aureus |
| 1622 | S1M10000007G03 | Staphylococcus aureus |
| 1623 | S1M10000007G05 | Staphylococcus aureus |
| 1624 | S1M10000007G07 | Staphylococcus aureus |
| 1625 | S1M10000007G08 | Staphylococcus aureus |
| 1626 | S1M10000008A03 | Staphylococcus aureus |
| 1627 | S1M10000008A04 | Staphylococcus aureus |
| 1628 | S1M10000008A05 | Staphylococcus aureus |
| 1629 | S1M10000008A08 | Staphylococcus aureus |
| 1630 | S1M10000008A09 | Staphylococcus aureus |
| 1631 | S1M10000008A12 | Staphylococcus aureus |
| 1632 | S1M10000008B03 | Staphylococcus aureus |
| 1633 | S1M10000008B04 | Staphylococcus aureus |
| 1634 | S1M10000008B06 | Staphylococcus aureus |
| 1635 | S1M10000008B08 | Staphylococcus aureus |
| 1636 | S1M10000008B09 | Staphylococcus aureus |
| 1637 | S1M10000008B10 | Staphylococcus aureus |
| 1638 | S1M10000008C05 | Staphylococcus aureus |
| 1639 | S1M10000008C06 | Staphylococcus aureus |
| 1640 | S1M10000008C07 | Staphylococcus aureus |
| 1641 | S1M10000008C08 | Staphylococcus aureus |
| 1642 | S1M10000008C09 | Staphylococcus aureus |
| 1643 | S1M10000008D05 | Staphylococcus aureus |
| 1644 | S1M10000008D09 | Staphylococcus aureus |
| 1645 | S1M10000008E05 | Staphylococcus aureus |
| 1646 | S1M10000008E08 | Staphylococcus aureus |
| 1647 | S1M10000008E09 | Staphylococcus aureus |
| 1648 | S1M10000008E10 | Staphylococcus aureus |
| 1649 | S1M10000008F01 | Staphylococcus aureus |
| 1650 | S1M10000008F02 | Staphylococcus aureus |
| 1651 | S1M10000008F03 | Staphylococcus aureus |
| 1652 | S1M10000008F06 | Staphylococcus aureus |
| 1653 | S1M10000008F08 | Staphylococcus aureus |
| 1654 | S1M10000008F09 | Staphylococcus aureus |
| 1655 | S1M10000008F10 | Staphylococcus aureus |
| 1656 | S1M10000008F11 | Staphylococcus aureus |
| 1657 | S1M10000008G02 | Staphylococcus aureus |
| 1658 | S1M10000008G03 | Staphylococcus aureus |
| 1659 | S1M10000008G05 | Staphylococcus aureus |
| 1660 | S1M10000009A02 | Staphylococcus aureus |
| 1661 | S1M10000009A04 | Staphylococcus aureus |
| 1662 | S1M10000009A07 | Staphylococcus aureus |
| 1663 | S1M10000009A08 | Staphylococcus aureus |
| 1664 | S1M10000009A09 | Staphylococcus aureus |
| 1665 | S1M10000009A10 | Staphylococcus aureus |
| 1666 | S1M10000009A11 | Staphylococcus aureus |
| 1667 | S1M10000009B01 | Staphylococcus aureus |
| 1668 | S1M10000009B02 | Staphylococcus aureus |
| 1669 | S1M10000009B03 | Staphylococcus aureus |
| 1670 | S1M10000009B04 | Staphylococcus aureus |
| 1671 | S1M10000009B05 | Staphylococcus aureus |
| 1672 | S1M10000009B06 | Staphylococcus aureus |
| 1673 | S1M10000009B07 | Staphylococcus aureus |
| 1674 | S1M10000009B10 | Staphylococcus aureus |
| 1675 | S1M10000009B11 | Staphylococcus aureus |
| 1676 | S1M10000009B12 | Staphylococcus aureus |
| 1677 | S1M10000009C01 | Staphylococcus aureus |
| 1678 | S1M10000009C02 | Staphylococcus aureus |
| 1679 | S1M10000009C05 | Staphylococcus aureus |
| 1680 | S1M10000009C06 | Staphylococcus aureus |
| 1681 | S1M10000009C07 | Staphylococcus aureus |
| 1682 | S1M10000009C08 | Staphylococcus aureus |
| 1683 | S1M10000009C09 | Staphylococcus aureus |
| 1684 | S1M10000009C10 | Staphylococcus aureus |
| 1685 | S1M10000009C11 | Staphylococcus aureus |
| 1686 | S1M10000009D01 | Staphylococcus aureus |
| 1687 | S1M10000009D02 | Staphylococcus aureus |
| 1688 | S1M10000009D03 | Staphylococcus aureus |
| 1689 | S1M10000009D04 | Staphylococcus aureus |
| 1690 | S1M10000009D05 | Staphylococcus aureus |
| 1691 | S1M10000009D07 | Staphylococcus aureus |
| 1692 | S1M10000009D09 | Staphylococcus aureus |
| 1693 | S1M10000009D11 | Staphylococcus aureus |
| 1694 | S1M10000009E02 | Staphylococcus aureus |
| 1695 | S1M10000009E06 | Staphylococcus aureus |
| 1696 | S1M10000009E08 | Staphylococcus aureus |
| 1697 | S1M10000009B09 | Staphylococcus aureus |
| 1698 | S1M10000009E11 | Staphylococcus aureus |
| 1699 | S1M10000009E12 | Staphylococcus aureus |
| 1700 | S1M10000009F01 | Staphylococcus aureus |
| 1701 | S1M10000009F02 | Staphylococcus aureus |
| 1702 | S1M10000009F03 | Staphylococcus aureus |
| 1703 | S1M10000009F05 | Staphylococcus aureus |
| 1704 | S1M10000009F06 | Staphylococcus aureus |
| 1705 | S1M10000009F07 | Staphylococcus aureus |
| 1706 | S1M10000009F09 | Staphylococcus aureus |
| 1707 | S1M10000009F10 | Staphylococcus aureus |
| 1708 | S1M10000009G02 | Staphylococcus aureus |
| 1709 | S1M10000009G03 | Staphylococcus aureus |
| 1710 | S1M10000009G05 | Staphylococcus aureus |
| 1711 | S1M10000009G06 | Staphylococcus aureus |
| 1712 | S1M10000009G07 | Staphylococcus aureus |
| 1713 | S1M10000009G09 | Staphylococcus aureus |
| 1714 | S1M10000009G10 | Staphylococcus aureus |
| 1715 | S1M10000009G11 | Staphylococcus aureus |
| 1716 | S1M10000009H01 | Staphylococcus aureus |
| 1717 | S1M10000009H02 | Staphylococcus aureus |
| 1718 | S1M10000009H03 | Staphylococcus aureus |
| 1719 | S1M10000009H05 | Staphylococcus aureus |
| 1720 | S1M10000009H07 | Staphylococcus aureus |
| 1721 | S1M10000009H09 | Staphylococcus aureus |
| 1722 | S1M10000009H11 | Staphylococcus aureus |
| 1723 | S1M10000011A02 | Staphylococcus aureus |
| 1724 | S1M10000011A03 | Staphylococcus aureus |
| 1725 | S1M10000011A04 | Staphylococcus aureus |
| 1726 | S1M10000011A06 | Staphylococcus aureus |
| 1727 | S1M10000011B01 | Staphylococcus aureus |
| 1728 | S1M10000011B02 | Staphylococcus aureus |
| 1729 | S1M10000011B03 | Staphylococcus aureus |
| 1730 | S1M10000011B04 | Staphylococcus aureus |
| 1731 | S1M10000011B05 | Staphylococcus aureus |
| 1732 | S1M10000011C01 | Staphylococcus aureus |
| 1733 | S1M10000011C05 | Staphylococcus aureus |
| 1734 | S1M10000011C06 | Staphylococcus aureus |
| 1735 | S1M10000011D01 | Staphylococcus aureus |
| 1736 | S1M10000011D02 | Staphylococcus aureus |
| 1737 | S1M10000011D04 | Staphylococcus aureus |
| 1738 | S1M10000011D06 | Staphylococcus aureus |
| 1739 | S1M10000011E02 | Staphylococcus aureus |
| 1740 | S1M10000011E03 | Staphylococcus aureus |
| 1741 | S1M10000011E04 | Staphylococcus aureus |
| 1742 | S1M10000011F01 | Staphylococcus aureus |
| 1743 | S1M10000011F03 | Staphylococcus aureus |
| 1744 | S1M10000011F04 | Staphylococcus aureus |
| 1745 | S1M10000011F06 | Staphylococcus aureus |
| 1746 | S1M10000011G01 | Staphylococcus aureus |
| 1747 | S1M10000011G03 | Staphylococcus aureus |
| 1748 | S1M10000011G04 | Staphylococcus aureus |
| 1749 | S1M10000011G05 | Staphylococcus aureus |
| 1750 | S1M10000011G06 | Staphylococcus aureus |
| 1751 | S1M10000011H01 | Staphylococcus aureus |
| 1752 | S1M10000011H03 | Staphylococcus aureus |
| 1753 | S1M10000011H04 | Staphylococcus aureus |
| 1754 | S1M10000012A02 | Staphylococcus aureus |
| 1755 | S1M10000012A06 | Staphylococcus aureus |
| 1756 | S1M10000012A08 | Staphylococcus aureus |
| 1757 | S1M10000012A09 | Staphylococcus aureus |
| 1758 | S1M10000012A10 | Staphylococcus aureus |
| 1759 | S1M10000012A11 | Staphylococcus aureus |
| 1760 | S1M10000012B01 | Staphylococcus aureus |
| 1761 | S1M10000012B05 | Staphylococcus aureus |
| 1762 | S1M10000012B06 | Staphylococcus aureus |
| 1763 | S1M10000012B07 | Staphylococcus aureus |
| 1764 | S1M10000012B11 | Staphylococcus aureus |
| 1765 | S1M10000012C01 | Staphylococcus aureus |
| 1766 | S1M10000012C03 | Staphylococcus aureus |
| 1767 | S1M10000012C04 | Staphylococcus aureus |
| 1768 | S1M10000012C05 | Staphylococcus aureus |
| 1769 | S1M10000012C06 | Staphylococcus aureus |
| 1770 | S1M10000012C11 | Staphylococcus aureus |
| 1771 | S1M10000012C12 | Staphylococcus aureus |
| 1772 | S1M10000012D04 | Staphylococcus aureus |
| 1773 | S1M10000012D06 | Staphylococcus aureus |
| 1774 | S1M10000012D07 | Staphylococcus aureus |
| 1775 | S1M10000012D08 | Staphylococcus aureus |
| 1776 | S1M10000012D09 | Staphylococcus aureus |
| 1777 | S1M10000012D12 | Staphylococcus aureus |
| 1778 | S1M10000012E01 | Staphylococcus aureus |
| 1779 | S1M10000012E02 | Staphylococcus aureus |
| 1780 | S1M10000012E04 | Staphylococcus aureus |
| 1781 | S1M10000012E07 | Staphylococcus aureus |
| 1782 | S1M10000012E08 | Staphylococcus aureus |
| 1783 | S1M10000012E12 | Staphylococcus aureus |
| 1784 | S1M10000012F04 | Staphylococcus aureus |
| 1785 | S1M10000012F07 | Staphylococcus aureus |
| 1786 | S1M10000012F08 | Staphylococcus aureus |
| 1787 | S1M10000012F09 | Staphylococcus aureus |
| 1788 | S1M10000012F10 | Staphylococcus aureus |
| 1789 | S1M10000012F11 | Staphylococcus aureus |
| 1790 | S1M10000012F12 | Staphylococcus aureus |
| 1791 | S1M10000012G01 | Staphylococcus aureus |
| 1792 | S1M10000012G02 | Staphylococcus aureus |
| 1793 | S1M10000012G03 | Staphylococcus aureus |
| 1794 | S1M10000012G06 | Staphylococcus aureus |
| 1795 | S1M10000012G07 | Staphylococcus aureus |
| 1796 | S1M10000012G08 | Staphylococcus aureus |
| 1797 | S1M10000012G10 | Staphylococcus aureus |
| 1798 | S1M10000012H05 | Staphylococcus aureus |
| 1799 | S1M10000012H08 | Staphylococcus aureus |
| 1800 | S1M10000012H09 | Staphylococcus aureus |
| 1801 | S1M10000012H10 | Staphylococcus aureus |
| 1802 | S1M10000012H11 | Staphylococcus aureus |
| 1803 | S1M10000013A02 | Staphylococcus aureus |
| 1804 | S1M10000013A03 | Staphylococcus aureus |
| 1805 | S1M10000013A05 | Staphylococcus aureus |
| 1806 | S1M10000013A07 | Staphylococcus aureus |
| 1807 | S1M10000013A08 | Staphylococcus aureus |
| 1808 | S1M10000013A09 | Staphylococcus aureus |
| 1809 | S1M10000013A10 | Staphylococcus aureus |
| 1810 | S1M10000013A11 | Staphylococcus aureus |
| 1811 | S1M10000013A12 | Staphylococcus aureus |
| 1812 | S1M10000013B02 | Staphylococcus aureus |
| 1813 | S1M10000013B03 | Staphylococcus aureus |
| 1814 | S1M10000013B04 | Staphylococcus aureus |
| 1815 | S1M10000013B05 | Staphylococcus aureus |
| 1816 | S1M10000013B06 | Staphylococcus aureus |
| 1817 | S1M10000013B07 | Staphylococcus aureus |
| 1818 | S1M10000013B09 | Staphylococcus aureus |
| 1819 | S1M10000013B11 | Staphylococcus aureus |
| 1820 | S1M10000013C03 | Staphylococcus aureus |
| 1821 | S1M10000013C05 | Staphylococcus aureus |
| 1822 | S1M10000013C07 | Staphylococcus aureus |
| 1823 | S1M10000013C08 | Staphylococcus aureus |
| 1824 | S1M10000013C09 | Staphylococcus aureus |
| 1825 | S1M10000013C10 | Staphylococcus aureus |
| 1826 | S1M10000013C11 | Staphylococcus aureus |
| 1827 | S1M10000013C12 | Staphylococcus aureus |
| 1828 | S1M10000013D08 | Staphylococcus aureus |
| 1829 | S1M10000013D09 | Staphylococcus aureus |
| 1830 | S1M10000013D11 | Staphylococcus aureus |
| 1831 | S1M10000013E01 | Staphylococcus aureus |
| 1832 | S1M10000013E02 | Staphylococcus aureus |
| 1833 | S1M10000013E04 | Staphylococcus aureus |
| 1834 | S1M10000013E06 | Staphylococcus aureus |
| 1835 | S1M10000013E08 | Staphylococcus aureus |
| 1836 | S1M10000013E09 | Staphylococcus aureus |
| 1837 | S1M10000013E10 | Staphylococcus aureus |
| 1838 | S1M10000013F02 | Staphylococcus aureus |
| 1839 | S1M10000013F03 | Staphylococcus aureus |
| 1840 | S1M10000013F06 | Staphylococcus aureus |
| 1841 | S1M10000013F07 | Staphylococcus aureus |
| 1842 | S1M10000013F08 | Staphylococcus aureus |
| 1843 | S1M10000013F09 | Staphylococcus aureus |
| 1844 | S1M10000013F12 | Staphylococcus aureus |
| 1845 | S1M10000013G01 | Staphylococcus aureus |
| 1846 | S1M10000013G04 | Staphylococcus aureus |
| 1847 | S1M10000013G05 | Staphylococcus aureus |
| 1848 | S1M10000013G06 | Staphylococcus aureus |
| 1849 | S1M10000013G07 | Staphylococcus aureus |
| 1850 | S1M10000013G10 | Staphylococcus aureus |
| 1851 | S1M10000013G11 | Staphylococcus aureus |
| 1852 | S1M10000013G12 | Staphylococcus aureus |
| 1853 | S1M10000013H03 | Staphylococcus aureus |
| 1854 | S1M10000013H04 | Staphylococcus aureus |
| 1855 | S1M10000013H05 | Staphylococcus aureus |
| 1856 | S1M10000013H07 | Staphylococcus aureus |
| 1857 | S1M10000013H09 | Staphylococcus aureus |
| 1858 | S1M10000013H10 | Staphylococcus aureus |
| 1859 | S1M10000013H11 | Staphylococcus aureus |
| 1860 | S1M10000014A02 | Staphylococcus aureus |
| 1861 | S1M10000014A03 | Staphylococcus aureus |
| 1862 | S1M10000014A05 | Staphylococcus aureus |
| 1863 | S1M10000014A07 | Staphylococcus aureus |
| 1864 | S1M10000014A08 | Staphylococcus aureus |
| 1865 | S1M10000014A11 | Staphylococcus aureus |
| 1866 | S1M10000014A12 | Staphylococcus aureus |
| 1867 | S1M10000014B01 | Staphylococcus aureus |
| 1868 | S1M10000014B02 | Staphylococcus aureus |
| 1869 | S1M10000014B03 | Staphylococcus aureus |
| 1870 | S1M10000014B04 | Staphylococcus aureus |
| 1871 | S1M10000014B05 | Staphylococcus aureus |
| 1872 | S1M10000014B06 | Staphylococcus aureus |
| 1873 | S1M10000014B07 | Staphylococcus aureus |
| 1874 | S1M10000014B08 | Staphylococcus aureus |
| 1875 | S1M10000014B10 | Staphylococcus aureus |
| 1876 | S1M10000014B11 | Staphylococcus aureus |
| 1877 | S1M10000014B12 | Staphylococcus aureus |
| 1878 | S1M10000014C01 | Staphylococcus aureus |
| 1879 | S1M10000014C05 | Staphylococcus aureus |
| 1880 | S1M10000014C06 | Staphylococcus aureus |
| 1881 | S1M10000014C07 | Staphylococcus aureus |
| 1882 | S1M10000014C09 | Staphylococcus aureus |
| 1883 | S1M10000014C10 | Staphylococcus aureus |
| 1884 | S1M10000014C11 | Staphylococcus aureus |
| 1885 | S1M10000014C12 | Staphylococcus aureus |
| 1886 | S1M10000014D03 | Staphylococcus aureus |
| 1887 | S1M10000014D06 | Staphylococcus aureus |
| 1888 | S1M10000014D08 | Staphylococcus aureus |
| 1889 | S1M10000014D09 | Staphylococcus aureus |
| 1890 | S1M10000014D10 | Staphylococcus aureus |
| 1891 | S1M10000014E01 | Staphylococcus aureus |
| 1892 | S1M10000014E04 | Staphylococcus aureus |
| 1893 | S1M10000014E05 | Staphylococcus aureus |
| 1894 | S1M10000014E07 | Staphylococcus aureus |
| 1895 | S1M10000014E08 | Staphylococcus aureus |
| 1896 | S1M10000014E09 | Staphylococcus aureus |
| 1897 | S1M10000014E10 | Staphylococcus aureus |
| 1898 | S1M10000014E12 | Staphylococcus aureus |
| 1899 | S1M10000014F02 | Staphylococcus aureus |
| 1900 | S1M10000014F03 | Staphylococcus aureus |
| 1901 | S1M10000014F04 | Staphylococcus aureus |
| 1902 | S1M10000014F05 | Staphylococcus aureus |
| 1903 | S1M10000014F08 | Staphylococcus aureus |
| 1904 | S1M10000014F09 | Staphylococcus aureus |
| 1905 | S1M10000014F10 | Staphylococcus aureus |
| 1906 | S1M10000014G02 | Staphylococcus aureus |
| 1907 | S1M10000014G04 | Staphylococcus aureus |
| 1908 | S1M10000014G06 | Staphylococcus aureus |
| 1909 | S1M10000014G07 | Staphylococcus aureus |
| 1910 | S1M10000014G08 | Staphylococcus aureus |
| 1911 | S1M10000014G12 | Staphylococcus aureus |
| 1912 | S1M10000014H02 | Staphylococcus aureus |
| 1913 | S1M10000014H03 | Staphylococcus aureus |
| 1914 | S1M10000014H04 | Staphylococcus aureus |
| 1915 | S1M10000014H05 | Staphylococcus aureus |
| 1916 | S1M10000014H06 | Staphylococcus aureus |
| 1917 | S1M10000014H07 | Staphylococcus aureus |
| 1918 | S1M10000014HO8 | Staphylococcus aureus |
| 1919 | S1M10000014H11 | Staphylococcus aureus |
| 1920 | S1M10000015A02 | Staphylococcus aureus |
| 1921 | S1M10000015A03 | Staphylococcus aureus |
| 1922 | S1M10000015A05 | Staphylococcus aureus |
| 1923 | S1M10000015A06 | Staphylococcus aureus |
| 1924 | S1M10000015A09 | Staphylococcus aureus |
| 1925 | S1M10000015A10 | Staphylococcus aureus |
| 1926 | S1M10000015A11 | Staphylococcus aureus |
| 1927 | S1M10000015A12 | Staphylococcus aureus |
| 1928 | S1M10000015B02 | Staphylococcus aureus |
| 1929 | S1M10000015B05 | Staphylococcus aureus |
| 1930 | S1M10000015B08 | Staphylococcus aureus |
| 1931 | S1M10000015B09 | Staphylococcus aureus |
| 1932 | S1M10000015B10 | Staphylococcus aureus |
| 1933 | S1M10000015C01 | Staphylococcus aureus |
| 1934 | S1M10000015C02 | Staphylococcus aureus |
| 1935 | S1M10000015C03 | Staphylococcus aureus |
| 1936 | S1M10000015C05 | Staphylococcus aureus |
| 1937 | S1M10000015C06 | Staphylococcus aureus |
| 1938 | S1M10000015C08 | Staphylococcus aureus |
| 1939 | S1M10000015C10 | Staphylococcus aureus |
| 1940 | S1M10000015C12 | Staphylococcus aureus |
| 1941 | S1M10000015D02 | Staphylococcus aureus |
| 1942 | S1M10000015D03 | Staphylococcus aureus |
| 1943 | S1M10000015D04 | Staphylococcus aureus |
| 1944 | S1M10000015D05 | Staphylococcus aureus |
| 1945 | S1M10000015D06 | Staphylococcus aureus |
| 1946 | S1M10000015D12 | Staphylococcus aureus |
| 1947 | S1M10000015E02 | Staphylococcus aureus |
| 1948 | S1M10000015E03 | Staphylococcus aureus |
| 1949 | S1M10000015E06 | Staphylococcus aureus |
| 1950 | S1M10000015E07 | Staphylococcus aureus |
| 1951 | S1M10000015E09 | Staphylococcus aureus |
| 1952 | S1M10000015E10 | Staphylococcus aureus |
| 1953 | S1M10000015E11 | Staphylococcus aureus |
| 1954 | S1M10000015E12 | Staphylococcus aureus |
| 1955 | S1M10000015F01 | Staphylococcus aureus |
| 1956 | S1M10000015F02 | Staphylococcus aureus |
| 1957 | S1M10000015F03 | Staphylococcus aureus |
| 1958 | SIM10000015F04 | Staphylococcus aureus |
| 1959 | S1M10000015F06 | Staphylococcus aureus |
| 1960 | S1M10000015F07 | Staphylococcus aureus |
| 1961 | S1M10000015F08 | Staphylococcus aureus |
| 1962 | S1M10000015F09 | Staphylococcus aureus |
| 1963 | S1M10000015F10 | Staphylococcus aureus |
| 1964 | S1M10000015G01 | Staphylococcus aureus |
| 1965 | S1M10000015G02 | Staphylococcus aureus |
| 1966 | S1M10000015G03 | Staphylococcus aureus |
| 1967 | S1M10000015G04 | Staphylococcus aureus |
| 1968 | S1M10000015G05 | Staphylococcus aureus |
| 1969 | S1M10000015G06 | Staphylococcus aureus |
| 1970 | S1M10000015G07 | Staphylococcus aureus |
| 1971 | S1M10000015G08 | Staphylococcus aureus |
| 1972 | SIM10000015G09 | Staphylococcus aureus |
| 1973 | S1M10000015G10 | Staphylococcus aureus |
| 1974 | S1M10000015G11 | Staphylococcus aureus |
| 1975 | S1M10000015H04 | Staphylococcus aureus |
| 1976 | S1M10000015H06 | Staphylococcus aureus |
| 1977 | S1M10000016A03 | Staphylococcus aureus |
| 1978 | S1M10000016A04 | Staphylococcus aureus |
| 1979 | S1M10000016A06 | Staphylococcus aureus |
| 1980 | S1M10000016A07 | Staphylococcus aureus |
| 1981 | S1M10000016A09 | Staphylococcus aureus |
| 1982 | S1M10000016A10 | Staphylococcus aureus |
| 1983 | S1M10000016A12 | Staphylococcus aureus |
| 1984 | S1M10000016B02 | Staphylococcus aureus |
| 1985 | S1M10000016B05 | Staphylococcus aureus |
| 1986 | S1M10000016B06 | Staphylococcus aureus |
| 1987 | S1M10000016B07 | Staphylococcus aureus |
| 1988 | S1M10000016B08 | Staphylococcus aureus |
| 1989 | S1M10000016B09 | Staphylococcus aureus |
| 1990 | S1M10000016B10 | Staphylococcus aureus |
| 1991 | S1M10000016B11 | Staphylococcus aureus |
| 1992 | S1M10000016B12 | Staphylococcus aureus |
| 1993 | S1M10000016C01 | Staphylococcus aureus |
| 1994 | S1M10000016C02 | Staphylococcus aureus |
| 1995 | S1M10000016C04 | Staphylococcus aureus |
| 1996 | S1M10000016C05 | Staphylococcus aureus |
| 1997 | S1M10000016C06 | Staphylococcus aureus |
| 1998 | S1M10000016C08 | Staphylococcus aureus |
| 1999 | S1M10000016C09 | Staphylococcus aureus |
| 2000 | S1M10000016C10 | Staphylococcus aureus |
| 2001 | S1M10000016C11 | Staphylococcus aureus |
| 2002 | S1M10000016C12 | Staphylococcus aureus |
| 2003 | S1M10000016D01 | Staphylococcus aureus |
| 2004 | S1M10000016D02 | Staphylococcus aureus |
| 2005 | S1M10000016D04 | Staphylococcus aureus |
| 2006 | S1M10000016D05 | Staphylococcus aureus |
| 2007 | S1M10000016D06 | Staphylococcus aureus |
| 2008 | S1M10000016D08 | Staphylococcus aureus |
| 2009 | S1M10000016D09 | Staphylococcus aureus |
| 2010 | S1M10000016D10 | Staphylococcus aureus |
| 2011 | S1M10000016D11 | Staphylococcus aureus |
| 2012 | S1M10000016E04 | Staphylococcus aureus |
| 2013 | S1M10000016E05 | Staphylococcus aureus |
| 2014 | S1M10000016E06 | Staphylococcus aureus |
| 2015 | S1M10000016E07 | Staphylococcus aureus |
| 2016 | S1M10000016E08 | Staphylococcus aureus |
| 2017 | S1M10000016E09 | Staphylococcus aureus |
| 2018 | S1M10000016E10 | Staphylococcus aureus |
| 2019 | S1M10000016E11 | Staphylococcus aureus |
| 2020 | S1M10000016E12 | Staphylococcus aureus |
| 2021 | S1M10000016F02 | Staphylococcus aureus |
| 2022 | S1M10000016F03 | Staphylococcus aureus |
| 2023 | S1M10000016F05 | Staphylococcus aureus |
| 2024 | S1M10000016F06 | Staphylococcus aureus |
| 2025 | S1M10000016F08 | Staphylococcus aureus |
| 2026 | S1M10000016F09 | Staphylococcus aureus |
| 2027 | S1M10000016F11 | Staphylococcus aureus |
| 2028 | S1M10000016G01 | Staphylococcus aureus |
| 2029 | S1M10000016G03 | Staphylococcus aureus |
| 2030 | S1M10000016G04 | Staphylococcus aureus |
| 2031 | S1M10000016G05 | Staphylococcus aureus |
| 2032 | S1M10000016H03 | Staphylococcus aureus |
| 2033 | S1M10000016H04 | Staphylococcus aureus |
| 2034 | S1M10000016H08 | Staphylococcus aureus |
| 2035 | S1M10000016H10 | Staphylococcus aureus |
| 2036 | S1M10000017A02 | Staphylococcus aureus |
| 2037 | S1M10000017A03 | Staphylococcus aureus |
| 2038 | S1M10000017A04 | Staphylococcus aureus |
| 2039 | S1M10000017A08 | Staphylococcus aureus |
| 2040 | S1M1OOOOO17A11 | Staphylococcus aureus |
| 2041 | S1M10000017A12 | Staphylococcus aureus |
| 2042 | S1M10000017B02 | Staphylococcus aureus |
| 2043 | S1M10000017B05 | Staphylococcus aureus |
| 2044 | S1M10000017B07 | Staphylococcus aureus |
| 2045 | S1M10000017B08 | Staphylococcus aureus |
| 2046 | S1M10000017B09 | Staphylococcus aureus |
| 2047 | S1M10000017B10 | Staphylococcus aureus |
| 2048 | S1M10000017B11 | Staphylococcus aureus |
| 2049 | S1M10000017B12 | Staphylococcus aureus |
| 2050 | S1M10000017C01 | Staphylococcus aureus |
| 2051 | S1M10000017C03 | Staphylococcus aureus |
| 2052 | S1M10000017C05 | Staphylococcus aureus |
| 2053 | S1M10000017C08 | Staphylococcus aureus |
| 2054 | S1M10000017C09 | Staphylococcus aureus |
| 2055 | S1M10000017C10 | Staphylococcus aureus |
| 2056 | S1M10000017C11 | Staphylococcus aureus |
| 2057 | S1M10000017C12 | Staphylococcus aureus |
| 2058 | S1M10000017D03 | Staphylococcus aureus |
| 2059 | S1M10000017D09 | Staphylococcus aureus |
| 2060 | S1M10000017D10 | Staphylococcus aureus |
| 2061 | S1M10000017E04 | Staphylococcus aureus |
| 2062 | S1M10000017E05 | Staphylococcus aureus |
| 2063 | S1M10000017E08 | Staphylococcus aureus |
| 2064 | S1M10000017E11 | Staphylococcus aureus |
| 2065 | S1M10000017F01 | Staphylococcus aureus |
| 2066 | S1M10000017FO4 | Staphylococcus aureus |
| 2067 | S1M10000017F05 | Staphylococcus aureus |
| 2068 | S1M10000017F06 | Staphylococcus aureus |
| 2069 | S1M10000017F11 | Staphylococcus aureus |
| 2070 | S1M10000017G02 | Staphylococcus aureus |
| 2071 | S1M10000017G05 | Staphylococcus aureus |
| 2072 | S1M10000017G06 | Staphylococcus aureus |
| 2073 | S1M10000018A03 | Staphylococcus aureus |
| 2074 | S1M10000018A04 | Staphylococcus aureus |
| 2075 | S1M10000018A05 | Staphylococcus aureus |
| 2076 | S1M10000018A06 | Staphylococcus aureus |
| 2077 | S1M10000018A08 | Staphylococcus aureus |
| 2078 | S1M10000018A09 | Staphylococcus aureus |
| 2079 | S1M10000018A10 | Staphylococcus aureus |
| 2080 | S1M10000018A11 | Staphylococcus aureus |
| 2081 | S1M10000018B02 | Staphylococcus aureus |
| 2082 | S1M10000018BO3 | Staphylococcus aureus |
| 2083 | S1M10000018B05 | Staphylococcus aureus |
| 2084 | S1M10000018B09 | Staphylococcus aureus |
| 2085 | S1M10000018B10 | Staphylococcus aureus |
| 2086 | S1M10000018B11 | Staphylococcus aureus |
| 2087 | S1M10000018C01 | Staphylococcus aureus |
| 2088 | S1M10000018C02 | Staphylococcus aureus |
| 2089 | S1M10000018C03 | Staphylococcus aureus |
| 2090 | S1M10000018C04 | Staphylococcus aureus |
| 2091 | S1M10000018C05 | Staphylococcus aureus |
| 2092 | S1M10000018C06 | Staphylococcus aureus |
| 2093 | S1M10000018C08 | Staphylococcus aureus |
| 2094 | S1M10000018C09 | Staphylococcus aureus |
| 2095 | S1M10000018C10 | Staphylococcus aureus |
| 2096 | S1M10000018C11 | Staphylococcus aureus |
| 2097 | S1M10000018C12 | Staphylococcus aureus |
| 2098 | S1M10000018D01 | Staphylococcus aureus |
| 2099 | S1M10000018D02 | Staphylococcus aureus |
| 2100 | S1M10000018D03 | Staphylococcus aureus |
| 2101 | S1M10000018D04 | Staphylococcus aureus |
| 2102 | S1M10000018D09 | Staphylococcus aureus |
| 2103 | S1M10000018D10 | Staphylococcus aureus |
| 2104 | S1M10000018D11 | Staphylococcus aureus |
| 2105 | S1M10000018D12 | Staphylococcus aureus |
| 2106 | S1M10000018E01 | Staphylococcus aureus |
| 2107 | S1M10000018E02 | Staphylococcus aureus |
| 2108 | S1M10000018E03 | Staphylococcus aureus |
| 2109 | S1M10000018E04 | Staphylococcus aureus |
| 2110 | S1M10000018E05 | Staphylococcus aureus |
| 2111 | S1M10000018E08 | Staphylococcus aureus |
| 2112 | S1M10000018E09 | Staphylococcus aureus |
| 2113 | S1M10000018E11 | Staphylococcus aureus |
| 2114 | S1M10000018E12 | Staphylococcus aureus |
| 2115 | S1M10000018F03 | Staphylococcus aureus |
| 2116 | S1M10000018F04 | Staphylococcus aureus |
| 2117 | S1M10000018F07 | Staphylococcus aureus |
| 2118 | S1M10000018F09 | Staphylococcus aureus |
| 2119 | SIM10000018F10 | Staphylococcus aureus |
| 2120 | S1M10000018F12 | Staphylococcus aureus |
| 2121 | S1M10000018G03 | Staphylococcus aureus |
| 2122 | S1M10000018G05 | Staphylococcus aureus |
| 2123 | S1M10000018G07 | Staphylococcus aureus |
| 2124 | S1M10000018G08 | Staphylococcus aureus |
| 2125 | S1M10000018G09 | Staphylococcus aureus |
| 2126 | S1M10000018G10 | Staphylococcus aureus |
| 2127 | S1M10000018G12 | Staphylococcus aureus |
| 2128 | S1M10000018H01 | Staphylococcus aureus |
| 2129 | S1M10000018H02 | Staphylococcus aureus |
| 2130 | S1M10000018H07 | Staphylococcus aureus |
| 2131 | S1M10000018H09 | Staphylococcus aureus |
| 2132 | S1M10000018H10 | Staphylococcus aureus |
| 2133 | S1M10000019A02 | Staphylococcus aureus |
| 2134 | S1M10000019A03 | Staphylococcus aureus |
| 2135 | S1M10000019A05 | Staphylococcus aureus |
| 2136 | S1M10000019A06 | Staphylococcus aureus |
| 2137 | S1M10000019A07 | Staphylococcus aureus |
| 2138 | S1M10000019A09 | Staphylococcus aureus |
| 2139 | S1M10000019A11 | Staphylococcus aureus |
| 2140 | S1M10000019A12 | Staphylococcus aureus |
| 2141 | S1M10000019B03 | Staphylococcus aureus |
| 2142 | S1M10000019B04 | Staphylococcus aureus |
| 2143 | S1M10000019B07 | Staphylococcus aureus |
| 2144 | S1M10000019B08 | Staphylococcus aureus |
| 2145 | S1M10000019B09 | Staphylococcus aureus |
| 2146 | S1M10000019B10 | Staphylococcus aureus |
| 2147 | S1M10000019B11 | Staphylococcus aureus |
| 2148 | S1M10000019B12 | Staphylococcus aureus |
| 2149 | S1M10000019C01 | Staphylococcus aureus |
| 2150 | S1M10000019C04 | Staphylococcus aureus |
| 2151 | S1M10000019C05 | Staphylococcus aureus |
| 2152 | S1M10000019C06 | Staphylococcus aureus |
| 2153 | S1M10000019C07 | Staphylococcus aureus |
| 2154 | S1M10000019C08 | Staphylococcus aureus |
| 2155 | S1M10000019C11 | Staphylococcus aureus |
| 2156 | S1M10000019C12 | Staphylococcus aureus |
| 2157 | S1M10000019D01 | Staphylococcus aureus |
| 2158 | S1M10000019D02 | Staphylococcus aureus |
| 2159 | S1M10000019D04 | Staphylococcus aureus |
| 2160 | S1M10000019D05 | Staphylococcus aureus |
| 2161 | S1M10000019D06 | Staphylococcus aureus |
| 2162 | S1M10000019D07 | Staphylococcus aureus |
| 2163 | S1M10000019D09 | Staphylococcus aureus |
| 2164 | S1M10000019D12 | Staphylococcus aureus |
| 2165 | S1M10000019E01 | Staphylococcus aureus |
| 2166 | S1M10000019E02 | Staphylococcus aureus |
| 2167 | S1M10000019E07 | Staphylococcus aureus |
| 2168 | S1M10000019F01 | Staphylococcus aureus |
| 2169 | S1M10000019F05 | Staphylococcus aureus |
| 2170 | S1M10000019F06 | Staphylococcus aureus |
| 2171 | S1M10000019F08 | Staphylococcus aureus |
| 2172 | S1M10000019F09 | Staphylococcus aureus |
| 2173 | S1M10000019F11 | Staphylococcus aureus |
| 2174 | S1M10000019G04 | Staphylococcus aureus |
| 2175 | S1M10000019G07 | Staphylococcus aureus |
| 2176 | S1M10000019G09 | Staphylococcus aureus |
| 2177 | S1M10000019G10 | Staphylococcus aureus |
| 2178 | S1M10000019G11 | Staphylococcus aureus |
| 2179 | S1M10000019H05 | Staphylococcus aureus |
| 2180 | S1M10000019H08 | Staphylococcus aureus |
| 2181 | S1M10000020A05 | Staphylococcus aureus |
| 2182 | S1M10000020A06 | Staphylococcus aureus |
| 2183 | S1M10000020A07 | Staphylococcus aureus |
| 2184 | S1M10000020A11 | Staphylococcus aureus |
| 2185 | S1M10000020A12 | Staphylococcus aureus |
| 2186 | S1M10000020B02 | Staphylococcus aureus |
| 2187 | S1M10000020B03 | Staphylococcus aureus |
| 2188 | S1M10000020B05 | Staphylococcus aureus |
| 2189 | S1M10000020B06 | Staphylococcus aureus |
| 2190 | S1M10000020B07 | Staphylococcus aureus |
| 2191 | S1M10000020B09 | Staphylococcus aureus |
| 2192 | S1M10000020B12 | Staphylococcus aureus |
| 2193 | S1M10000020C09 | Staphylococcus aureus |
| 2194 | S1M10000020C10 | Staphylococcus aureus |
| 2195 | S1M10000020C11 | Staphylococcus aureus |
| 2196 | S1M10000020D03 | Staphylococcus aureus |
| 2197 | S1M10000020D04 | Staphylococcus aureus |
| 2198 | S1M10000020D06 | Staphylococcus aureus |
| 2199 | S1M10000020D07 | Staphylococcus aureus |
| 2200 | S1M10000020D08 | Staphylococcus aureus |
| 2201 | S1M10000020D09 | Staphylococcus aureus |
| 2202 | S1M10000020D12 | Staphylococcus aureus |
| 2203 | S1M10000020E01 | Staphylococcus aureus |
| 2204 | S1M10000020E03 | Staphylococcus aureus |
| 2205 | S1M10000020E04 | Staphylococcus aureus |
| 2206 | S1M10000020E06 | Staphylococcus aureus |
| 2207 | S1M10000020E08 | Staphylococcus aureus |
| 2208 | S1M10000020E11 | Staphylococcus aureus |
| 2209 | S1M10000020E12 | Staphylococcus aureus |
| 2210 | S1M10000020F01 | Staphylococcus aureus |
| 2211 | S1M10000020F05 | Staphylococcus aureus |
| 2212 | S1M10000020F06 | Staphylococcus aureus |
| 2213 | 51M10000020F07 | Staphylococcus aureus |
| 2214 | S1M10000020F09 | Staphylococcus aureus |
| 2215 | S1M10000020F11 | Staphylococcus aureus |
| 2216 | S1M10000020F12 | Staphylococcus aureus |
| 2217 | S1M10000020G01 | Staphylococcus aureus |
| 2218 | S1M10000020G05 | Staphylococcus aureus |
| 2219 | S1M10000020G07 | Staphylococcus aureus |
| 2220 | S1M10000020G08 | Staphylococcus aureus |
| 2221 | S1M10000020G09 | Staphylococcus aureus |
| 2222 | S1M10000020G10 | Staphylococcus aureus |
| 2223 | S1M10000020G11 | Staphylococcus aureus |
| 2224 | S1M10000020G12 | Staphylococcus aureus |
| 2225 | S1M10000020H01 | Staphylococcus aureus |
| 2226 | S1M10000020H02 | Staphylococcus aureus |
| 2227 | S1M10000020H04 | Staphylococcus aureus |
| 2228 | S1M10000020H06 | Staphylococcus aureus |
| 2229 | S1M10000020H08 | Staphylococcus aureus |
| 2230 | S1M10000020H10 | Staphylococcus aureus |
| 2231 | S1M10000020H11 | Staphylococcus aureus |
| 2232 | S1M10000021A04 | Staphylococcus aureus |
| 2233 | S1M10000021A05 | Staphylococcus aureus |
| 2234 | S1M10000021A06 | Staphylococcus aureus |
| 2235 | S1M10000021A07 | Staphylococcus aureus |
| 2236 | S1M10000021A08 | Staphylococcus aureus |
| 2237 | S1M10000021A09 | Staphylococcus aureus |
| 2238 | S1M10000021A10 | Staphylococcus aureus |
| 2239 | S1M10000021B05 | Staphylococcus aureus |
| 2240 | S1M10000021B06 | Staphylococcus aureus |
| 2241 | S1M10000021B07 | Staphylococcus aureus |
| 2242 | S1M10000021B10 | Staphylococcus aureus |
| 2243 | S1M10000021C04 | Staphylococcus aureus |
| 2244 | S1M10000021C05 | Staphylococcus aureus |
| 2245 | S1M10000021C07 | Staphylococcus aureus |
| 2246 | S1M10000021C08 | Staphylococcus aureus |
| 2247 | S1M10000021C10 | Staphylococcus aureus |
| 2248 | S1M10000021C11 | Staphylococcus aureus |
| 2249 | S1M10000021C12 | Staphylococcus aureus |
| 2250 | S1M10000021D01 | Staphylococcus aureus |
| 2251 | S1M10000021D03 | Staphylococcus aureus |
| 2252 | S1M10000021D04 | Staphylococcus aureus |
| 2253 | S1M10000021D06 | Staphylococcus aureus |
| 2254 | S1M10000021D09 | Staphylococcus aureus |
| 2255 | S1M10000021D10 | Staphylococcus aureus |
| 2256 | S1M10000021E01 | Staphylococcus aureus |
| 2257 | S1M10000021E02 | Staphylococcus aureus |
| 2258 | S1M10000021E03 | Staphylococcus aureus |
| 2259 | S1M10000021E05 | Staphylococcus aureus |
| 2260 | S1M10000021E06 | Staphylococcus aureus |
| 2261 | S1M10000021E09 | Staphylococcus aureus |
| 2262 | S1M10000021E12 | Staphylococcus aureus |
| 2263 | S1M10000021F02 | Staphylococcus aureus |
| 2264 | S1M10000021F04 | Staphylococcus aureus |
| 2265 | S1M10000021F05 | Staphylococcus aureus |
| 2266 | S1M10000021F06 | Staphylococcus aureus |
| 2267 | S1M10000021F07 | Staphylococcus aureus |
| 2268 | S1M10000021F09 | Staphylococcus aureus |
| 2269 | S1M10000021F11 | Staphylococcus aureus |
| 2270 | S1M10000021G01 | Staphylococcus aureus |
| 2271 | S1M10000021G03 | Staphylococcus aureus |
| 2272 | S1M10000021G08 | Staphylococcus aureus |
| 2273 | S1M10000021H04 | Staphylococcus aureus |
| 2274 | S1M10000021H05 | Staphylococcus aureus |
| 2275 | S1M10000021H07 | Staphylococcus aureus |
| 2276 | S1M10000021H08 | Staphylococcus aureus |
| 2277 | S1M10000021H11 | Staphylococcus aureus |
| 2278 | S1M10000022A02 | Staphylococcus aureus |
| 2279 | S1M10000022A03 | Staphylococcus aureus |
| 2280 | S1M10000022A05 | Staphylococcus aureus |
| 2281 | S1M10000022A08 | Staphylococcus aureus |
| 2282 | S1M10000022A09 | Staphylococcus aureus |
| 2283 | S1M10000022A12 | Staphylococcus aureus |
| 2284 | S1M10000022B02 | Staphylococcus aureus |
| 2285 | S1M10000022B03 | Staphylococcus aureus |
| 2286 | S1M10000022B05 | Staphylococcus aureus |
| 2287 | S1M10000022B06 | Staphylococcus aureus |
| 2288 | S1M10000022B08 | Staphylococcus aureus |
| 2289 | S1M10000022B09 | Staphylococcus aureus |
| 2290 | S1M10000022B10 | Staphylococcus aureus |
| 2291 | S1M10000022B11 | Staphylococcus aureus |
| 2292 | S1M10000022B12 | Staphylococcus aureus |
| 2293 | S1M10000022C02 | Staphylococcus aureus |
| 2294 | S1M10000022C03 | Staphylococcus aureus |
| 2295 | S1M10000022C04 | Staphylococcus aureus |
| 2296 | S1M10000022C06 | Staphylococcus aureus |
| 2297 | S1M10000022C07 | Staphylococcus aureus |
| 2298 | S1M10000022C08 | Staphylococcus aureus |
| 2299 | S1M10000022C11 | Staphylococcus aureus |
| 2300 | S1M10000022D03 | Staphylococcus aureus |
| 2301 | S1M10000022D05 | Staphylococcus aureus |
| 2302 | S1M10000022D06 | Staphylococcus aureus |
| 2303 | S1M10000022D07 | Staphylococcus aureus |
| 2304 | S1M10000022D08 | Staphylococcus aureus |
| 2305 | S1M10000022D09 | Staphylococcus aureus |
| 2306 | S1M10000022D11 | Staphylococcus aureus |
| 2307 | S1M10000022E01 | Staphylococcus aureus |
| 2308 | S1M10000022E03 | Staphylococcus aureus |
| 2309 | S1M10000022E05 | Staphylococcus aureus |
| 2310 | S1M10000022E09 | Staphylococcus aureus |
| 2311 | S1M10000022F04 | Staphylococcus aureus |
| 2312 | S1M10000022F06 | Staphylococcus aureus |
| 2313 | S1M10000022F07 | Staphylococcus aureus |
| 2314 | S1M10000022F08 | Staphylococcus aureus |
| 2315 | S1M10000022F11 | Staphylococcus aureus |
| 2316 | S1M10000022G03 | Staphylococcus aureus |
| 2317 | S1M10000022G04 | Staphylococcus aureus |
| 2318 | S1M10000022G07 | Staphylococcus aureus |
| 2319 | S1M10000022G08 | Staphylococcus aureus |
| 2320 | S1M10000022G12 | Staphylococcus aureus |
| 2321 | S1M10000022H03 | Staphylococcus aureus |
| 2322 | S1M10000022H05 | Staphylococcus aureus |
| 2323 | S1M10000022H06 | Staphylococcus aureus |
| 2324 | S1M10000022H07 | Staphylococcus aureus |
| 2325 | S1M10000022H08 | Staphylococcus aureus |
| 2326 | S1M10000022H11 | Staphylococcus aureus |
| 2327 | S1M10000023A05 | Staphylococcus aureus |
| 2328 | S1M10000023A09 | Staphylococcus aureus |
| 2329 | S1M10000023A11 | Staphylococcus aureus |
| 2330 | S1M10000023A12 | Staphylococcus aureus |
| 2331 | S1M10000023B01 | Staphylococcus aureus |
| 2332 | S1M10000023B03 | Staphylococcus aureus |
| 2333 | S1M10000023B07 | Staphylococcus aureus |
| 2334 | S1M10000023B08 | Staphylococcus aureus |
| 2335 | S1M10000023B09 | Staphylococcus aureus |
| 2336 | S1M10000023B10 | Staphylococcus aureus |
| 2337 | S1M10000023B11 | Staphylococcus aureus |
| 2338 | S1M10000023B12 | Staphylococcus aureus |
| 2339 | S1M10000023C02 | Staphylococcus aureus |
| 2340 | S1M10000023C10 | Staphylococcus aureus |
| 2341 | S1M10000023C11 | Staphylococcus aureus |
| 2342 | S1M10000023C12 | Staphylococcus aureus |
| 2343 | S1M10000023D01 | Staphylococcus aureus |
| 2344 | S1M10000023D03 | Staphylococcus aureus |
| 2345 | S1M10000023D04 | Staphylococcus aureus |
| 2346 | S1M10000023D07 | Staphylococcus aureus |
| 2347 | S1M10000023D08 | Staphylococcus aureus |
| 2348 | S1M10000023D09 | Staphylococcus aureus |
| 2349 | S1M10000023D10 | Staphylococcus aureus |
| 2350 | S1M10000023D12 | Staphylococcus aureus |
| 2351 | S1M10000023E01 | Staphylococcus aureus |
| 2352 | S1M10000023E04 | Staphylococcus aureus |
| 2353 | S1M10000023E07 | Staphylococcus aureus |
| 2354 | S1M10000023E10 | Staphylococcus aureus |
| 2355 | S1M10000023E11 | Staphylococcus aureus |
| 2356 | S1M10000023F04 | Staphylococcus aureus |
| 2357 | S1M10000023F07 | Staphylococcus aureus |
| 2358 | S1M10000023F08 | Staphylococcus aureus |
| 2359 | S1M10000023F10 | Staphylococcus aureus |
| 2360 | S1M10000023F11 | Staphylococcus aureus |
| 2361 | S1M10000023F12 | Staphylococcus aureus |
| 2362 | S1M10000023G02 | Staphylococcus aureus |
| 2363 | S1M10000023G03 | Staphylococcus aureus |
| 2364 | S1M10000023G06 | Staphylococcus aureus |
| 2365 | S1M10000023G07 | Staphylococcus aureus |
| 2366 | S1M10000023G08 | Staphylococcus aureus |
| 2367 | S1M10000023G09 | Staphylococcus aureus |
| 2368 | S1M10000023G11 | Staphylococcus aureus |
| 2369 | S1M10000023H02 | Staphylococcus aureus |
| 2370 | S1M10000023H06 | Staphylococcus aureus |
| 2371 | S1M10000023H07 | Staphylococcus aureus |
| 2372 | S1M10000023H09 | Staphylococcus aureus |
| 2373 | S1M10000023H10 | Staphylococcus aureus |
| 2374 | S1M10000024A02 | Staphylococcus aureus |
| 2375 | S1M10000024A04 | Staphylococcus aureus |
| 2376 | S1M10000024A07 | Staphylococcus aureus |
| 2377 | S1M10000024A08 | Staphylococcus aureus |
| 2378 | S1M10000024A11 | Staphylococcus aureus |
| 2379 | S1M10000024B05 | Staphylococcus aureus |
| 2380 | S1M10000024B06 | Staphylococcus aureus |
| 2381 | S1M10000024B08 | Staphylococcus aureus |
| 2382 | S1M10000024B09 | Staphylococcus aureus |
| 2383 | S1M10000024B10 | Staphylococcus aureus |
| 2384 | S1M10000024C02 | Staphylococcus aureus |
| 2385 | S1M10000024C04 | Staphylococcus aureus |
| 2386 | S1M10000024C07 | Staphylococcus aureus |
| 2387 | S1M10000024D02 | Staphylococcus aureus |
| 2388 | S1M10000024D03 | Staphylococcus aureus |
| 2389 | S1M10000024D10 | Staphylococcus aureus |
| 2390 | S1M10000024D11 | Staphylococcus aureus |
| 2391 | S1M10000024E03 | Staphylococcus aureus |
| 2392 | S1M10000024E05 | Staphylococcus aureus |
| 2393 | S1M10000024E06 | Staphylococcus aureus |
| 2394 | S1M10000024E07 | Staphylococcus aureus |
| 2395 | S1M10000024E08 | Staphylococcus aureus |
| 2396 | S1M10000024F02 | Staphylococcus aureus |
| 2397 | S1M10000024F03 | Staphylococcus aureus |
| 2398 | S1M10000024F05 | Staphylococcus aureus |
| 2399 | S1M10000024F08 | Staphylococcus aureus |
| 2400 | S1M10000024F10 | Staphylococcus aureus |
| 2401 | S1M10000024G05 | Staphylococcus aureus |
| 2402 | S1M10000024G06 | Staphylococcus aureus |
| 2403 | S1M10000024G07 | Staphylococcus aureus |
| 2404 | S1M10000024G08 | Staphylococcus aureus |
| 2405 | S1M10000024G10 | Staphylococcus aureus |
| 2406 | S1M10000024G12 | Staphylococcus aureus |
| 2407 | S1M10000024H02 | Staphylococcus aureus |
| 2408 | S1M10000024H04 | Staphylococcus aureus |
| 2409 | S1M10000024H07 | Staphylococcus aureus |
| 2410 | S1M10000024H08 | Staphylococcus aureus |
| 2411 | S1M10000025A03 | Staphylococcus aureus |
| 2412 | S1M10000025A08 | Staphylococcus aureus |
| 2413 | S1M10000025A09 | Staphylococcus aureus |
| 2414 | S1M10000025A10 | Staphylococcus aureus |
| 2415 | S1M10000025B01 | Staphylococcus aureus |
| 2416 | S1M10000025B02 | Staphylococcus aureus |
| 2417 | S1M10000025B03 | Staphylococcus aureus |
| 2418 | S1M10000025B05 | Staphylococcus aureus |
| 2419 | S1M10000025B06 | Staphylococcus aureus |
| 2420 | S1M10000025B09 | Staphylococcus aureus |
| 2421 | S1M10000025B12 | Staphylococcus aureus |
| 2422 | S1M10000025C01 | Staphylococcus aureus |
| 2423 | S1M10000025C03 | Staphylococcus aureus |
| 2424 | S1M10000025C05 | Staphylococcus aureus |
| 2425 | S1M10000025C09 | Staphylococcus aureus |
| 2426 | S1M10000025C10 | Staphylococcus aureus |
| 2427 | S1M10000025C11 | Staphylococcus aureus |
| 2428 | S1M10000025D01 | Staphylococcus aureus |
| 2429 | S1M10000025D03 | Staphylococcus aureus |
| 2430 | S1M10000025D04 | Staphylococcus aureus |
| 2431 | S1M10000025D06 | Staphylococcus aureus |
| 2432 | S1M10000025D08 | Staphylococcus aureus |
| 2433 | S1M10000025D09 | Staphylococcus aureus |
| 2434 | S1M10000025D10 | Staphylococcus aureus |
| 2435 | S1M10000025E01 | Staphylococcus aureus |
| 2436 | S1M10000025E04 | Staphylococcus aureus |
| 2437 | S1M10000025E09 | Staphylococcus aureus |
| 2438 | S1M10000025E11 | Staphylococcus aureus |
| 2439 | S1M10000025F03 | Staphylococcus aureus |
| 2440 | S1M10000025F05 | Staphylococcus aureus |
| 2441 | S1M10000025F08 | Staphylococcus aureus |
| 2442 | S1M10000025F09 | Staphylococcus aureus |
| 2443 | S1M1000002SF10 | Staphylococcus aureus |
| 2444 | S1M1000002SF12 | Staphylococcus aureus |
| 2445 | S1M10000025G04 | Staphylococcus aureus |
| 2446 | S1M10000025G06 | Staphylococcus aureus |
| 2447 | S1M10000025G10 | Staphylococcus aureus |
| 2448 | S1M10000025H05 | Staphylococcus aureus |
| 2449 | S1M10000025H06 | Staphylococcus aureus |
| 2450 | S1M10000025H07 | Staphylococcus aureus |
| 2451 | S1M10000025H10 | Staphylococcus aureus |
| 2452 | S1M10000026A02 | Staphylococcus aureus |
| 2453 | S1M10000026A04 | Staphylococcus aureus |
| 2454 | S1M10000026A05 | Staphylococcus aureus |
| 2455 | S1M10000026A06 | Staphylococcus aureus |
| 2456 | S1M10000026A07 | Staphylococcus aureus |
| 2457 | S1M10000026A08 | Staphylococcus aureus |
| 2458 | S1M10000026A09 | Staphylococcus aureus |
| 2459 | S1M10000026A10 | Staphylococcus aureus |
| 2460 | S1M10000026A11 | Staphylococcus aureus |
| 2461 | S1M10000026B02 | Staphylococcus aureus |
| 2462 | S1M10000026B03 | Staphylococcus aureus |
| 2463 | S1M10000026B05 | Staphylococcus aureus |
| 2464 | S1M10000026B06 | Staphylococcus aureus |
| 2465 | S1M10000026B07 | Staphylococcus aureus |
| 2466 | S1M10000026B10 | Staphylococcus aureus |
| 2467 | S1M10000026B11 | Staphylococcus aureus |
| 2468 | S1M10000026B12 | Staphylococcus aureus |
| 2469 | S1M10000026C01 | Staphylococcus aureus |
| 2470 | S1M10000026C06 | Staphylococcus aureus |
| 2471 | S1M10000026C07 | Staphylococcus aureus |
| 2472 | S1M10000026C08 | Staphylococcus aureus |
| 2473 | S1M10000026C11 | Staphylococcus aureus |
| 2474 | S1M10000026C12 | Staphylococcus aureus |
| 2475 | S1M10000026D04 | Staphylococcus aureus |
| 2476 | S1M10000026D05 | Staphylococcus aureus |
| 2477 | S1M10000026D06 | Staphylococcus aureus |
| 2478 | S1M10000026D07 | Staphylococcus aureus |
| 2479 | S1M10000026D08 | Staphylococcus aureus |
| 2480 | S1M10000026D10 | Staphylococcus aureus |
| 2481 | S1M10000026D12 | Staphylococcus aureus |
| 2482 | S1M10000026E01 | Staphylococcus aureus |
| 2483 | S1M10000026E07 | Staphylococcus aureus |
| 2484 | S1M10000026E09 | Staphylococcus aureus |
| 2485 | S1M10000026E10 | Staphylococcus aureus |
| 2486 | S1M10000026E11 | Staphylococcus aureus |
| 2487 | S1M10000026E12 | Staphylococcus aureus |
| 2488 | S1M10000026F01 | Staphylococcus aureus |
| 2489 | S1M10000026F03 | Staphylococcus aureus |
| 2490 | S1M10000026F04 | Staphylococcus aureus |
| 2491 | S1M10000026F05 | Staphylococcus aureus |
| 2492 | S1M10000026F06 | Staphylococcus aureus |
| 2493 | S1M10000026F07 | Staphylococcus aureus |
| 2494 | S1M10000026F08 | Staphylococcus aureus |
| 2495 | S1M10000026F09 | Staphylococcus aureus |
| 2496 | S1M10000026F10 | Staphylococcus aureus |
| 2497 | S1M10000026F11 | Staphylococcus aureus |
| 2498 | S1M10000026F12 | Staphylococcus aureus |
| 2499 | S1M10000026G01 | Staphylococcus aureus |
| 2500 | S1M10000026G03 | Staphylococcus aureus |
| 2501 | S1M10000026G04 | Staphylococcus aureus |
| 2502 | S1M10000026G05 | Staphylococcus aureus |
| 2503 | S1M10000026G06 | Staphylococcus aureus |
| 2504 | S1M10000026G07 | Staphylococcus aureus |
| 2505 | S1M10000026G09 | Staphylococcus aureus |
| 2506 | S1M10000026G10 | Staphylococcus aureus |
| 2507 | S1M10000026G12 | Staphylococcus aureus |
| 2508 | S1M10000026H01 | Staphylococcus aureus |
| 2509 | S1M10000026H02 | Staphylococcus aureus |
| 2510 | S1M10000026H03 | Staphylococcus aureus |
| 2511 | S1M10000026H04 | Staphylococcus aureus |
| 2512 | S1M10000026H05 | Staphylococcus aureus |
| 2513 | S1M10000026H07 | Staphylococcus aureus |
| 2514 | S1M10000026H09 | Staphylococcus aureus |
| 2515 | S1M10000026H10 | Staphylococcus aureus |
| 2516 | S1M10000027A04 | Staphylococcus aureus |
| 2517 | S1M10000027A05 | Staphylococcus aureus |
| 2518 | S1M10000027A08 | Staphylococcus aureus |
| 2519 | S1M10000027A11 | Staphylococcus aureus |
| 2520 | S1M10000027B04 | Staphylococcus aureus |
| 2521 | S1M10000027B06 | Staphylococcus aureus |
| 2522 | S1M10000027B07 | Staphylococcus aureus |
| 2523 | S1M10000027B08 | Staphylococcus aureus |
| 2524 | S1M10000027B09 | Staphylococcus aureus |
| 2525 | S1M10000027B11 | Staphylococcus aureus |
| 2526 | S1M10000027C02 | Staphylococcus aureus |
| 2527 | S1M10000027C04 | Staphylococcus aureus |
| 2528 | S1M10000027C05 | Staphylococcus aureus |
| 2529 | S1M10000027C06 | Staphylococcus aureus |
| 2530 | S1M10000027C08 | Staphylococcus aureus |
| 2531 | S1M10000027C09 | Staphylococcus aureus |
| 2532 | S1M10000027D02 | Staphylococcus aureus |
| 2533 | S1M10000027D03 | Staphylococcus aureus |
| 2534 | S1M10000027D05 | Staphylococcus aureus |
| 2535 | S1M10000027D06 | Staphylococcus aureus |
| 2536 | S1M10000027D08 | Staphylococcus aureus |
| 2537 | S1M10000027D09 | Staphylococcus aureus |
| 2538 | S1M10000027D10 | Staphylococcus aureus |
| 2539 | S1M10000027D11 | Staphylococcus aureus |
| 2540 | S1M10000027E05 | Staphylococcus aureus |
| 2541 | S1M10000027E06 | Staphylococcus aureus |
| 2542 | S1M10000027E07 | Staphylococcus aureus |
| 2543 | S1M10000027E08 | Staphylococcus aureus |
| 2544 | S1M10000027E09 | Staphylococcus aureus |
| 2545 | S1M10000027E11 | Staphylococcus aureus |
| 2546 | S1M10000027F01 | Staphylococcus aureus |
| 2547 | S1M10000027F02 | Staphylococcus aureus |
| 2548 | S1M10000027F05 | Staphylococcus aureus |
| 2549 | S1M10000027F06 | Staphylococcus aureus |
| 2550 | S1M10000027F08 | Staphylococcus aureus |
| 2551 | S1M10000027F09 | Staphylococcus aureus |
| 2552 | S1M10000027G03 | Staphylococcus aureus |
| 2553 | S1M10000027G04 | Staphylococcus aureus |
| 2554 | S1M10000027G05 | Staphylococcus aureus |
| 2555 | S1M10000027G06 | Staphylococcus aureus |
| 2556 | S1M10000027G07 | Staphylococcus aureus |
| 2557 | S1M10000027G09 | Staphylococcus aureus |
| 2558 | S1M10000027G11 | Staphylococcus aureus |
| 2559 | S1M10000027H02 | Staphylococcus aureus |
| 2560 | S1M10000027H04 | Staphylococcus aureus |
| 2561 | S1M10000027H05 | Staphylococcus aureus |
| 2562 | S1M10000027H06 | Staphylococcus aureus |
| 2563 | S1M10000027H07 | Staphylococcus aureus |
| 2564 | S1M10000027H08 | Staphylococcus aureus |
| 2565 | S1M10000027H09 | Staphylococcus aureus |
| 2566 | S1M10000027H10 | Staphylococcus aureus |
| 2567 | S1M10000027H11 | Staphylococcus aureus |
| 2568 | S1M10000028A02 | Staphylococcus aureus |
| 2569 | S1M10000028A04 | Staphylococcus aureus |
| 2570 | S1M10000028A06 | Staphylococcus aureus |
| 2571 | S1M10000028A08 | Staphylococcus aureus |
| 2572 | S1M10000028B01 | Staphylococcus aureus |
| 2573 | S1M10000028B02 | Staphylococcus aureus |
| 2574 | S1M10000028B03 | Staphylococcus aureus |
| 2575 | S1M10000028B04 | Staphylococcus aureus |
| 2576 | S1M10000028B05 | Staphylococcus aureus |
| 2577 | S1M10000028B06 | Staphylococcus aureus |
| 2578 | S1M10000028B08 | Staphylococcus aureus |
| 2579 | S1M10000028B09 | Staphylococcus aureus |
| 2580 | S1M10000028C02 | Staphylococcus aureus |
| 2581 | S1M10000028C04 | Staphylococcus aureus |
| 2582 | S1M10000028C05 | Staphylococcus aureus |
| 2583 | S1M10000028C06 | Staphylococcus aureus |
| 2584 | S1M10000028C08 | Staphylococcus aureus |
| 2585 | S1M10000028D03 | Staphylococcus aureus |
| 2586 | S1M10000028D04 | Staphylococcus aureus |
| 2587 | S1M10000028D06 | Staphylococcus aureus |
| 2588 | S1M10000028D07 | Staphylococcus aureus |
| 2589 | S1M10000028D08 | Staphylococcus aureus |
| 2590 | S1M10000028D09 | Staphylococcus aureus |
| 2591 | S1M10000028E01 | Staphylococcus aureus |
| 2592 | S1M10000028E03 | Staphylococcus aureus |
| 2593 | S1M10000028E08 | Staphylococcus aureus |
| 2594 | S1M10000028F01 | Staphylococcus aureus |
| 2595 | S1M10000028F03 | Staphylococcus aureus |
| 2596 | S1M10000028F04 | Staphylococcus aureus |
| 2597 | S1M10000028F05 | Staphylococcus aureus |
| 2598 | S1M10000028F06 | Staphylococcus aureus |
| 2599 | S1M10000028F07 | Staphylococcus aureus |
| 2600 | S1M10000028G01 | Staphylococcus aureus |
| 2601 | S1M10000028G02 | Staphylococcus aureus |
| 2602 | S1M10000028G03 | Staphylococcus aureus |
| 2603 | S1M10000028G04 | Staphylococcus aureus |
| 2604 | S1M10000028G05 | Staphylococcus aureus |
| 2605 | S1M10000028G06 | Staphylococcus aureus |
| 2606 | S1M10000028G08 | Staphylococcus aureus |
| 2607 | S1M10000028H03 | Staphylococcus aureus |
| 2608 | S1M10000028H04 | Staphylococcus aureus |
| 2609 | S1M10000028H05 | Staphylococcus aureus |
| 2610 | S1M10000029A02 | Staphylococcus aureus |
| 2611 | S1M10000029A04 | Staphylococcus aureus |
| 2612 | S1M10000029A09 | Staphylococcus aureus |
| 2613 | S1M10000029A10 | Staphylococcus aureus |
| 2614 | S1M10000029A11 | Staphylococcus aureus |
| 2615 | S1M10000029A12 | Staphylococcus aureus |
| 2616 | S1M10000029B02 | Staphylococcus aureus |
| 2617 | S1M10000029B03 | Staphylococcus aureus |
| 2618 | S1M10000029B04 | Staphylococcus aureus |
| 2619 | S1M10000029B05 | Staphylococcus aureus |
| 2620 | S1M10000029B06 | Staphylococcus aureus |
| 2621 | S1M10000029B08 | Staphylococcus aureus |
| 2622 | S1M10000029B10 | Staphylococcus aureus |
| 2623 | S1M10000029C02 | Staphylococcus aureus |
| 2624 | S1M10000029C03 | Staphylococcus aureus |
| 2625 | S1M10000029C05 | Staphylococcus aureus |
| 2626 | S1M10000029C07 | Staphylococcus aureus |
| 2627 | S1M10000029C09 | Staphylococcus aureus |
| 2628 | S1M10000029C10 | Staphylococcus aureus |
| 2629 | S1M10000029C12 | Staphylococcus aureus |
| 2630 | S1M10000029D02 | Staphylococcus aureus |
| 2631 | S1M10000029D05 | Staphylococcus aureus |
| 2632 | S1M10000029D09 | Staphylococcus aureus |
| 2633 | S1M10000029D10 | Staphylococcus aureus |
| 2634 | S1M10000029D12 | Staphylococcus aureus |
| 2635 | S1M10000029E02 | Staphylococcus aureus |
| 2636 | S1M10000029E05 | Staphylococcus aureus |
| 2637 | S1M10000029E10 | Staphylococcus aureus |
| 2638 | S1M10000029E11 | Staphylococcus aureus |
| 2639 | S1M10000029F01 | Staphylococcus aureus |
| 2640 | S1M10000029F02 | Staphylococcus aureus |
| 2641 | S1M10000029F04 | Staphylococcus aureus |
| 2642 | S1M10000029F09 | Staphylococcus aureus |
| 2643 | S1M10000029F10 | Staphylococcus aureus |
| 2644 | S1M10000029F11 | Staphylococcus aureus |
| 2645 | S1M10000029F12 | Staphylococcus aureus |
| 2646 | S1M10000029G01 | Staphylococcus aureus |
| 2647 | S1M10000029G02 | Staphylococcus aureus |
| 2648 | S1M10000029G03 | Staphylococcus aureus |
| 2649 | S1M10000029G05 | Staphylococcus aureus |
| 2650 | S1M10000029G07 | Staphylococcus aureus |
| 2651 | S1M10000029G08 | Staphylococcus aureus |
| 2652 | S1M10000029G12 | Staphylococcus aureus |
| 2653 | S1M10000029H01 | Staphylococcus aureus |
| 2654 | S1M10000029H05 | Staphylococcus aureus |
| 2655 | S1M10000029H06 | Staphylococcus aureus |
| 2656 | S1M10000029H08 | Staphylococcus aureus |
| 2657 | S1M10000029H09 | Staphylococcus aureus |
| 2658 | S1M10000029H10 | Staphylococcus aureus |
| 2659 | S1M10000030A02 | Staphylococcus aureus |
| 2660 | S1M10000030A05 | Staphylococcus aureus |
| 2661 | S1M10000030A09 | Staphylococcus aureus |
| 2662 | S1M10000030A10 | Staphylococcus aureus |
| 2663 | S1M10000030A11 | Staphylococcus aureus |
| 2664 | S1M10000030B02 | Staphylococcus aureus |
| 2665 | S1M10000030B05 | Staphylococcus aureus |
| 2666 | S1M10000030B07 | Staphylococcus aureus |
| 2667 | S1M10000030B09 | Staphylococcus aureus |
| 2668 | S1M10000030C02 | Staphylococcus aureus |
| 2669 | S1M10000030C03 | Staphylococcus aureus |
| 2670 | S1M10000030C04 | Staphylococcus aureus |
| 2671 | S1M10000030C05 | Staphylococcus aureus |
| 2672 | S1M10000030C08 | Staphylococcus aureus |
| 2673 | S1M10000030C09 | Staphylococcus aureus |
| 2674 | S1M10000030C10 | Staphylococcus aureus |
| 2675 | S1M10000030C12 | Staphylococcus aureus |
| 2676 | S1M10000030D01 | Staphylococcus aureus |
| 2677 | S1M10000030D02 | Staphylococcus aureus |
| 2678 | S1M10000030D03 | Staphylococcus aureus |
| 2679 | S1M10000030D05 | Staphylococcus aureus |
| 2680 | S1M10000030D06 | Staphylococcus aureus |
| 2681 | S1M10000030D07 | Staphylococcus aureus |
| 2682 | S1M10000030D09 | Staphylococcus aureus |
| 2683 | S1M10000030D10 | Staphylococcus aureus |
| 2684 | S1M1000003OD11 | Staphylococcus aureus |
| 2685 | S1M10000030E02 | Staphylococcus aureus |
| 2686 | S1M10000030E06 | Staphylococcus aureus |
| 2687 | S1M10000030E07 | Staphylococcus aureus |
| 2688 | S1M10000030E11 | Staphylococcus aureus |
| 2689 | S1M10000030E12 | Staphylococcus aureus |
| 2690 | S1M10000030F01 | Staphylococcus aureus |
| 2691 | S1M10000030F07 | Staphylococcus aureus |
| 2692 | S1M10000030F08 | Staphylococcus aureus |
| 2693 | S1M10000030F09 | Staphylococcus aureus |
| 2694 | S1M10000030F10 | Staphylococcus aureus |
| 2695 | S1M10000030G03 | Staphylococcus aureus |
| 2696 | S1M10000030G05 | Staphylococcus aureus |
| 2697 | S1M10000030G07 | Staphylococcus aureus |
| 2698 | S1M10000030G08 | Staphylococcus aureus |
| 2699 | S1M10000030G09 | Staphylococcus aureus |
| 2700 | S1M10000030G10 | Staphylococcus aureus |
| 2701 | S1M10000030G11 | Staphylococcus aureus |
| 2702 | S1M10000030G12 | Staphylococcus aureus |
| 2703 | S1M10000030H01 | Staphylococcus aureus |
| 2704 | S1M10000030H02 | Staphylococcus aureus |
| 2705 | S1M10000030H03 | Staphylococcus aureus |
| 2706 | S1M10000030H05 | Staphylococcus aureus |
| 2707 | S1M10000030H07 | Staphylococcus aureus |
| 2708 | S1M10000030H09 | Staphylococcus aureus |
| 2709 | S1M10000031A03 | Staphylococcus aureus |
| 2710 | S1M10000031A08 | Staphylococcus aureus |
| 2711 | S1M10000031A10 | Staphylococcus aureus |
| 2712 | S1M10000031B01 | Staphylococcus aureus |
| 2713 | S1M10000031B02 | Staphylococcus aureus |
| 2714 | S1M10000031B04 | Staphylococcus aureus |
| 2715 | S1M10000031B11 | Staphylococcus aureus |
| 2716 | S1M10000031B12 | Staphylococcus aureus |
| 2717 | S1M10000031C04 | Staphylococcus aureus |
| 2718 | S1M10000031C07 | Staphylococcus aureus |
| 2719 | S1M10000031C09 | Staphylococcus aureus |
| 2720 | S1M10000031C11 | Staphylococcus aureus |
| 2721 | S1M10000031D06 | Staphylococcus aureus |
| 2722 | S1M10000031D07 | Staphylococcus aureus |
| 2723 | S1M10000031DO8 | Staphylococcus aureus |
| 2724 | S1M10000031D09 | Staphylococcus aureus |
| 2725 | S1M10000031E02 | Staphylococcus aureus |
| 2726 | S1M10000031E03 | Staphylococcus aureus |
| 2727 | S1M10000031EO4 | Staphylococcus aureus |
| 2728 | S1M10000031E07 | Staphylococcus aureus |
| 2729 | S1M10000031E08 | Staphylococcus aureus |
| 2730 | S1M10000031E10 | Staphylococcus aureus |
| 2731 | S1M10000031E12 | Staphylococcus aureus |
| 2732 | S1M10000031F02 | Staphylococcus aureus |
| 2733 | S1M10000031F03 | Staphylococcus aureus |
| 2734 | S1M10000031F04 | Staphylococcus aureus |
| 2735 | S1M10000031F05 | Staphylococcus aureus |
| 2736 | S1M10000031F08 | Staphylococcus aureus |
| 2737 | S1M10000031F10 | Staphylococcus aureus |
| 2738 | S1M10000031F11 | Staphylococcus aureus |
| 2739 | S1M10000031F12 | Staphylococcus aureus |
| 2740 | S1M10000031G02 | Staphylococcus aureus |
| 2741 | S1M10000031G03 | Staphylococcus aureus |
| 2742 | S1M10000031G04 | Staphylococcus aureus |
| 2743 | S1M10000031G06 | Staphylococcus aureus |
| 2744 | S1M10000031G09 | Staphylococcus aureus |
| 2745 | S1M10000031G10 | Staphylococcus aureus |
| 2746 | S1M10000031G11 | Staphylococcus aureus |
| 2747 | S1M10000031H01 | Staphylococcus aureus |
| 2748 | S1M10000031H02 | Staphylococcus aureus |
| 2749 | S1M10000031H06 | Staphylococcus aureus |
| 2750 | S1M10000031H09 | Staphylococcus aureus |
| 2751 | S1M10000031H11 | Staphylococcus aureus |
| 2752 | S1M10000032A03 | Staphylococcus aureus |
| 2753 | S1M10000032A05 | Staphylococcus aureus |
| 2754 | S1M10000032A06 | Staphylococcus aureus |
| 2755 | S1M10000032A07 | Staphylococcus aureus |
| 2756 | S1M10000032A08 | Staphylococcus aureus |
| 2757 | S1M10000032A10 | Staphylococcus aureus |
| 2758 | S1M10000032B01 | Staphylococcus aureus |
| 2759 | S1M10000032B05 | Staphylococcus aureus |
| 2760 | S1M10000032B07 | Staphylococcus aureus |
| 2761 | S1M10000032B08 | Staphylococcus aureus |
| 2762 | S1M10000032B11 | Staphylococcus aureus |
| 2763 | S1M10000032B12 | Staphylococcus aureus |
| 2764 | S1M10000032C01 | Staphylococcus aureus |
| 2765 | S1M10000032C03 | Staphylococcus aureus |
| 2766 | S1M10000032C04 | Staphylococcus aureus |
| 2767 | S1M10000032C05 | Staphylococcus aureus |
| 2768 | S1M10000032C09 | Staphylococcus aureus |
| 2769 | S1M10000032C10 | Staphylococcus aureus |
| 2770 | S1M10000032C11 | Staphylococcus aureus |
| 2771 | S1M10000032C12 | Staphylococcus aureus |
| 2772 | S1M10000032D03 | Staphylococcus aureus |
| 2773 | S1M10000032D06 | Staphylococcus aureus |
| 2774 | S1M10000032D07 | Staphylococcus aureus |
| 2775 | S1M10000032D09 | Staphylococcus aureus |
| 2776 | S1M10000032D11 | Staphylococcus aureus |
| 2777 | S1M10000032E02 | Staphylococcus aureus |
| 2778 | S1M10000032E03 | Staphylococcus aureus |
| 2779 | S1M10000032E04 | Staphylococcus aureus |
| 2780 | S1M10000032E06 | Staphylococcus aureus |
| 2781 | S1M10000032E08 | Staphylococcus aureus |
| 2782 | S1M10000032E09 | Staphylococcus aureus |
| 2783 | S1M10000032E10 | Staphylococcus aureus |
| 2784 | S1M10000032E11 | Staphylococcus aureus |
| 2785 | S1M10000032E12 | Staphylococcus aureus |
| 2786 | S1M10000032F01 | Staphylococcus aureus |
| 2787 | S1M10000032F04 | Staphylococcus aureus |
| 2788 | S1M10000032F05 | Staphylococcus aureus |
| 2789 | S1M10000032F10 | Staphylococcus aureus |
| 2790 | S1M10000032F11 | Staphylococcus aureus |
| 2791 | S1M10000032F12 | Staphylococcus aureus |
| 2792 | S1M10000032G02 | Staphylococcus aureus |
| 2793 | S1M10000032G03 | Staphylococcus aureus |
| 2794 | S1M10000032G04 | Staphylococcus aureus |
| 2795 | S1M10000032G06 | Staphylococcus aureus |
| 2796 | S1M10000032G08 | Staphylococcus aureus |
| 2797 | S1M10000032G10 | Staphylococcus aureus |
| 2798 | S1M10000032G12 | Staphylococcus aureus |
| 2799 | S1M10000032H01 | Staphylococcus aureus |
| 2800 | S1M10000032H04 | Staphylococcus aureus |
| 2801 | S1M10000032H07 | Staphylococcus aureus |
| 2802 | S1M10000032H09 | Staphylococcus aureus |
| 2803 | S1M10000032H11 | Staphylococcus aureus |
| 2804 | S1M10000033A02 | Staphylococcus aureus |
| 2805 | S1M10000033A07 | Staphylococcus aureus |
| 2806 | S1M10000033A08 | Staphylococcus aureus |
| 2807 | S1M10000033A10 | Staphylococcus aureus |
| 2808 | S1M10000033B02 | Staphylococcus aureus |
| 2809 | S1M10000033B07 | Staphylococcus aureus |
| 2810 | S1M10000033B08 | Staphylococcus aureus |
| 2811 | S1M10000033B11 | Staphylococcus aureus |
| 2812 | S1M10000033B12 | Staphylococcus aureus |
| 2813 | S1M10000033C04 | Staphylococcus aureus |
| 2814 | S1M10000033D02 | Staphylococcus aureus |
| 2815 | S1M10000033D03 | Staphylococcus aureus |
| 2816 | S1M10000033D04 | Staphylococcus aureus |
| 2817 | S1M10000033D05 | Staphylococcus aureus |
| 2818 | S1M10000033D06 | Staphylococcus aureus |
| 2819 | S1M10000033D10 | Staphylococcus aureus |
| 2820 | S1M10000033D12 | Staphylococcus aureus |
| 2821 | S1M10000033E04 | Staphylococcus aureus |
| 2822 | S1M10000033E10 | Staphylococcus aureus |
| 2823 | S1M10000033E12 | Staphylococcus aureus |
| 2824 | S1M10000033F02 | Staphylococcus aureus |
| 2825 | S1M10000033F03 | Staphylococcus aureus |
| 2826 | S1M10000033F06 | Staphylococcus aureus |
| 2827 | S1M10000033F07 | Staphylococcus aureus |
| 2828 | S1M10000033F09 | Staphylococcus aureus |
| 2829 | S1M10000033F11 | Staphylococcus aureus |
| 2830 | S1M10000033G05 | Staphylococcus aureus |
| 2831 | S1M10000033G07 | Staphylococcus aureus |
| 2832 | S1M10000033G09 | Staphylococcus aureus |
| 2833 | S1M10000033G10 | Staphylococcus aureus |
| 2834 | S1M10000033G11 | Staphylococcus aureus |
| 2835 | S1M10000033G12 | Staphylococcus aureus |
| 2836 | S1M10000033H01 | Staphylococcus aureus |
| 2837 | S1M10000033H02 | Staphylococcus aureus |
| 2838 | S1M10000033H03 | Staphylococcus aureus |
| 2839 | S1M10000033H07 | Staphylococcus aureus |
| 2840 | S1M10000033H08 | Staphylococcus aureus |
| 2841 | S1M10000033H09 | Staphylococcus aureus |
| 2842 | S1M10000033H10 | Staphylococcus aureus |
| 2843 | S1M10000033H11 | Staphylococcus aureus |
| 2844 | S1M10000034A02 | Staphylococcus aureus |
| 2845 | S1M10000034A03 | Staphylococcus aureus |
| 2846 | S1M10000034A04 | Staphylococcus aureus |
| 2847 | S1M10000034A05 | Staphylococcus aureus |
| 2848 | S1M10000034A08 | Staphylococcus aureus |
| 2849 | S1M10000034A09 | Staphylococcus aureus |
| 2850 | S1M10000034A11 | Staphylococcus aureus |
| 2851 | S1M10000034A12 | Staphylococcus aureus |
| 2852 | S1M10000034B03 | Staphylococcus aureus |
| 2853 | S1M10000034B05 | Staphylococcus aureus |
| 2854 | S1M10000034B06 | Staphylococcus aureus |
| 2855 | S1M10000034B07 | Staphylococcus aureus |
| 2856 | S1M10000034B08 | Staphylococcus aureus |
| 2857 | S1M10000034B09 | Staphylococcus aureus |
| 2858 | S1M10000034B10 | Staphylococcus aureus |
| 2859 | S1M10000034B12 | Staphylococcus aureus |
| 2860 | S1M10000034C02 | Staphylococcus aureus |
| 2861 | S1M10000034C06 | Staphylococcus aureus |
| 2862 | S1M10000034C07 | Staphylococcus aureus |
| 2863 | S1M10000034C09 | Staphylococcus aureus |
| 2864 | S1M10000034C12 | Staphylococcus aureus |
| 2865 | S1M10000034D01 | Staphylococcus aureus |
| 2866 | S1M10000034D05 | Staphylococcus aureus |
| 2867 | S1M10000034D06 | Staphylococcus aureus |
| 2868 | S1M10000034D07 | Staphylococcus aureus |
| 2869 | S1M10000034D08 | Staphylococcus aureus |
| 2870 | S1M10000034D10 | Staphylococcus aureus |
| 2871 | S1M10000034D11 | Staphylococcus aureus |
| 2872 | S1M10000034D12 | Staphylococcus aureus |
| 2873 | S1M10000034E01 | Staphylococcus aureus |
| 2874 | S1M10000034E02 | Staphylococcus aureus |
| 2875 | S1M10000034E04 | Staphylococcus aureus |
| 2876 | S1M10000034E05 | Staphylococcus aureus |
| 2877 | S1M10000034E06 | Staphylococcus aureus |
| 2878 | S1M10000034E07 | Staphylococcus aureus |
| 2879 | S1M10000034E10 | Staphylococcus aureus |
| 2880 | S1M10000034E11 | Staphylococcus aureus |
| 2881 | S1M10000034E12 | Staphylococcus aureus |
| 2882 | S1M10000034F01 | Staphylococcus aureus |
| 2883 | S1M10000034F02 | Staphylococcus aureus |
| 2884 | S1M10000034F03 | Staphylococcus aureus |
| 2885 | S1M10000034F04 | Staphylococcus aureus |
| 2886 | S1M10000034F05 | Staphylococcus aureus |
| 2887 | S1M10000034F07 | Staphylococcus aureus |
| 2888 | S1M10000034F08 | Staphylococcus aureus |
| 2889 | S1M10000034F09 | Staphylococcus aureus |
| 2890 | S1M10000034F10 | Staphylococcus aureus |
| 2891 | S1M10000034F12 | Staphylococcus aureus |
| 2892 | S1M10000034G02 | Staphylococcus aureus |
| 2893 | S1M10000034G03 | Staphylococcus aureus |
| 2894 | S1M10000034G06 | Staphylococcus aureus |
| 2895 | S1M10000034G07 | Staphylococcus aureus |
| 2896 | S1M10000034G08 | Staphylococcus aureus |
| 2897 | S1M10000034G09 | Staphylococcus aureus |
| 2898 | S1M10000034G11 | Staphylococcus aureus |
| 2899 | S1M10000034G12 | Staphylococcus aureus |
| 2900 | S1M10000034H01 | Staphylococcus aureus |
| 2901 | S1M10000034H02 | Staphylococcus aureus |
| 2902 | S1M10000034H03 | Staphylococcus aureus |
| 2903 | S1M10000034H06 | Staphylococcus aureus |
| 2904 | S1M10000034H07 | Staphylococcus aureus |
| 2905 | S1M10000034H08 | Staphylococcus aureus |
| 2906 | S1M10000034H09 | Staphylococcus aureus |
| 2907 | S1M10000034H10 | Staphylococcus aureus |
| 2908 | S1M10000035A03 | Staphylococcus aureus |
| 2909 | S1M10000035A08 | Staphylococcus aureus |
| 2910 | S1M10000035A09 | Staphylococcus aureus |
| 2911 | S1M10000035A10 | Staphylococcus aureus |
| 2912 | S1M10000035A11 | Staphylococcus aureus |
| 2913 | S1M10000035A12 | Staphylococcus aureus |
| 2914 | S1M10000035B01 | Staphylococcus aureus |
| 2915 | S1M10000035B03 | Staphylococcus aureus |
| 2916 | S1M10000035B04 | Staphylococcus aureus |
| 2917 | S1M10000035B08 | Staphylococcus aureus |
| 2918 | S1M10000035B11 | Staphylococcus aureus |
| 2919 | S1M10000035C01 | Staphylococcus aureus |
| 2920 | S1M10000035C02 | Staphylococcus aureus |
| 2921 | S1M10000035C04 | Staphylococcus aureus |
| 2922 | S1M10000035C06 | Staphylococcus aureus |
| 2923 | S1M10000035C11 | Staphylococcus aureus |
| 2924 | S1M10000035D01 | Staphylococcus aureus |
| 2925 | S1M10000035D04 | Staphylococcus aureus |
| 2926 | S1M10000035D06 | Staphylococcus aureus |
| 2927 | S1M10000035D09 | Staphylococcus aureus |
| 2928 | S1M10000035D12 | Staphylococcus aureus |
| 2929 | S1M10000035E02 | Staphylococcus aureus |
| 2930 | S1M10000035E03 | Staphylococcus aureus |
| 2931 | S1M10000035E04 | Staphylococcus aureus |
| 2932 | S1M10000035E08 | Staphylococcus aureus |
| 2933 | S1M10000035E09 | Staphylococcus aureus |
| 2934 | S1M10000035E12 | Staphylococcus aureus |
| 2935 | S1M10000035F03 | Staphylococcus aureus |
| 2936 | S1M10000035F04 | Staphylococcus aureus |
| 2937 | S1M10000035F09 | Staphylococcus aureus |
| 2938 | S1M10000035F12 | Staphylococcus aureus |
| 2939 | S1M10000035G02 | Staphylococcus aureus |
| 2940 | S1M10000035G09 | Staphylococcus aureus |
| 2941 | S1M10000035G11 | Staphylococcus aureus |
| 2942 | S1M10000035G12 | Staphylococcus aureus |
| 2943 | S1M10000035H01 | Staphylococcus aureus |
| 2944 | S1M10000035H07 | Staphylococcus aureus |
| 2945 | S1M10000035H08 | Staphylococcus aureus |
| 2946 | S1M10000035H09 | Staphylococcus aureus |
| 2947 | S1M10000035H10 | Staphylococcus aureus |
| 2948 | S1M10000035H11 | Staphylococcus aureus |
| 2949 | S1M10000036A02 | Staphylococcus aureus |
| 2950 | S1M10000036A03 | Staphylococcus aureus |
| 2951 | S1M10000036A04 | Staphylococcus aureus |
| 2952 | S1M10000036A05 | Staphylococcus aureus |
| 2953 | S1M10000036A08 | Staphylococcus aureus |
| 2954 | S1M10000036A11 | Staphylococcus aureus |
| 2955 | S1M10000036A12 | Staphylococcus aureus |
| 2956 | S1M10000036B04 | Staphylococcus aureus |
| 2957 | S1M10000036B06 | Staphylococcus aureus |
| 2958 | S1M10000036B07 | Staphylococcus aureus |
| 2959 | S1M10000036B08 | Staphylococcus aureus |
| 2960 | S1M10000036B11 | Staphylococcus aureus |
| 2961 | S1M10000036B12 | Staphylococcus aureus |
| 2962 | S1M10000036C01 | Staphylococcus aureus |
| 2963 | S1M10000036C03 | Staphylococcus aureus |
| 2964 | S1M10000036C04 | Staphylococcus aureus |
| 2965 | S1M10000036C05 | Staphylococcus aureus |
| 2966 | S1M10000036C06 | Staphylococcus aureus |
| 2967 | S1M10000036C07 | Staphylococcus aureus |
| 2968 | S1M10000036C09 | Staphylococcus aureus |
| 2969 | S1M10000036C10 | Staphylococcus aureus |
| 2970 | S1M10000036D02 | Staphylococcus aureus |
| 2971 | S1M10000036D03 | Staphylococcus aureus |
| 2972 | S1M10000036D06 | Staphylococcus aureus |
| 2973 | S1M10000036D08 | Staphylococcus aureus |
| 2974 | S1M10000036D10 | Staphylococcus aureus |
| 2975 | S1M10000036D11 | Staphylococcus aureus |
| 2976 | S1M10000036D12 | Staphylococcus aureus |
| 2977 | S1M10000036E06 | Staphylococcus aureus |
| 2978 | S1M10000036E08 | Staphylococcus aureus |
| 2979 | S1M10000036E11 | Staphylococcus aureus |
| 2980 | S1M10000036F06 | Staphylococcus aureus |
| 2981 | S1M10000036F07 | Staphylococcus aureus |
| 2982 | S1M10000036F08 | Staphylococcus aureus |
| 2983 | S1M10000036F09 | Staphylococcus aureus |
| 2984 | S1M10000036F10 | Staphylococcus aureus |
| 2985 | S1M10000036F11 | Staphylococcus aureus |
| 2986 | S1M10000036G03 | Staphylococcus aureus |
| 2987 | S1M10000036G07 | Staphylococcus aureus |
| 2988 | S1M10000036G08 | Staphylococcus aureus |
| 2989 | S1M10000036G11 | Staphylococcus aureus |
| 2990 | S1M10000036H01 | Staphylococcus aureus |
| 2991 | S1M10000036H02 | Staphylococcus aureus |
| 2992 | S1M10000036H03 | Staphylococcus aureus |
| 2993 | S1M10000036H04 | Staphylococcus aureus |
| 2994 | S1M10000036H05 | Staphylococcus aureus |
| 2995 | S1M10000036H06 | Staphylococcus aureus |
| 2996 | S1M10000036H08 | Staphylococcus aureus |
| 2997 | S1M10000036H11 | Staphylococcus aureus |
| 2998 | S1M10000037A02 | Staphylococcus aureus |
| 2999 | S1M10000037A03 | Staphylococcus aureus |
| 3000 | S1M10000037A06 | Staphylococcus aureus |
| 3001 | S1M10000037A08 | Staphylococcus aureus |
| 3002 | S1M10000037A09 | Staphylococcus aureus |
| 3003 | S1M10000037A11 | Staphylococcus aureus |
| 3004 | S1M10000037A12 | Staphylococcus aureus |
| 3005 | S1M10000037B03 | Staphylococcus aureus |
| 3006 | S1M10000037B04 | Staphylococcus aureus |
| 3007 | S1M10000037B05 | Staphylococcus aureus |
| 3008 | S1M10000037B06 | Staphylococcus aureus |
| 3009 | S1M10000037B07 | Staphylococcus aureus |
| 3010 | S1M10000037B08 | Staphylococcus aureus |
| 3011 | S1M10000037B10 | Staphylococcus aureus |
| 3012 | S1M10000037B11 | Staphylococcus aureus |
| 3013 | S1M10000037B12 | Staphylococcus aureus |
| 3014 | S1M10000037C05 | Staphylococcus aureus |
| 3015 | S1M10000037C06 | Staphylococcus aureus |
| 3016 | S1M10000037C07 | Staphylococcus aureus |
| 3017 | S1M10000037C08 | Staphylococcus aureus |
| 3018 | S1M10000037C09 | Staphylococcus aureus |
| 3019 | S1M10000037C10 | Staphylococcus aureus |
| 3020 | S1M10000037D04 | Staphylococcus aureus |
| 3021 | S1M10000037D05 | Staphylococcus aureus |
| 3022 | S1M10000037D06 | Staphylococcus aureus |
| 3023 | S1M10000037D09 | Staphylococcus aureus |
| 3024 | S1M10000037D12 | Staphylococcus aureus |
| 3025 | S1M10000037E02 | Staphylococcus aureus |
| 3026 | S1M10000037E03 | Staphylococcus aureus |
| 3027 | S1M10000037E06 | Staphylococcus aureus |
| 3028 | S1M10000037E08 | Staphylococcus aureus |
| 3029 | S1M10000037E09 | Staphylococcus aureus |
| 3030 | S1M10000037E10 | Staphylococcus aureus |
| 3031 | S1M10000037E11 | Staphylococcus aureus |
| 3032 | S1M10000037E12 | Staphylococcus aureus |
| 3033 | S1M10000037F02 | Staphylococcus aureus |
| 3034 | S1M10000037F03 | Staphylococcus aureus |
| 3035 | S1M10000037F04 | Staphylococcus aureus |
| 3036 | S1M10000037F05 | Staphylococcus aureus |
| 3037 | S1M10000037F06 | Staphylococcus aureus |
| 3038 | S1M10000037F07 | Staphylococcus aureus |
| 3039 | S1M10000037F08 | Staphylococcus aureus |
| 3040 | S1M10000037F09 | Staphylococcus aureus |
| 3041 | S1M10000037F10 | Staphylococcus aureus |
| 3042 | S1M10000037G01 | Staphylococcus aureus |
| 3043 | S1M10000037G02 | Staphylococcus aureus |
| 3044 | S1M10000037G03 | Staphylococcus aureus |
| 3045 | S1M10000037G06 | Staphylococcus aureus |
| 3046 | S1M10000037G07 | Staphylococcus aureus |
| 3047 | S1M10000037G08 | Staphylococcus aureus |
| 3048 | 51M10000037G10 | Staphylococcus aureus |
| 3049 | S1M10000037H02 | Staphylococcus aureus |
| 3050 | S1M10000037H03 | Staphylococcus aureus |
| 3051 | S1M10000037H05 | Staphylococcus aureus |
| 3052 | S1M10000037H07 | Staphylococcus aureus |
| 3053 | S1M10000037H08 | Staphylococcus aureus |
| 3054 | S1M10000037H09 | Staphylococcus aureus |
| 3055 | S1M10000037H11 | Staphylococcus aureus |
| 3056 | S1M10000038A04 | Staphylococcus aureus |
| 3057 | S1M10000038A07 | Staphylococcus aureus |
| 3058 | S1M10000038A08 | Staphylococcus aureus |
| 3059 | S1M10000038A09 | Staphylococcus aureus |
| 3060 | S1M10000038A11 | Staphylococcus aureus |
| 3061 | S1M10000038A12 | Staphylococcus aureus |
| 3062 | S1M10000038B01 | Staphylococcus aureus |
| 3063 | S1M10000038B03 | Staphylococcus aureus |
| 3064 | S1M10000038B07 | Staphylococcus aureus |
| 3065 | S1M10000038B08 | Staphylococcus aureus |
| 3066 | S1M10000038B09 | Staphylococcus aureus |
| 3067 | S1M10000038B12 | Staphylococcus aureus |
| 3068 | S1M10000038C01 | Staphylococcus aureus |
| 3069 | S1M10000038C02 | Staphylococcus aureus |
| 3070 | S1M10000038C06 | Staphylococcus aureus |
| 3071 | S1M10000038C08 | Staphylococcus aureus |
| 3072 | S1M10000038C10 | Staphylococcus aureus |
| 3073 | S1M10000038C11 | Staphylococcus aureus |
| 3074 | S1M10000038C12 | Staphylococcus aureus |
| 3075 | S1M10000038D02 | Staphylococcus aureus |
| 3076 | S1M10000038D05 | Staphylococcus aureus |
| 3077 | S1M10000038D07 | Staphylococcus aureus |
| 3078 | S1M10000038D08 | Staphylococcus aureus |
| 3079 | S1M10000038D09 | Staphylococcus aureus |
| 3080 | S1M10000038D10 | Staphylococcus aureus |
| 3081 | S1M10000038D11 | Staphylococcus aureus |
| 3082 | S1M10000038D12 | Staphylococcus aureus |
| 3083 | S1M10000038E01 | Staphylococcus aureus |
| 3084 | S1M10000038E02 | Staphylococcus aureus |
| 3085 | S1M10000038E03 | Staphylococcus aureus |
| 3086 | S1M10000038E04 | Staphylococcus aureus |
| 3087 | S1M10000038E05 | Staphylococcus aureus |
| 3088 | S1M10000038E06 | Staphylococcus aureus |
| 3089 | S1M10000038E07 | Staphylococcus aureus |
| 3090 | S1M10000038E10 | Staphylococcus aureus |
| 3091 | S1M10000038E12 | Staphylococcus aureus |
| 3092 | S1M10000038F03 | Staphylococcus aureus |
| 3093 | S1M10000038F04 | Staphylococcus aureus |
| 3094 | S1M10000038F05 | Staphylococcus aureus |
| 3095 | S1M10000038F06 | Staphylococcus aureus |
| 3096 | S1M10000038F08 | Staphylococcus aureus |
| 3097 | S1M10000038F09 | Staphylococcus aureus |
| 3098 | S1M10000038F10 | Staphylococcus aureus |
| 3099 | S1M10000038F11 | Staphylococcus aureus |
| 3100 | S1M10000038F12 | Staphylococcus aureus |
| 3101 | S1M10000038G01 | Staphylococcus aureus |
| 3102 | S1M10000038G03 | Staphylococcus aureus |
| 3103 | S1M10000038G04 | Staphylococcus aureus |
| 3104 | S1M10000038G06 | Staphylococcus aureus |
| 3105 | S1M10000038G08 | Staphylococcus aureus |
| 3106 | S1M10000038G10 | Staphylococcus aureus |
| 3107 | S1M10000038G11 | Staphylococcus aureus |
| 3108 | S1M10000038G12 | Staphylococcus aureus |
| 3109 | S1M10000038H03 | Staphylococcus aureus |
| 3110 | S1M10000038H07 | Staphylococcus aureus |
| 3111 | S1M10000038H09 | Staphylococcus aureus |
| 3112 | S1M10000038H11 | Staphylococcus aureus |
| 3113 | S1M10000039A02 | Staphylococcus aureus |
| 3114 | S1M10000039A05 | Staphylococcus aureus |
| 3115 | S1M10000039A07 | Staphylococcus aureus |
| 3116 | S1M10000039A08 | Staphylococcus aureus |
| 3117 | S1M10000039A11 | Staphylococcus aureus |
| 3118 | S1M10000039A12 | Staphylococcus aureus |
| 3119 | S1M10000039B02 | Staphylococcus aureus |
| 3120 | S1M10000039B06 | Staphylococcus aureus |
| 3121 | S1M10000039B07 | Staphylococcus aureus |
| 3122 | S1M10000039B10 | Staphylococcus aureus |
| 3123 | S1M10000039B12 | Staphylococcus aureus |
| 3124 | S1M10000039C04 | Staphylococcus aureus |
| 3125 | S1M10000039C06 | Staphylococcus aureus |
| 3126 | S1M10000039C07 | Staphylococcus aureus |
| 3127 | S1M10000039C08 | Staphylococcus aureus |
| 3128 | S1M10000039C09 | Staphylococcus aureus |
| 3129 | S1M10000039C10 | Staphylococcus aureus |
| 3130 | S1M10000039C11 | Staphylococcus aureus |
| 3131 | S1M10000039D02 | Staphylococcus aureus |
| 3132 | S1M10000039D09 | Staphylococcus aureus |
| 3133 | S1M10000039D10 | Staphylococcus aureus |
| 3134 | S1M10000039E01 | Staphylococcus aureus |
| 3135 | S1M10000039E08 | Staphylococcus aureus |
| 3136 | S1M10000039E09 | Staphylococcus aureus |
| 3137 | S1M10000039E10 | Staphylococcus aureus |
| 3138 | S1M10000039E11 | Staphylococcus aureus |
| 3139 | S1M10000039F02 | Staphylococcus aureus |
| 3140 | S1M10000039F03 | Staphylococcus aureus |
| 3141 | S1M10000039F05 | Staphylococcus aureus |
| 3142 | S1M10000039F07 | Staphylococcus aureus |
| 3143 | S1M10000039F08 | Staphylococcus aureus |
| 3144 | S1M10000039F09 | Staphylococcus aureus |
| 3145 | S1M10000039F10 | Staphylococcus aureus |
| 3146 | S1M10000039F12 | Staphylococcus aureus |
| 3147 | S1M10000039G03 | Staphylococcus aureus |
| 3148 | S1M10000039G04 | Staphylococcus aureus |
| 3149 | S1M10000039G07 | Staphylococcus aureus |
| 3150 | S1M10000039G10 | Staphylococcus aureus |
| 3151 | S1M10000039H02 | Staphylococcus aureus |
| 3152 | S1M10000039H03 | Staphylococcus aureus |
| 3153 | S1M10000039H04 | Staphylococcus aureus |
| 3154 | S1M10000039H06 | Staphylococcus aureus |
| 3155 | S1M10000039H07 | Staphylococcus aureus |
| 3156 | S1M10000039H08 | Staphylococcus aureus |
| 3157 | S1M10000040A04 | Staphylococcus aureus |
| 3158 | S1M10000040A05 | Staphylococcus aureus |
| 3159 | S1M10000040A07 | Staphylococcus aureus |
| 3160 | S1M10000040A08 | Staphylococcus aureus |
| 3161 | S1M10000040A10 | Staphylococcus aureus |
| 3162 | S1M10000040A11 | Staphylococcus aureus |
| 3163 | S1M10000040B01 | Staphylococcus aureus |
| 3164 | S1M10000040B03 | Staphylococcus aureus |
| 3165 | S1M10000040B07 | Staphylococcus aureus |
| 3166 | S1M10000040B11 | Staphylococcus aureus |
| 3167 | S1M10000040C03 | Staphylococcus aureus |
| 3168 | S1M10000040C04 | Staphylococcus aureus |
| 3169 | S1M10000040C05 | Staphylococcus aureus |
| 3170 | S1M10000040C06 | Staphylococcus aureus |
| 3171 | S1M10000040C07 | Staphylococcus aureus |
| 3172 | S1M10000040C08 | Staphylococcus aureus |
| 3173 | S1M10000040C10 | Staphylococcus aureus |
| 3174 | S1M10000040C11 | Staphylococcus aureus |
| 3175 | S1M10000040D01 | Staphylococcus aureus |
| 3176 | S1M10000040D03 | Staphylococcus aureus |
| 3177 | S1M10000040D08 | Staphylococcus aureus |
| 3178 | S1M10000040D09 | Staphylococcus aureus |
| 3179 | S1M10000040D11 | Staphylococcus aureus |
| 3180 | S1M10000040E01 | Staphylococcus aureus |
| 3181 | S1M10000040E02 | Staphylococcus aureus |
| 3182 | S1M10000040E04 | Staphylococcus aureus |
| 3183 | S1M10000040E05 | Staphylococcus aureus |
| 3184 | S1M10000040E06 | Staphylococcus aureus |
| 3185 | S1M10000040E07 | Staphylococcus aureus |
| 3186 | S1M10000040E09 | Staphylococcus aureus |
| 3187 | S1M10000040E10 | Staphylococcus aureus |
| 3188 | S1M10000040E11 | Staphylococcus aureus |
| 3189 | S1M10000040E12 | Staphylococcus aureus |
| 3190 | S1M10000040F01 | Staphylococcus aureus |
| 3191 | S1M10000040F02 | Staphylococcus aureus |
| 3192 | S1M10000040F03 | Staphylococcus aureus |
| 3193 | S1M10000040F04 | Staphylococcus aureus |
| 3194 | S1M10000040F05 | Staphylococcus aureus |
| 3195 | S1M10000040F06 | Staphylococcus aureus |
| 3196 | S1M10000040F08 | Staphylococcus aureus |
| 3197 | S1M10000040F09 | Staphylococcus aureus |
| 3198 | S1M10000040F12 | Staphylococcus aureus |
| 3199 | S1M10000040G01 | Staphylococcus aureus |
| 3200 | S1M10000040G02 | Staphylococcus aureus |
| 3201 | S1M10000040G04 | Staphylococcus aureus |
| 3202 | S1M10000040G07 | Staphylococcus aureus |
| 3203 | S1M10000040G08 | Staphylococcus aureus |
| 3204 | S1M10000040G12 | Staphylococcus aureus |
| 3205 | S1M10000040H02 | Staphylococcus aureus |
| 3206 | S1M10000040H03 | Staphylococcus aureus |
| 3207 | S1M10000040H04 | Staphylococcus aureus |
| 3208 | S1M10000040H05 | Staphylococcus aureus |
| 3209 | S1M10000040H07 | Staphylococcus aureus |
| 3210 | S1M10000040H10 | Staphylococcus aureus |
| 3211 | SIM10000041A03 | Staphylococcus aureus |
| 3212 | S1M10000041B02 | Staphylococcus aureus |
| 3213 | S1M10000041B03 | Staphylococcus aureus |
| 3214 | S1M10000041B05 | Staphylococcus aureus |
| 3215 | S1M10000041B06 | Staphylococcus aureus |
| 3216 | S1M10000041B07 | Staphylococcus aureus |
| 3217 | S1M10000041B12 | Staphylococcus aureus |
| 3218 | S1M10000041C08 | Staphylococcus aureus |
| 3219 | S1M10000041C10 | Staphylococcus aureus |
| 3220 | S1M10000041C11 | Staphylococcus aureus |
| 3221 | S1M10000041D06 | Staphylococcus aureus |
| 3222 | S1M10000041D07 | Staphylococcus aureus |
| 3223 | S1M10000041D08 | Staphylococcus aureus |
| 3224 | S1M10000041D10 | Staphylococcus aureus |
| 3225 | S1M10000041D12 | Staphylococcus aureus |
| 3226 | S1M10000041E03 | Staphylococcus aureus |
| 3227 | S1M10000041E06 | Staphylococcus aureus |
| 3228 | S1M10000041E09 | Staphylococcus aureus |
| 3229 | S1M10000041E12 | Staphylococcus aureus |
| 3230 | S1M10000041F03 | Staphylococcus aureus |
| 3231 | S1M10000041F11 | Staphylococcus aureus |
| 3232 | S1M10000041F12 | Staphylococcus aureus |
| 3233 | S1M10000041G01 | Staphylococcus aureus |
| 3234 | S1M10000041G06 | Staphylococcus aureus |
| 3235 | S1M10000041G08 | Staphylococcus aureus |
| 3236 | S1M10000041G10 | Staphylococcus aureus |
| 3237 | S1M10000041G11 | Staphylococcus aureus |
| 3238 | S1M10000041H01 | Staphylococcus aureus |
| 3239 | S1M10000041H04 | Staphylococcus aureus |
| 3240 | S1M10000041H05 | Staphylococcus aureus |
| 3241 | S1M10000041H07 | Staphylococcus aureus |
| 3242 | S1M10000041H08 | Staphylococcus aureus |
| 3243 | S1M10000041H09 | Staphylococcus aureus |
| 3244 | S1M10000042A04 | Staphylococcus aureus |
| 3245 | S1M10000042A05 | Staphylococcus aureus |
| 3246 | S1M10000042A06 | Staphylococcus aureus |
| 3247 | S1M10000042A07 | Staphylococcus aureus |
| 3248 | S1M10000042A09 | Staphylococcus aureus |
| 3249 | S1M10000042A11 | Staphylococcus aureus |
| 3250 | S1M10000042A12 | Staphylococcus aureus |
| 3251 | S1M10000042B02 | Staphylococcus aureus |
| 3252 | S1M10000042B03 | Staphylococcus aureus |
| 3253 | S1M10000042B06 | Staphylococcus aureus |
| 3254 | S1M10000042B07 | Staphylococcus aureus |
| 3255 | S1M10000042B08 | Staphylococcus aureus |
| 3256 | S1M10000042B09 | Staphylococcus aureus |
| 3257 | S1M10000042B10 | Staphylococcus aureus |
| 3258 | S1M10000042B11 | Staphylococcus aureus |
| 3259 | S1M10000042B12 | Staphylococcus aureus |
| 3260 | S1M10000042C02 | Staphylococcus aureus |
| 3261 | S1M10000042C06 | Staphylococcus aureus |
| 3262 | S1M10000042C10 | Staphylococcus aureus |
| 3263 | S1M10000042C11 | Staphylococcus aureus |
| 3264 | S1M10000042D04 | Staphylococcus aureus |
| 3265 | S1M10000042D07 | Staphylococcus aureus |
| 3266 | S1M10000042D10 | Staphylococcus aureus |
| 3267 | S1M10000042D11 | Staphylococcus aureus |
| 3268 | S1M10000042E03 | Staphylococcus aureus |
| 3269 | S1M10000042E06 | Staphylococcus aureus |
| 3270 | S1M10000042E08 | Staphylococcus aureus |
| 3271 | S1M10000042F01 | Staphylococcus aureus |
| 3272 | S1M10000042F02 | Staphylococcus aureus |
| 3273 | S1M10000042F05 | Staphylococcus aureus |
| 3274 | S1M10000042F06 | Staphylococcus aureus |
| 3275 | S1M10000042F08 | Staphylococcus aureus |
| 3276 | S1M10000042F09 | Staphylococcus aureus |
| 3277 | S1M10000042F10 | Staphylococcus aureus |
| 3278 | S1M10000042F11 | Staphylococcus aureus |
| 3279 | S1M10000042G01 | Staphylococcus aureus |
| 3280 | S1M10000042G03 | Staphylococcus aureus |
| 3281 | S1M10000042G08 | Staphylococcus aureus |
| 3282 | S1M10000042G09 | Staphylococcus aureus |
| 3283 | S1M10000042G12 | Staphylococcus aureus |
| 3284 | S1M10000042H05 | Staphylococcus aureus |
| 3285 | S1M10000042H07 | Staphylococcus aureus |
| 3286 | S1M10000042H11 | Staphylococcus aureus |
| 3287 | S1M10000043A02 | Staphylococcus aureus |
| 3288 | S1M10000043A03 | Staphylococcus aureus |
| 3289 | S1M10000043A04 | Staphylococcus aureus |
| 3290 | S1M10000043A06 | Staphylococcus aureus |
| 3291 | S1M10000043A07 | Staphylococcus aureus |
| 3292 | S1M10000043A08 | Staphylococcus aureus |
| 3293 | S1M10000043A10 | Staphylococcus aureus |
| 3294 | S1M10000043A11 | Staphylococcus aureus |
| 3295 | S1M10000043A12 | Staphylococcus aureus |
| 3296 | S1M10000043B01 | Staphylococcus aureus |
| 3297 | S1M10000043B02 | Staphylococcus aureus |
| 3298 | S1M10000043B07 | Staphylococcus aureus |
| 3299 | S1M10000043B08 | Staphylococcus aureus |
| 3300 | S1M10000043B09 | Staphylococcus aureus |
| 3301 | S1M10000043B10 | Staphylococcus aureus |
| 3302 | S1M10000043B12 | Staphylococcus aureus |
| 3303 | S1M10000043C02 | Staphylococcus aureus |
| 3304 | S1M10000043C07 | Staphylococcus aureus |
| 3305 | S1M10000043C11 | Staphylococcus aureus |
| 3306 | S1M10000043C12 | Staphylococcus aureus |
| 3307 | S1M10000043D01 | Staphylococcus aureus |
| 3308 | S1M10000043D02 | Staphylococcus aureus |
| 3309 | S1M10000043D04 | Staphylococcus aureus |
| 3310 | S1M10000043D10 | Staphylococcus aureus |
| 3311 | S1M10000043D12 | Staphylococcus aureus |
| 3312 | S1M10000043E02 | Staphylococcus aureus |
| 3313 | S1M10000043E03 | Staphylococcus aureus |
| 3314 | S1M10000043E05 | Staphylococcus aureus |
| 3315 | S1M10000043E07 | Staphylococcus aureus |
| 3316 | S1M10000043E08 | Staphylococcus aureus |
| 3317 | S1M10000043E10 | Staphylococcus aureus |
| 3318 | S1M10000043E11 | Staphylococcus aureus |
| 3319 | S1M10000043E12 | Staphylococcus aureus |
| 3320 | S1M10000043F01 | Staphylococcus aureus |
| 3321 | S1M10000043F05 | Staphylococcus aureus |
| 3322 | S1M10000043F07 | Staphylococcus aureus |
| 3323 | S1M10000043F08 | Staphylococcus aureus |
| 3324 | S1M10000043F09 | Staphylococcus aureus |
| 3325 | S1M10000043G01 | Staphylococcus aureus |
| 3326 | S1M10000043G04 | Staphylococcus aureus |
| 3327 | S1M10000043G05 | Staphylococcus aureus |
| 3328 | S1M10000043G09 | Staphylococcus aureus |
| 3329 | S1M10000043G10 | Staphylococcus aureus |
| 3330 | S1M10000043H01 | Staphylococcus aureus |
| 3331 | S1M10000043H03 | Staphylococcus aureus |
| 3332 | S1M10000043H04 | Staphylococcus aureus |
| 3333 | S1M10000043H05 | Staphylococcus aureus |
| 3334 | S1M10000043H06 | Staphylococcus aureus |
| 3335 | S1M10000043H09 | Staphylococcus aureus |
| 3336 | S1M10000043H10 | Staphylococcus aureus |
| 3337 | S1M10000043H11 | Staphylococcus aureus |
| 3338 | S1M10000044A02 | Staphylococcus aureus |
| 3339 | S1M10000044A06 | Staphylococcus aureus |
| 3340 | S1M10000044A08 | Staphylococcus aureus |
| 3341 | S1M10000044A09 | Staphylococcus aureus |
| 3342 | S1M10000044A11 | Staphylococcus aureus |
| 3343 | S1M10000044A12 | Staphylococcus aureus |
| 3344 | S1M10000044B01 | Staphylococcus aureus |
| 3345 | S1M10000044B02 | Staphylococcus aureus |
| 3346 | S1M10000044B05 | Staphylococcus aureus |
| 3347 | S1M10000044B06 | Staphylococcus aureus |
| 3348 | S1M10000044B08 | Staphylococcus aureus |
| 3349 | S1M10000044B11 | Staphylococcus aureus |
| 3350 | S1M10000044B12 | Staphylococcus aureus |
| 3351 | S1M10000044C04 | Staphylococcus aureus |
| 3352 | S1M10000044C06 | Staphylococcus aureus |
| 3353 | S1M10000044C07 | Staphylococcus aureus |
| 3354 | S1M10000044C08 | Staphylococcus aureus |
| 3355 | S1M10000044C11 | Staphylococcus aureus |
| 3356 | S1M10000044C12 | Staphylococcus aureus |
| 3357 | S1M10000044D01 | Staphylococcus aureus |
| 3358 | S1M10000044D04 | Staphylococcus aureus |
| 3359 | S1M10000044D06 | Staphylococcus aureus |
| 3360 | S1M10000044D08 | Staphylococcus aureus |
| 3361 | S1M10000044D09 | Staphylococcus aureus |
| 3362 | S1M10000044D10 | Staphylococcus aureus |
| 3363 | S1M10000044D11 | Staphylococcus aureus |
| 3364 | S1M10000044D12 | Staphylococcus aureus |
| 3365 | S1M10000044E01 | Staphylococcus aureus |
| 3366 | S1M10000044E02 | Staphylococcus aureus |
| 3367 | S1M10000044E06 | Staphylococcus aureus |
| 3368 | S1M10000044E07 | Staphylococcus aureus |
| 3369 | S1M10000044E09 | Staphylococcus aureus |
| 3370 | S1M10000044E10 | Staphylococcus aureus |
| 3371 | S1M10000044E11 | Staphylococcus aureus |
| 3372 | S1M10000044F02 | Staphylococcus aureus |
| 3373 | S1M10000044F06 | Staphylococcus aureus |
| 3374 | S1M10000044F08 | Staphylococcus aureus |
| 3375 | S1M10000044F10 | Staphylococcus aureus |
| 3376 | S1M10000044G02 | Staphylococcus aureus |
| 3377 | S1M10000044G05 | Staphylococcus aureus |
| 3378 | S1M10000044G08 | Staphylococcus aureus |
| 3379 | S1M10000044G10 | Staphylococcus aureus |
| 3380 | S1M10000044G11 | Staphylococcus aureus |
| 3381 | S1M10000044H06 | Staphylococcus aureus |
| 3382 | S1M10000044H07 | Staphylococcus aureus |
| 3383 | S1M10000044H08 | Staphylococcus aureus |
| 3384 | S1M10000044H09 | Staphylococcus aureus |
| 3385 | S1M10000044H10 | Staphylococcus aureus |
| 3386 | S1M10000044H11 | Staphylococcus aureus |
| 3387 | S1M10000045A02 | Staphylococcus aureus |
| 3388 | S1M10000045A06 | Staphylococcus aureus |
| 3389 | S1M10000045A07 | Staphylococcus aureus |
| 3390 | S1M10000045A08 | Staphylococcus aureus |
| 3391 | S1M10000045A12 | Staphylococcus aureus |
| 3392 | S1M10000045B01 | Staphylococcus aureus |
| 3393 | S1M10000045B02 | Staphylococcus aureus |
| 3394 | S1M10000045B03 | Staphylococcus aureus |
| 3395 | S1M10000045B07 | Staphylococcus aureus |
| 3396 | S1M10000045B10 | Staphylococcus aureus |
| 3397 | S1M10000045B11 | Staphylococcus aureus |
| 3398 | S1M10000045B12 | Staphylococcus aureus |
| 3399 | S1M10000045C02 | Staphylococcus aureus |
| 3400 | S1M10000045C03 | Staphylococcus aureus |
| 3401 | S1M10000045C04 | Staphylococcus aureus |
| 3402 | S1M10000045C05 | Staphylococcus aureus |
| 3403 | S1M10000045C07 | Staphylococcus aureus |
| 3404 | S1M10000045C09 | Staphylococcus aureus |
| 3405 | S1M10000045D01 | Staphylococcus aureus |
| 3406 | S1M10000045D03 | Staphylococcus aureus |
| 3407 | S1M10000045D07 | Staphylococcus aureus |
| 3408 | S1M10000045D08 | Staphylococcus aureus |
| 3409 | S1M10000045D09 | Staphylococcus aureus |
| 3410 | S1M10000045D10 | Staphylococcus aureus |
| 3411 | S1M10000045D11 | Staphylococcus aureus |
| 3412 | S1M10000045D12 | Staphylococcus aureus |
| 3413 | S1M10000045E04 | Staphylococcus aureus |
| 3414 | S1M10000045E05 | Staphylococcus aureus |
| 3415 | S1M10000045E08 | Staphylococcus aureus |
| 3416 | S1M10000045E09 | Staphylococcus aureus |
| 3417 | S1M10000045E10 | Staphylococcus aureus |
| 3418 | S1M10000045E11 | Staphylococcus aureus |
| 3419 | S1M10000045E12 | Staphylococcus aureus |
| 3420 | S1M10000045F04 | Staphylococcus aureus |
| 3421 | S1M10000045F05 | Staphylococcus aureus |
| 3422 | S1M10000045F08 | Staphylococcus aureus |
| 3423 | S1M10000045F11 | Staphylococcus aureus |
| 3424 | S1M10000045F12 | Staphylococcus aureus |
| 3425 | S1M10000045G03 | Staphylococcus aureus |
| 3426 | S1M10000045G06 | Staphylococcus aureus |
| 3427 | S1M10000045G07 | Staphylococcus aureus |
| 3428 | S1M10000045G08 | Staphylococcus aureus |
| 3429 | S1M10000045G10 | Staphylococcus aureus |
| 3430 | S1M10000045G12 | Staphylococcus aureus |
| 3431 | S1M10000045H06 | Staphylococcus aureus |
| 3432 | S1M10000045H10 | Staphylococcus aureus |
| 3433 | S1M10000045H11 | Staphylococcus aureus |
| 3434 | S1M10000046A03 | Staphylococcus aureus |
| 3435 | S1M10000046A04 | Staphylococcus aureus |
| 3436 | S1M10000046A06 | Staphylococcus aureus |
| 3437 | S1M10000046A08 | Staphylococcus aureus |
| 3438 | S1M10000046A09 | Staphylococcus aureus |
| 3439 | S1M10000046A11 | Staphylococcus aureus |
| 3440 | S1M10000046A12 | Staphylococcus aureus |
| 3441 | S1M10000046B01 | Staphylococcus aureus |
| 3442 | S1M10000046B03 | Staphylococcus aureus |
| 3443 | S1M10000046B04 | Staphylococcus aureus |
| 3444 | S1M10000046B05 | Staphylococcus aureus |
| 3445 | S1M10000046B07 | Staphylococcus aureus |
| 3446 | S1M10000046B08 | Staphylococcus aureus |
| 3447 | S1M10000046B09 | Staphylococcus aureus |
| 3448 | S1M10000046B11 | Staphylococcus aureus |
| 3449 | S1M10000046B12 | Staphylococcus aureus |
| 3450 | S1M10000046C02 | Staphylococcus aureus |
| 3451 | S1M10000046C04 | Staphylococcus aureus |
| 3452 | S1M10000046C05 | Staphylococcus aureus |
| 3453 | S1M10000046C06 | Staphylococcus aureus |
| 3454 | S1M10000046C07 | Staphylococcus aureus |
| 3455 | S1M10000046C08 | Staphylococcus aureus |
| 3456 | S1M10000046C11 | Staphylococcus aureus |
| 3457 | S1M10000046C12 | Staphylococcus aureus |
| 3458 | S1M10000046D01 | Staphylococcus aureus |
| 3459 | S1M10000046D02 | Staphylococcus aureus |
| 3460 | S1M10000046D03 | Staphylococcus aureus |
| 3461 | S1M10000046D04 | Staphylococcus aureus |
| 3462 | S1M10000046D05 | Staphylococcus aureus |
| 3463 | S1M10000046D08 | Staphylococcus aureus |
| 3464 | S1M10000046D09 | Staphylococcus aureus |
| 3465 | S1M10000046D10 | Staphylococcus aureus |
| 3466 | S1M10000046D11 | Staphylococcus aureus |
| 3467 | S1M10000046D12 | Staphylococcus aureus |
| 3468 | S1M10000046E01 | Staphylococcus aureus |
| 3469 | S1M10000046E02 | Staphylococcus aureus |
| 3470 | S1M10000046E04 | Staphylococcus aureus |
| 3471 | S1M10000046E07 | Staphylococcus aureus |
| 3472 | S1M10000046E08 | Staphylococcus aureus |
| 3473 | S1M10000046E10 | Staphylococcus aureus |
| 3474 | S1M10000046F01 | Staphylococcus aureus |
| 3475 | S1M10000046F02 | Staphylococcus aureus |
| 3476 | S1M10000046F05 | Staphylococcus aureus |
| 3477 | S1M10000046F06 | Staphylococcus aureus |
| 3478 | S1M10000046F08 | Staphylococcus aureus |
| 3479 | S1M10000046F09 | Staphylococcus aureus |
| 3480 | S1M10000046F10 | Staphylococcus aureus |
| 3481 | S1M10000046F12 | Staphylococcus aureus |
| 3482 | S1M10000046G01 | Staphylococcus aureus |
| 3483 | S1M10000046G02 | Staphylococcus aureus |
| 3484 | S1M10000046G03 | Staphylococcus aureus |
| 3485 | S1M10000046G04 | Staphylococcus aureus |
| 3486 | S1M10000046G07 | Staphylococcus aureus |
| 3487 | S1M10000046G09 | Staphylococcus aureus |
| 3488 | S1M10000046G10 | Staphylococcus aureus |
| 3489 | S1M10000046H01 | Staphylococcus aureus |
| 3490 | S1M10000046H10 | Staphylococcus aureus |
| 3491 | S1M10000047A03 | Staphylococcus aureus |
| 3492 | S1M10000047A04 | Staphylococcus aureus |
| 3493 | S1M10000047A05 | Staphylococcus aureus |
| 3494 | S1M10000047A06 | Staphylococcus aureus |
| 3495 | S1M10000047A07 | Staphylococcus aureus |
| 3496 | S1M10000047A08 | Staphylococcus aureus |
| 3497 | S1M10000047A09 | Staphylococcus aureus |
| 3498 | S1M10000047A10 | Staphylococcus aureus |
| 3499 | S1M10000047A11 | Staphylococcus aureus |
| 3500 | S1M10000047A12 | Staphylococcus aureus |
| 3501 | S1M10000047B02 | Staphylococcus aureus |
| 3502 | S1M10000047B04 | Staphylococcus aureus |
| 3503 | S1M10000047BOS | Staphylococcus aureus |
| 3504 | S1M10000047B06 | Staphylococcus aureus |
| 3505 | S1M10000047B08 | Staphylococcus aureus |
| 3506 | S1M10000047B09 | Staphylococcus aureus |
| 3507 | S1M10000047B10 | Staphylococcus aureus |
| 3508 | S1M10000047B12 | Staphylococcus aureus |
| 3509 | S1M10000047C01 | Staphylococcus aureus |
| 3510 | S1M10000047C02 | Staphylococcus aureus |
| 3511 | S1M10000047C03 | Staphylococcus aureus |
| 3512 | S1M10000047C04 | Staphylococcus aureus |
| 3513 | S1M10000047C06 | Staphylococcus aureus |
| 3514 | S1M10000047C08 | Staphylococcus aureus |
| 3515 | S1M10000047C09 | Staphylococcus aureus |
| 3516 | S1M10000047C11 | Staphylococcus aureus |
| 3517 | S1M10000047C12 | Staphylococcus aureus |
| 3518 | S1M10000047D02 | Staphylococcus aureus |
| 3519 | S1M10000047D03 | Staphylococcus aureus |
| 3520 | S1M10000047D04 | Staphylococcus aureus |
| 3521 | S1M10000047D05 | Staphylococcus aureus |
| 3522 | S1M10000047D09 | Staphylococcus aureus |
| 3523 | S1M10000047D10 | Staphylococcus aureus |
| 3524 | S1M10000047D11 | Staphylococcus aureus |
| 3525 | S1M10000047D12 | Staphylococcus aureus |
| 3526 | S1M10000047E01 | Staphylococcus aureus |
| 3527 | S1M10000047E02 | Staphylococcus aureus |
| 3528 | S1M10000047E03 | Staphylococcus aureus |
| 3529 | S1M10000047E04 | Staphylococcus aureus |
| 3530 | S1M10000047E05 | Staphylococcus aureus |
| 3531 | S1M10000047E06 | Staphylococcus aureus |
| 3532 | S1M10000047E08 | Staphylococcus aureus |
| 3533 | S1M10000047E09 | Staphylococcus aureus |
| 3534 | S1M10000047E10 | Staphylococcus aureus |
| 3535 | S1M10000047E11 | Staphylococcus aureus |
| 3536 | S1M10000047E12 | Staphylococcus aureus |
| 3537 | S1M10000047F02 | Staphylococcus aureus |
| 3538 | S1M10000047F03 | Staphylococcus aureus |
| 3539 | S1M10000047F04 | Staphylococcus aureus |
| 3540 | S1M10000047F05 | Staphylococcus aureus |
| 3541 | S1M10000047F06 | Staphylococcus aureus |
| 3542 | S1M10000047F07 | Staphylococcus aureus |
| 3543 | S1M10000047F08 | Staphylococcus aureus |
| 3544 | S1M10000047F09 | Staphylococcus aureus |
| 3545 | S1M10000047F10 | Staphylococcus aureus |
| 3546 | S1M10000047F11 | Staphylococcus aureus |
| 3547 | S1M10000047F12 | Staphylococcus aureus |
| 3548 | S1M10000047G01 | Staphylococcus aureus |
| 3549 | S1M10000047G02 | Staphylococcus aureus |
| 3550 | S1M10000047G04 | Staphylococcus aureus |
| 3551 | S1M10000047G05 | Staphylococcus aureus |
| 3552 | S1M10000047G06 | Staphylococcus aureus |
| 3553 | S1M10000047G07 | Staphylococcus aureus |
| 3554 | S1M10000047G08 | Staphylococcus aureus |
| 3555 | S1M10000047G09 | Staphylococcus aureus |
| 3556 | S1M10000047G10 | Staphylococcus aureus |
| 3557 | S1M10000047H03 | Staphylococcus aureus |
| 3558 | S1M10000047H04 | Staphylococcus aureus |
| 3559 | S1M10000047H05 | Staphylococcus aureus |
| 3560 | S1M10000047H06 | Staphylococcus aureus |
| 3561 | S1M10000047H07 | Staphylococcus aureus |
| 3562 | S1M10000047H08 | Staphylococcus aureus |
| 3563 | S1M10000047H09 | Staphylococcus aureus |
| 3564 | S1M10000047H11 | Staphylococcus aureus |
| 3565 | S1M10000048A02 | Staphylococcus aureus |
| 3566 | S1M10000048A03 | Staphylococcus aureus |
| 3567 | S1M10000048A04 | Staphylococcus aureus |
| 3568 | S1M10000048A05 | Staphylococcus aureus |
| 3569 | S1M10000048A06 | Staphylococcus aureus |
| 3570 | S1M10000048A07 | Staphylococcus aureus |
| 3571 | S1M10000048A09 | Staphylococcus aureus |
| 3572 | S1M10000048A10 | Staphylococcus aureus |
| 3573 | S1M10000048A11 | Staphylococcus aureus |
| 3574 | S1M10000048A12 | Staphylococcus aureus |
| 3575 | S1M10000048B02 | Staphylococcus aureus |
| 3576 | S1M10000048B05 | Staphylococcus aureus |
| 3577 | S1M10000048B08 | Staphylococcus aureus |
| 3578 | S1M10000048B10 | Staphylococcus aureus |
| 3579 | S1M10000048B11 | Staphylococcus aureus |
| 3580 | S1M10000048B12 | Staphylococcus aureus |
| 3581 | S1M10000048C01 | Staphylococcus aureus |
| 3582 | S1M10000048C02 | Staphylococcus aureus |
| 3583 | S1M10000048C03 | Staphylococcus aureus |
| 3584 | S1M10000048C05 | Staphylococcus aureus |
| 3585 | S1M10000048C06 | Staphylococcus aureus |
| 3586 | S1M10000048C07 | Staphylococcus aureus |
| 3587 | S1M10000048C08 | Staphylococcus aureus |
| 3588 | S1M10000048C09 | Staphylococcus aureus |
| 3589 | S1M10000048C11 | Staphylococcus aureus |
| 3590 | S1M10000048D02 | Staphylococcus aureus |
| 3591 | S1M10000048D08 | Staphylococcus aureus |
| 3592 | S1M10000048D09 | Staphylococcus aureus |
| 3593 | S1M10000048D10 | Staphylococcus aureus |
| 3594 | S1M10000048D12 | Staphylococcus aureus |
| 3595 | S1M10000048E02 | Staphylococcus aureus |
| 3596 | S1M10000048E03 | Staphylococcus aureus |
| 3597 | S1M10000048E04 | Staphylococcus aureus |
| 3598 | S1M10000048E06 | Staphylococcus aureus |
| 3599 | S1M10000048E07 | Staphylococcus aureus |
| 3600 | S1M10000048E08 | Staphylococcus aureus |
| 3601 | S1M10000048E10 | Staphylococcus aureus |
| 3602 | S1M10000048F02 | Staphylococcus aureus |
| 3603 | S1M10000048F07 | Staphylococcus aureus |
| 3604 | S1M10000048F08 | Staphylococcus aureus |
| 3605 | S1M10000048F09 | Staphylococcus aureus |
| 3606 | S1M10000048F11 | Staphylococcus aureus |
| 3607 | S1M10000048F12 | Staphylococcus aureus |
| 3608 | S1M10000048G02 | Staphylococcus aureus |
| 3609 | S1M10000048G03 | Staphylococcus aureus |
| 3610 | S1M10000048G04 | Staphylococcus aureus |
| 3611 | S1M10000048G05 | Staphylococcus aureus |
| 3612 | S1M10000048G07 | Staphylococcus aureus |
| 3613 | S1M10000048G10 | Staphylococcus aureus |
| 3614 | S1M10000048G11 | Staphylococcus aureus |
| 3615 | S1M10000048H01 | Staphylococcus aureus |
| 3616 | S1M10000048H02 | Staphylococcus aureus |
| 3617 | S1M10000048H03 | Staphylococcus aureus |
| 3618 | S1M10000048H04 | Staphylococcus aureus |
| 3619 | S1M10000048H05 | Staphylococcus aureus |
| 3620 | S1M10000048H07 | Staphylococcus aureus |
| 3621 | S1M10000048H08 | Staphylococcus aureus |
| 3622 | S1M10000048H09 | Staphylococcus aureus |
| 3623 | S1M10000048H10 | Staphylococcus aureus |
| 3624 | S1M10000048H11 | Staphylococcus aureus |
| 3625 | S1M10000009E10 | Staphylococcus aureus |
| 3626 | S1M10000001F01 | Staphylococcus aureus |
| 3627 | S1M10000006B12 | Staphylococcus aureus |
| 3628 | S1M10000003D09 | Staphylococcus aureus |
| 3629 | S1M10000001D11 | Staphylococcus aureus |
| 3630 | S1M10000003B07 | Staphylococcus aureus |
| 3631 | S1M10000002A07 | Staphylococcus aureus |
| 3632 | S1M10000003F11 | Staphylococcus aureus |
| 3633 | S1M10000047C07 | Staphylococcus aureus |
| 3634 | S1M10000013F10 | Staphylococcus aureus |
| 3635 | S1M10000014D11 | Staphylococcus aureus |
| 3636 | S1M10000015F05 | Staphylococcus aureus |
| 3637 | S1M10000048D01 | Staphylococcus aureus |
| 3638 | S1M10000011C03 | Staphylococcus aureus |
| 3639 | S1M10000012F03 | Staphylococcus aureus |
| 3640 | S1M10000002F07 | Staphylococcus aureus |
| 3641 | S1M10000048G01 | Staphylococcus aureus |
| 3642 | S1M10000009G12 | Staphylococcus aureus |
| 3643 | S1M10000012D05 | Staphylococcus aureus |
| 3644 | S1M10000014D07 | Staphylococcus aureus |
| 3645 | S1M10000047C05 | Staphylococcus aureus |
| 3646 | S1M10000018D08* | Staphylococcus aureus |
| 3647 | S1M10000047B01 | Staphylococcus aureus |
| 3648 | S1M10000047H10 | Staphylococcus aureus |
| 3649 | S1M10000001A04 | Staphylococcus aureus |
| 3650 | S1M10000016E01 | Staphylococcus aureus |
| 3651 | S1M10000017E12 | Staphylococcus aureus |
| 3652 | S1M10000019B01 | Staphylococcus aureus |
| 3653 | S1M10000048F03 | Staphylococcus aureus |
| 3654 | S1M10000034A07 | Staphylococcus aureus |
| 3655 | S1M10000023G01 | Staphylococcus aureus |
| 3656 | S1M10000021G12 | Staphylococcus aureus |
| 3657 | S1M10000024E04 | Staphylococcus aureus |
| 3658 | S1M10000028H08 | Staphylococcus aureus |
| 3659 | S1M10000022B07 | Staphylococcus aureus |
| 3660 | S1M10000003A05 | Staphylococcus aureus |
| 3661 | S1M10000003AO9 | Staphylococcus aureus |
| 3662 | S1M10000003E01 | Staphylococcus aureus |
| 3663 | S1M10000004C11 | Staphylococcus aureus |
| 3664 | S1M10000007E08 | Staphylococcus aureus |
| 3665 | S1M10000021G06 | Staphylococcus aureus |
| 3666 | S1M10000024C06 | Staphylococcus aureus |
| 3667 | S1M10000024D01 | Staphylococcus aureus |
| 3668 | S1M10000027D07 | Staphylococcus aureus |
| 3669 | S1M10000027E03 | Staphylococcus aureus |
| 3670 | S1M10000027G01 | Staphylococcus aureus |
| 3671 | S1M10000029A03 | Staphylococcus aureus |
| 3672 | S1M10000032B10 | Staphylococcus aureus |
| 3673 | S1M10000032C07 | Staphylococcus aureus |
| 3674 | S1M10000038D04 | Staphylococcus aureus |
| 3675 | S1M10000047D07 | Staphylococcus aureus |
| 3676 | S1M10000048B03 | Staphylococcus aureus |
| 3677 | S1M10000048B06 | Staphylococcus aureus |
| 3678 | S1M10000048C10 | Staphylococcus aureus |
| 3679 | S1M10000048F05 | Staphylococcus aureus |
| 3680 | S4M10000001C01 | Salmonella typhimurium |
| 3681 | S4M10000002B06 | Salmonella typhimurium |
| 3682 | S4M10000002B09 | Salmonella typhimurium |
| 3683 | S4M10000002G04 | Salmonella typhimurium |
| 3684 | S4M10000002G08 | Salmonella typhimurium |
| 3685 | S4M10000005G05 | Salmonella typhimurium |
| 3686 | S4M10000005H02 | Salmonella typhimurium |
| 3687 | S4M10000006A06 | Salmonella typhimurium |
| 3688 | S4M10000006A08 | Salmonella typhimurium |
| 3689 | S4M10000006C05 | Salmonella typhimurium |
| 3690 | S4M10000006F08 | Salmonella typhimurium |
| 3691 | S4M10000007G01 | Salmonella typhimurium |
| 3692 | S4M10000008C08 | Salmonella typhimurium |
| 3693 | S4M10000008H10 | Salmonella typhimurium |
| 3694 | S4M10000009A05 | Salmonella typhimurium |
| 3695 | S4M10000010B05 | Salmonella typhimurium |
| 3696 | S4M10000010D04 | Salmonella typhimurium |
| 3697 | S4M10000010H04 | Salmonella typhimurium |
| 3698 | S4M10000011D08 | Salmonella typhimurium |
| 3699 | S4M10000011E08 | Salmonella typhimurium |
| 3700 | S4M10000012B06 | Salmonella typhimurium |
| 3701 | S4M10000012B12 | Salmonella typhimurium |
| 3702 | S4M10000012D02 | Salmonella typhimurium |
| 3703 | S4M10000013H02 | Salmonella typhimurium |
| 3704 | S4M10000014B05 | Salmonella typhimurium |
| 3705 | S4M10000014D04 | Salmonella typhimurium |
| 3706 | S4M10000014D07 | Salmonella typhimurium |
| 3707 | S4M10000014H02 | Salmonella typhimurium |
| 3708 | S4M10000015B11 | Salmonella typhimurium |
| 3709 | S4M10000015E09 | Salmonella typhimurium |
| 3710 | S4M10000016A02 | Salmonella typhimurium |
| 3711 | S4M10000018D09 | Salmonella typhimurium |
| 3712 | S4M10000018E10 | Salmonella typhimurium |
| 3713 | S4M10000018F10 | Salmonella typhimurium |
| 3714 | S4M10000018G03 | Salmonella typhimurium |
| 3715 | S4M10000018H04 | Salmonella typhimurium |
| 3716 | S4M10000019F05 | Salmonella typhimurium |
| 3717 | S4M10000019G04 | Salmonella typhimurium |
| 3718 | S4M10000019G05 | Salmonella typhimurium |
| 3719 | S4M10000019H06 | Salmonella typhimurium |
| 3720 | S4M10000020A04 | Salmonella typhimurium |
| 3721 | S4M10000020F05 | Salmonella typhimurium |
| 3722 | S4M10000020G10 | Salmonella typhimurium |
| 3723 | S4M10000022D04 | Salmonella typhimurium |
| 3724 | S4M10000022D12 | Salmonella typhimurium |
| 3725 | S4M10000022E12 | Salmonella typhimurium |
| 3726 | S4M10000022G07 | Salmonella typhimurium |
| 3727 | S4M10000022H06 | Salmonella typhimurium |
| 3728 | S4M10000023F01 | Salmonella typhimurium |
| 3729 | S4M10000024B02 | Salmonella typhimurium |
| 3730 | S4M10000024C06 | Salmonella typhimurium |
| 3731 | S4M10000024C11 | Salmonella typhimurium |
| 3732 | S4M10000024F08 | Salmonella typhimurium |
| 3733 | S4M10000024G01 | Salmonella typhimurium |
| 3734 | S4M10000024G04 | Salmonella typhimurium |
| 3735 | S4M10000024G09 | Salmonella typhimurium |
| 3736 | S4M10000024H02 | Salmonella typhimurium |
| 3737 | S4M10000025A11 | Salmonella typhimurium |
| 3738 | S4M10000025E02 | Salmonella typhimurium |
| 3739 | S4M10000025E05 | Salmonella typhimurium |
| 3740 | S4M10000025H07 | Salmonella typhimurium |
| 3741 | S4M10000026C10 | Salmonella typhimurium |
| 3742 | S4M10000026D04 | Salmonella typhimurium |
| 3743 | S4M10000026E06 | Salmonella typhimurium |
| 3744 | S4M10000026E12 | Salmonella typhimurium |
| 3745 | S4M10000027C10 | Salmonella typhimurium |
| 3746 | S4M10000027E02 | Salmonella typhimurium |
| 3747 | S4M10000029B12 | Salmonella typhimurium |
| 3748 | S4M10000029D12 | Salmonella typhimurium |
| 3749 | S4M10000030D03 | Salmonella typhimurium |
| 3750 | S4M10000030F07 | Salmonella typhimurium |
| 3751 | S4M10000030G11 | Salmonella typhimurium |
| 3752 | S4M10000032B12 | Salmonella typhimurium |
| 3753 | S4M10000033F08 | Salmonella typhimurium |
| 3754 | S4M10000033G05 | Salmonella typhimurium |
| 3755 | S4M10000033G09 | Salmonella typhimurium |
| 3756 | S4M10000034A02 | Salmonella typhimurium |
| 3757 | S4M10000034A09 | Salmonella typhimurium |
| 3758 | S4M10000034D06 | Salmonella typhimurium |
| 3759 | S4M10000034H05 | Salmonella typhimurium |
| 3760 | S4M10000034H09 | Salmonella typhimurium |
| 3761 | S4M10000035B01 | Salmonella typhimurium |
| 3762 | S4M10000035D01 | Salmonella typhimurium |
| 3763 | S4M10000035D02 | Salmonella typhimurium |
| 3764 | S4M10000035E03 | Salmonella typhimurium |
| 3765 | S4M10000035F02 | Salmonella typhimurium |
| 3766 | S4M10000035F09 | Salmonella typhimurium |
| 3767 | S4M10000036D07 | Salmonella typhimurium |
| 3768 | S4M10000036F07 | Salmonella typhimurium |
| 3769 | S4M10000037A04 | Salmonella typhimurium |
| 3770 | S4M10000037A10 | Salmonella typhimurium |
| 3771 | S4M10000037E10 | Salmonella typhimurium |
| 3772 | S4M10000037H09 | Salmonella typhimurium |
| 3773 | S4M10000001H01 | Salmonella typhimurium |
| 3774 | S4M10000002F06 | Salmonella typhimurium |
| 3775 | S4M10000008D01 | Salmonella typhimurium |
| 3776 | S4M10000009G11 | Salmonella typhimurium |
| 3777 | S4M10000011F09 | Salmonella typhimurium |
| 3778 | S4M10000020F08 | Salmonella typhimurium |
| 3779 | S4M10000021E07 | Salmonella typhimurium |
| 3780 | S4M10000022B05 | Salmonella typhimurium |
| 3781 | S4M10000025H11 | Salmonella typhimurium |
| 3782 | S4M10000026B10 | Salmonella typhimurium |
| 3783 | S4M10000026E03 | Salmonella typhimurium |
| 3784 | S4M10000029A03 | Salmonella typhimurium |
| 3785 | S4M10000029C11 | Salmonella typhimurium |
| 3786 | S4M10000030F06 | Salmonella typhimurium |
| 3787 | S4M10000032F03 | Salmonella typhimurium |
| 3788 | S4M10000032G01 | Salmonella typhimurium |
| 3789 | S4M10000034C05 | Salmonella typhimurium |
| 3790 | S4M10000034H04 | Salmonella typhimurium |
| 3791 | S4M10000035A09 | Salmonella typhimurium |
| 3792 | S4M10000035B06 | Salmonella typhimurium |
| 3793 | S4M10000035F01 | Salmonella typhimurium |
| 3794 | S4M10000037A08 | Salmonella typhimurium |
| 3795 | S4M10000037E03 | Salmonella typhimurium |

[0879] TABLE 1B

| | | | | | full length |
|---|---|---|---|---|---|
| | | | | | ORF |
| | Clone | | Gene Seq ID | | Protein Seq |
| Clone name | Seq ID | PathoSeq Locus | (protein) | Genemarked gene | ID |
| E3M10000001A02 | 8 | EFA101409 | 4934 | EFA1c0022_orf_11p | 10524 |
| E3M10000001A06 | 9 | EFA100642 | 4884 | EFA1c0041_orf_56p | 10792 |
| E3M10000001B01 | 10 | EFA101409 | 4934 | EFA1c0022_orf_11p | 10524 |
| E3M10000001B02 | 11 | EFA100739 | 4888 | EFA1c0022_orf_23p | 10537 |
| E3M10000001B02 | 11 | EFA102549 | 5000 | EFA1c0022_orf_24p | 10538 |
| E3M10000001B02 | 11 | EFA1025S1 | 5001 | EFA1c0022_orf_25p | 10539 |
| E3M10000001B05 | 12 | EFA101165 | 4922 | EFA1c0022_orf_8p | 10559 |
| E3M10000001B06 | 13 | EFA101164 | 4921 | EFA1c0022_orf_7p | 10558 |
| E3M10000001B08 | 14 | EFA100642 | 4884 | EFA1c0041_orf_56p | 10792 |
| E3M10000001B10 | 15 | EFA101409 | 4934 | EFA1c0022_orf_11p | 10524 |
| E3M10000001C02 | 16 | EFA103038 | 5017 | EFA1c0030_orf_17p | 10613 |
| E3M10000001C09 | 17 | EFA103021 | 5015 | EFA1c0030_orf_16p | 10612 |
| E3M10000001D02 | 18 | EFA101159 | 4916 | EFA1c0022_orf_2p | 10543 |
| E3M10000001D04 | 19 | EFA100742 | 4891 | EFA1c0022_orf_20p | 10534 |
| E3M10000001D04 | 19 | EFA101417 | 4942 | EFA1c0022_orf_18p | 10531 |
| E3M10000001D04 | 19 | EFA102554 | 5002 | EFA1c0022_orf_19p | 10532 |
| E3M10000001D05 | 20 | EFA100955 | 4902 | EFA1c0022_orf_28p | 10542 |
| E3M10000001D05 | 20 | EFA100978 | 4904 | EFA1c0022_orf_27p | 10541 |
| E3M10000001D09 | 21 | EFA100210 | 4870 | EFA1c0022_orf_9p | 10560 |
| E3M10000001D09 | 21 | EFA100211 | 4871 | EFA1c0022_orf_10p | 10523 |
| B3M10000001E01 | 22 | EFA101162 | 4919 | EFA1c0022_orf_5p | 10555 |
| E3M10000001E01 | 22 | EFA101163 | 4920 | EFA1c0022_orf_6p | 10557 |
| E3M10000001E02 | 23 | EFA103038 | 5017 | EFA1c0030_orf_17p | 10613 |
| E3M10000001E03 | 24 | EFA100210 | 4870 | EFA1c0022_orf_9p | 10560 |
| E3M10000001E03 | 24 | EFA100211 | 4871 | EFA1c0022_orf_10p | 10523 |
| E3M10000001E04 | 25 | EFA100642 | 4884 | EFA1c0041_orf_56p | 10792 |
| E3M10000001E08 | 26 | EFA102502 | 4995 | EFA1c0031_orf_36p | 10627 |
| E3M10000001E09 | 27 | EFA100210 | 4870 | EFA1c0022_orf_9p | 10560 |
| E3M10000001E09 | 27 | EFA100211 | 4871 | EFA1c0022_orf_10p | 10523 |
| E3M10000001F02 | 28 | EFA102502 | 4995 | EFA1c0031_orf_36p | 10627 |
| E3M10000001F04 | 29 | EFA102541 | 4998 | EFA1c0028_orf_3p | 10602 |
| E3M10000001F06 | 30 | EFA100642 | 4884 | EFA1c0041_orf_56p | 10792 |
| E3M10000001F07 | 31 | EFA101164 | 4921 | EFA1c0022_orf_7p | 10558 |
| E3M10000001G02 | 32 | EFA101409 | 4934 | EFA1c0022_orf_11p | 10524 |
| E3M10000001G03 | 33 | EFA100210 | 4870 | EFA1c0022_orf_9p | 10560 |
| E3M10000001G03 | 33 | EFA100211 | 4871 | EFA1c0022_orf_10p | 10523 |
| E3M10000001G04 | 34 | EFA101165 | 4922 | EFA1c0022_orf_8p | 10559 |
| E3M10000001G05 | 35 | EFA101160 | 4917 | EFA1c0022_orf_3p | 10549 |
| E3M10000001H02 | 36 | EFA102541 | 4998 | EFA1c0028_orf_3p | 10602 |
| E3M10000001H03 | 37 | EFA100210 | 4870 | EFA1c0022_orf_9p | 10560 |
| E3M10000001H03 | 37 | EFA100211 | 4871 | EFA1c0022_orf_10p | 10523 |
| E3M10000001H04 | 38 | EFA100742 | 4891 | EFA1c0022_orf_20p | 10534 |
| E3M10000001H04 | 38 | EFA101417 | 4942 | EFA1c0022_orf_18p | 10531 |
| E3M10000001H04 | 38 | EFA102554 | 5002 | EFA1c0022_orf_19p | 10532 |
| E3M10000004A04 | 39 | EFA101417 | 4942 | EFA1c0022_orf_18p | 10531 |
| E3M10000004A04 | 39 | EFA102554 | 5002 | EFA1c0022_orf_19p | 10532 |
| E3M10000004C03 | 40 | EFA100478 | 4880 | EFA1c0012_orf_2p | 10486 |
| E3M10000004D01 | 41 | EFA101412 | 4937 | EFA1c0022_orf_14p | 10527 |
| E3M10000004D01 | 41 | EFA101413 | 4938 | #N/A | #N/A |
| E3M10000004D01 | 41 | EFA101414 | 4939 | EFA1c0022_orf_15p | 10528 |
| E3M10000004D02 | 42 | EFA102022 | 4974 | EFA1c0044_orf_106p | 10881 |
| E3M10000004D02 | 42 | EFA102023 | 4975 | EFA1c0044_orf_107p | 10882 |
| E3M10000004D10 | 43 | EFA101162 | 4919 | EFA1c0022_orf_5p | 10555 |
| E3M10000004D10 | 43 | EFA101163 | 4920 | EFA1c0022_orf_6p | 10557 |
| E3M10000004E11 | 44 | EFA101086 | 4910 | EFA1c0240_orf_90p | 10763 |
| E3M10000004F08 | 45 | EFA102549 | 5000 | EFA1c0022_orf_24p | 10538 |
| E3M10000004F08 | 45 | EFA102551 | 5001 | EFA1c0022_orf_25p | 10539 |
| B3M10000004F10 | 46 | EFA101086 | 4910 | EFA1c0040_orf_90p | 10763 |
| E3M10000004G01 | 47 | EFA103021 | 5015 | EFA1c0030_orf_16p | 10612 |
| E3M10000004H11 | 48 | EFA102549 | 5000 | EFA1c0022_orf_24p | 10538 |
| E3M10000004H11 | 48 | EFA102551 | 5001 | EFA1c0022_orf_25p | 10539 |
| E3M10000005A07 | 49 | EFA102541 | 4998 | EFA1c0028_orf_3p | 10602 |
| E3M10000005B01 | 50 | EFA101414 | 4939 | EFA1c0022_orf_15p | 10528 |
| E3M10000005B01 | 50 | EFA101415 | 4940 | EFA1c0022_orf_16p | 10529 |
| E3M10000005B08 | 51 | EFA102549 | 5000 | EFA1c0022_orf_24p | 10538 |
| E3M10000005B08 | 51 | EFA102551 | 5001 | EFA1c0022_orf_25p | 10539 |
| E3M10000005C01 | 52 | EFA103021 | 5015 | EFA1c0030_orf_16p | 10612 |
| E3M10000005C03 | 53 | EFA102541 | 4998 | EFA1c0028_orf_3p | 10602 |
| E3M10000005C04 | 54 | EFA102186 | 4981 | EFA1c0045_orf_94p | 10949 |
| E3M10000005C04 | 54 | EFA102453 | 4993 | EFA1c0045_orf_203p | 10931 |
| E3M10000005C04 | 54 | EFA102728 | 5006 | EFA1c0045_orf_93p | 10948 |
| E3M10000005D03 | 55 | EFA102541 | 4998 | EFA1c0028_orf_3p | 10602 |
| E3M10000005D04 | 56 | EFA103021 | 5015 | EFA1c0030_orf_16p | 10612 |
| E3M10000005D10 | 57 | EFA102549 | 5000 | EFA1c0022_orf_24p | 10538 |
| E3M10000005D10 | 57 | EFA102551 | 5001 | EFA1c0022_orf_25p | 10539 |
| E3M10000005E01 | 58 | EFA102549 | 5000 | EFA1c0022_orf_24p | 10538 |
| E3M10000005E01 | 58 | EFA102551 | 5001 | EFA1c0022_orf_25p | 10539 |
| E3M10000005E02 | 59 | EFA102549 | 5000 | EFA1c0022_orf_24p | 10538 |
| E3M10000005E02 | 59 | EFA102551 | 5001 | EFA1c0022_orf_25p | 10539 |
| E3M10000005E03 | 60 | EFA102541 | 4998 | EFA1c0028_orf_3p | 10602 |
| E3M10000005E08 | 61 | EFA101403 | 4932 | EFA1c0033_orf_54p | 10662 |
| E3M10000005F07 | 62 | EFA103021 | 5015 | EFA1c0030_orf_16p | 10612 |
| E3M10000005F10 | 63 | EFA102549 | 5000 | EFA1c0022_orf_24p | 10538 |
| E3M10000005F10 | 63 | EFA102551 | 5001 | EFA1c0022_orf_25p | 10539 |
| E3M10000005G05 | 64 | EFA102549 | 5000 | EFA1c0022_orf_24p | 10538 |
| E3M10000005G05 | 64 | EFA102551 | 5001 | EFA1c0022_orf_25p | 10539 |
| E3M10000005H04 | 65 | EFA103021 | 5015 | EFA1c0030_orf_16p | 10612 |
| E3M10000006B03 | 66 | EFA101162 | 4919 | EFA1c0022_orf_5p | 10555 |
| E3M10000006B03 | 66 | EFA101163 | 4920 | EFA1c0022_orf_6p | 10557 |
| E3M10000006C01 | 67 | EFA101416 | 4941 | EFA1c0022_orf_17p | 10530 |
| E3M10000006C01 | 67 | EFA101417 | 4942 | EFA1c0022_orf_18p | 10531 |
| E3M10000006C12 | 68 | EFA102549 | 5000 | EFA1c0022_orf_24p | 10538 |
| E3M10000006C12 | 68 | EFA102551 | 5001 | EFA1c0022_orf_25p | 10539 |
| E3M10000006D03 | 69 | EFA101416 | 4941 | EFA1c0022_orf_17p | 10530 |
| E3M10000006D03 | 69 | EFA101417 | 4942 | EFA1c0022_orf_18p | 10531 |
| E3M10000006E11 | 70 | EFA102541 | 4998 | EFA1c0028_orf_3p | 10602 |
| E3M10000006E11 | 70 | EFA102542 | 4999 | EFA1c0028_orf_4p | 10603 |
| E3M10000006F04 | 71 | EFA102541 | 4998 | EFA1c0028_orf_3p | 10602 |
| E3M10000006F04 | 71 | EFA102542 | 4999 | EFA1c0028_orf_4p | 10603 |
| E3M10000006G04 | 72 | EFA101162 | 4919 | EFA1c0022_orf_5p | 10555 |
| E3M10000006G04 | 72 | EFA101163 | 4920 | EFA1c0022_orf_6p | 10557 |
| E3M10000006G12 | 73 | EFA101162 | 4919 | EFA1c0022_orf_5p | 10555 |
| E3M10000006G12 | 73 | EFA101163 | 4920 | EFA1c0022_orf_6p | 10557 |
| E3M10000006H09 | 74 | EFA100642 | 4884 | EFA1c0041_orf_56p | 10792 |
| E3M10000007A02 | 75 | EFA101162 | 4919 | EFA1c0022_orf_5p | 10555 |
| E3M10000007A02 | 75 | EFA101163 | 4920 | EFA1c0022_orf_6p | 10557 |
| E3M10000007B02 | 76 | EFA101162 | 4919 | EFA1c0022_orf_5p | 10555 |
| E3M10000007B02 | 76 | EFA101163 | 4920 | EFA1c0022_orf_6p | 10557 |
| E3M10000007B03 | 77 | EFA101162 | 4919 | EFA1c0022_orf_5p | 10555 |
| E3M10000007B03 | 77 | EFA101163 | 4920 | EFA1c0022_orf_6p | 10557 |
| E3M10000007C03 | 78 | EFA101416 | 4941 | EFA1c0022_orf_17p | 10530 |
| E3M10000007C03 | 78 | EFA101417 | 4942 | EFA1c0022_orf_18p | 10531 |
| E3M10000007C04 | 79 | EFA100642 | 4884 | EFA1c0041_orf_56p | 10792 |
| E3M10000007D03 | 80 | EFA101162 | 4919 | EFA1c0022_orf_5p | 10555 |
| E3M10000007D03 | 80 | EFA101163 | 4920 | EFA1c0022_orf_6p | 10557 |
| E3M10000007E05 | 81 | EFA100742 | 4891 | EFA1c0022_orf_20p | 10534 |
| E3M10000007E05 | 81 | EFA101417 | 4942 | EFA1c0022_orf_18p | 10531 |
| E3M10000007E05 | 81 | EFA102554 | 5002 | EFA1c0022_orf_19p | 10532 |
| E3M10000007F01 | 82 | EFA101162 | 4919 | EFA1c0022_orf_5p | 10555 |
| E3M10000007F01 | 82 | EFA101163 | 4920 | EFA1c0022_orf_6p | 10557 |
| E3M10000007F06 | 83 | EFA101162 | 4919 | EFA1c0022_orf_5p | 10555 |
| E3M10000007F06 | 83 | EFA101163 | 4920 | EFA1c0022_orf_6p | 10557 |
| E3M10000007G01 | 84 | EFA101162 | 4919 | EFA1c0022_orf_5p | 10555 |
| E3M10000007G01 | 84 | EFA101163 | 4920 | EFA1c0022_orf_6p | 10557 |
| E3M10000008C03 | 85 | EFA102501 | 4994 | EFA1c0031_orf_35p | 10626 |
| E3M10000008C08 | 86 | EFA101536 | 4946 | EFA1c0042_orf_46p | 10823 |
| E3M10000008C09 | 87 | EFA101410 | 4935 | EFA1c0022_orf_12p | 10525 |
| E3M10000008D08 | 88 | EFA102501 | 4994 | EFA1c0031_orf_35p | 10626 |
| E3M10000008E02 | 89 | EFA100783 | 4895 | EFA1c0042_orf_141p | 10811 |
| E3M10000008G05 | 90 | EFA101162 | 4919 | EFA1c0022_orf_5p | 10555 |
| E3M10000008G05 | 90 | EFA101163 | 4920 | EFA1c0022_orf_6p | 10557 |
| E3M10000008G09 | 91 | EFA103021 | 5015 | EFA1c0030_orf_16p | 10612 |
| E3M10000008G09 | 91 | EFA103038 | 5017 | EFA1c0030_orf_17p | 10613 |
| E3M10000008H02 | 92 | EFA101695 | 4954 | EFA1c0031_orf_6p | 10629 |
| E3M10000009C07 | 93 | EFA103508 | 5029 | EFA1c0033_orf_95p | 10672 |
| E3M10000009C09 | 94 | EFA100870 | 4899 | EFA1c0031_orf_36p | 10627 |
| E3M10000009D01 | 95 | EFA101410 | 4935 | EFA1c0022_orf_12p | 10525 |
| E3M10000009E02 | 96 | EFA101410 | 4935 | EFA1c0022_orf_12p | 10525 |
| E3M10000009E02 | 96 | EFA101411 | 4936 | EFA1c0022_orf_13p | 10526 |
| E3M10000009E03 | 97 | EFA101160 | 4917 | EFA1c0022_orf_3p | 10549 |
| E3M10000009E05 | 98 | EFA102501 | 4994 | EFA1c0031_orf_35p | 10626 |
| E3M10000009G02 | 99 | EFA102501 | 4994 | EFA1c0031_orf_35p | 10626 |
| E3M10000010C08 | 100 | EFA100870 | 4899 | EFA1c0031_orf_36p | 10627 |
| E3M10000010D05 | 101 | EFA100757 | 4894 | EFA1c0044_orf_27p | 10897 |
| E3M10000010F01 | 102 | EFA102551 | 5001 | EFA1c0022_orf_25p | 10539 |
| E3M10000010G05 | 103 | EFA101164 | 4921 | EFA1c0022_orf_7p | 10558 |
| E3M10000010G07 | 104 | EFA101165 | 4922 | EFA1c0022_orf_8p | 10559 |
| E3M10000010G09 | 105 | EFA103571 | 5030 | EFA1c0044_orf_101p | 10879 |
| E3M10000010G10 | 106 | EFA102091 | 4977 | EFA1c0010_orf_3p | 10481 |
| E3M1000200210H | 107 | EFA100194 | 4868 | EFA1c0022_orf_26p | 10540 |
| E3M10000011A09 | 108 | EFA103038 | 5017 | EFA1c0030_orf_17p | 10613 |
| E3M10000011B03 | 109 | EFA102091 | 4977 | EFA1c0010_orf_3p | 10481 |
| E3M10000011B09 | 110 | EFA102501 | 4994 | EFA1c0031_orf_35p | 10626 |
| E3M10000011C07 | 111 | EFA101790 | 4959 | EFA1c0042_orf_111p | 10803 |
| E3M10000011D03 | 112 | EFA100210 | 4870 | EFA1c0022_orf_9p | 10560 |
| E3M10000011D03 | 112 | EFA100211 | 4871 | EFA1c0022_orf_10p | 10523 |
| E3M10000011H02 | 113 | EFA102541 | 4998 | EFA1c0028_orf_3p | 10602 |
| E3M10000011H05 | 114 | EFA101164 | 4921 | EFA1c0022_orf_7p | 10558 |
| E3M10000012B01 | 115 | EFA100642 | 4884 | EFA1c0041_orf_56p | 10792 |
| E3M10000012B02 | 116 | EFA100151 | 4864 | EFA1c0021_orf_14p | 10516 |
| E3M10000012B07 | 117 | EFA101410 | 4935 | EFA1c0022_orf_12p | 10525 |
| E3M10000012B07 | 117 | EFA101411 | 4936 | EFA1c0022_orf_13p | 10526 |
| E3M10000012B07 | 117 | EFA101412 | 4937 | EFA1c0022_orf_14p | 10527 |
| E3M10000012B08 | 118 | EFA101409 | 4934 | EFA1c0022_orf_11p | 10524 |
| E3M10000012C01 | 119 | EFA100642 | 4884 | EFA1c0041_orf_56p | 10792 |
| E3M10000012D10 | 120 | EFA102501 | 4994 | EFA1c0031_orf_35p | 10626 |
| E3M10000012E08 | 121 | EFA101164 | 4921 | EFA1c0022_orf_7p | 10558 |
| E3M10000012F05 | 122 | EFA101162 | 4919 | EFA1c0022_orf_5p | 10555 |
| E3M10000012F06 | 123 | EFA101409 | 4934 | EFA1c0022_orf_11p | 10524 |
| E3M10000012F07 | 124 | EFA101417 | 4942 | EFA1c0022_orf_18p | 10531 |
| E3M10000012F07 | 124 | EFA102554 | 5002 | EFA1c0022_orf_19p | 10532 |
| E3M10000012F10 | 125 | EFA101410 | 4935 | EFA1c0022_orf_12p | 10525 |
| E3M10000012F10 | 125 | EFA101411 | 4936 | EFA1c0022_orf_13p | 10526 |
| E3M10000012G02 | 126 | EFA101165 | 4922 | EFA1c0022_orf_8p | 10559 |
| E3M10000012G07 | 127 | EFA101410 | 4935 | EFA1c0022_orf_12p | 10525 |
| E3M10000012G07 | 127 | EFA101411 | 4936 | EFA1c0022_orf_13p | 10526 |
| E3M10000013A06 | 128 | EFA101159 | 4916 | EFA1c0022_orf_2p | 10543 |
| E3M10000013A07 | 129 | EFA101160 | 4917 | EFA1c0022_orf_3p | 10549 |
| E3M10000013C05 | 130 | EFA101160 | 4917 | EFA1c0022_orf_3p | 10549 |
| E3M10000013C05 | 130 | EFA101161 | 4918 | EFA1c0022_orf_4p | 10551 |
| E3M10000013D02 | 131 | EFA101160 | 4917 | EFA1c0022_orf_3p | 10549 |
| E3M10000013D08 | 132 | EFA101415 | 4940 | EFA1c0022_orf_16p | 10529 |
| E3M10000013D10 | 133 | EFA100210 | 4870 | EFA1c0022_orf_9p | 10560 |
| E3M10000013D10 | 133 | EFA100211 | 4871 | EFA1c0022_orf_10p | 10523 |
| E3M10000013E02 | 134 | EFA100642 | 4884 | EFA1c0041_orf_56p | 10792 |
| E3M10000013E08 | 135 | EFA102501 | 4994 | EFA1c0031_orf_35p | 10626 |
| E3M10000013F05 | 136 | EFA102541 | 4998 | EFA1c0028_orf_3p | 10602 |
| E3M10000013F12 | 137 | EFA101164 | 4921 | EFA1c0022_orf_7p | 10558 |
| E3M10000013F12 | 137 | EFA101165 | 4922 | EFA1c0022_orf_8p | 10559 |
| E3M10000013G10 | 138 | EFA103062 | 5019 | EFA1c0030_orf_19p | 10615 |
| E3M10000013H03 | 139 | EFA101412 | 4937 | EFA1c0022_orf_14p | 10527 |
| E3M10000013H05 | 140 | EFA101163 | 4920 | EFA1c0022_orf_6p | 10557 |
| E3M10000013H10 | 141 | EFA101164 | 4921 | EFA1c0022_orf_7p | 10558 |
| E3M10000014B12 | 142 | EFA100739 | 4888 | EFA1c0022_orf_23p | 10537 |
| E3M10000014B12 | 142 | EFA102549 | 5000 | EFA1c0022_orf_24p | 10538 |
| E3M10000014B12 | 142 | EFA102551 | 5001 | EFA1c0022_orf_25p | 10539 |
| E3M10000014E12 | 143 | EFA101409 | 4934 | EFA1c0022_orf_11p | 10524 |
| E3M10000014E12 | 143 | EFA101410 | 4935 | EFA1c0022_orf_12p | 10525 |
| E3M10000014G09 | 144 | EFA100991 | 4905 | EFA1c0035_orf_60p | 10681 |
| E3M10000014G09 | 144 | EFA103033 | 5016 | EFA1c0035_orf_60p | 10681 |
| E3M10000015B04 | 145 | EFA100065 | 4863 | EFA1c0042_orf_14p | 10813 |
| E3M10000015B12 | 146 | EFA101162 | 4919 | EFA1c0022_orf_5p | 10555 |
| E3M10000015E12 | 147 | EFA100210 | 4870 | EFA1c0022_orf_9p | 10560 |
| E3M10000015E12 | 147 | EFA100211 | 4871 | EFA1c0022_orf_10p | 10523 |
| E3M10000016A03 | 148 | EFA101753 | 4957 | EFA1c0022_orf_50p | 10552 |
| E3M10000016A04 | 149 | EFA101409 | 4934 | EFA1c0022_orf_11p | 10524 |
| E3M10000016C11 | 150 | EFA101163 | 4920 | EFA1c0022_orf_6p | 10557 |
| E3M10000016C11 | 150 | EFA101164 | 4921 | EFA1c0022_orf_7p | 10558 |
| E3M10000016D03 | 151 | EFA102774 | 5009 | EFA1c0044_orf_25p | 10896 |
| E3M10000016F06 | 152 | EFA102205 | 4983 | EFA1c0041_orf_115p | 10769 |
| E3M10000016F10 | 153 | EFA101410 | 4935 | EFA1c0022_orf_12p | 10525 |
| E3M10000016F10 | 153 | EFA101411 | 4936 | EFA1c0022_orf_13p | 10526 |
| E3M10000016H05 | 154 | EFA101160 | 4917 | EFA1c0022_orf_3p | 10549 |
| E3M10000016H10 | 155 | EFA101409 | 4934 | EFA1c0022_orf_11p | 10524 |
| E3M10000017A09 | 156 | EFA101161 | 4918 | EFA1c0022_orf_4p | 10551 |
| E3M10000017A09 | 156 | EFA101162 | 4919 | EFA1c0022_orf_5p | 10555 |
| E3M10000017D09 | 157 | EFA101412 | 4937 | EFA1c0022_orf_14p | 10527 |
| E3M10000018A07 | 158 | EFA102091 | 4977 | EFA1c0010_orf_3p | 10481 |
| E3M10000018C02 | 159 | EFA100642 | 4884 | EFA1c0041_orf_56p | 10792 |
| E3M10000018E01 | 160 | EFA103021 | 5015 | EFA1c0030_orf_16p | 10612 |
| E3M10000018G09 | 161 | EFA101583 | 4949 | EFA1c0026_orf_23p | 10593 |
| E3M10000018H06 | 162 | EFA101417 | 4942 | EFA1c0022_orf_18p | 10531 |
| E3M10000019B06 | 163 | EFA100151 | 4864 | EFA1c0021_orf_14p | 10516 |
| E3M10000019D02 | 164 | EFA102022 | 4974 | EFA1c0044_orf_106p | 10881 |
| E3M10000019E03 | 165 | EFA100870 | 4899 | EFA1c0031_orf_36p | 10627 |
| E3M10000019E03 | 165 | EFA102502 | 4995 | EFA1c0031_orf_36p | 10627 |
| E3M10000019E04 | 166 | EFA102501 | 4994 | EFA1c0031_orf_35p | 10626 |
| E3M10000020G04 | 167 | EFA100870 | 4899 | EFA1c0031_orf_36p | 10627 |
| E3M10000020G04 | 167 | EFA102502 | 4995 | EFA1c0031_orf_36p | 10627 |
| E3M10000020H05 | 168 | EFA103038 | 5017 | EFA1c0030_orf_17p | 10613 |
| E3M10000021A08 | 169 | EFA101162 | 4919 | EFA1c0022_orf_5p | 10555 |
| E3M10000021A08 | 169 | EFA101163 | 4920 | EFA1c0022_orf_6p | 10557 |
| E3M10000021A11 | 170 | EFA101417 | 4942 | EFA1c0022_orf_18p | 10531 |
| E3M10000021B10 | 171 | EFA101163 | 4920 | EFA1c0022_orf_6p | 10557 |
| E3M10000021C03 | 172 | EFA102501 | 4994 | EFA1c0031_orf_35p | 10626 |
| E3M10000021C04 | 173 | EFA101161 | 4918 | EFA1c0022_orf_4p | 10551 |
| E3M10000021C08 | 174 | EFA101160 | 4917 | EFA1c0022_orf_3p | 10549 |
| E3M10000021D04 | 175 | EFA100870 | 4899 | EFA1c0031_orf_36p | 10627 |
| E3M10000021D04 | 175 | EFA102502 | 4995 | EFA1c0031_orf_36p | 10627 |
| E3M10000021E10 | 176 | EFA100704 | 4887 | EFA1c0010_orf_4p | 10482 |
| E3M10000021G04 | 177 | EFA100955 | 4902 | EFA1c0022_orf_28p | 10542 |
| E3M10000021G10 | 178 | EFA100642 | 4884 | EFA1c0041_orf_56p | 10792 |
| E3M10000021G11 | 179 | EFA101163 | 4920 | EFA1c0022_orf_6p | 10557 |
| E3M10000021H11 | 180 | EFA101163 | 4920 | EFA1c0022_orf_6p | 10557 |
| E3M10000022A04 | 181 | EFA101410 | 4935 | EFA1c0022_orf_12p | 10525 |
| E3M10000022A11 | 182 | EFA101417 | 4942 | EFA1c0022_orf_18p | 10531 |
| E3M10000022B04 | 183 | EFA101410 | 4935 | EFA1c0022_orf_12p | 10525 |
| E3M10000022B05 | 184 | EFA101410 | 4935 | EFA1c0022_orf_12p | 10525 |
| E3M10000022B05 | 184 | EFA101411 | 4936 | EFA1c0022_orf_13p | 10526 |
| E3M10000022B07 | 185 | EFA103571 | 5030 | EFA1c0044_orf_101p | 10879 |
| E3M10000022C05 | 186 | EFA101160 | 4917 | EFA1c0022_orf_3p | 10549 |
| E3M10000022C05 | 186 | EFA101161 | 4918 | EFA1c0022_orf_4p | 10551 |
| E3M10000022C06 | 187 | EFA100978 | 4904 | EFA1c0022_orf_27p | 10541 |
| E3M10000022C09 | 188 | EFA101162 | 4919 | EFA1c0022_orf_5p | 10555 |
| E3M10000022D04 | 189 | EFA101412 | 4937 | EFA1c0022_orf_14p | 10527 |
| E3M10000022F05 | 190 | EFA102501 | 4994 | EFA1c0031_orf_35p | 10626 |
| E3M10000022F06 | 191 | EFA101161 | 4918 | EFA1c0022_orf_4p | 10551 |
| E3M10000022F06 | 191 | EFA101162 | 4919 | EFA1c0022_orf_5p | 10555 |
| E3M10000022F08 | 192 | EFA101410 | 4935 | EFA1c0022_orf_12p | 10525 |
| E3M10000022G02 | 193 | EFA101022 | 4906 | EFA1c0043_orf_69p | 10875 |
| E3M10000022G12 | 194 | EFA100704 | 4887 | EFA1c0010_orf_4p | 10482 |
| E3M10000023A03 | 195 | EFA101413 | 4938 | #N/A | #N/A |
| E3M10000023A06 | 196 | EFA100978 | 4904 | EFA1c0022_orf_27p | 10541 |
| E3M10000023A07 | 197 | EFA102502 | 4995 | EFA1c0031_orf_36p | 10627 |
| E3M10000023A09 | 198 | EFA100704 | 4887 | EFA1c0010_orf_4p | 10482 |
| E3M10000023B02 | 199 | EFA101159 | 4916 | EFA1c0022_orf_2p | 10543 |
| E3M10000023B02 | 199 | EFA101160 | 4917 | EFA1c0022_orf_3p | 10549 |
| E3M10000023B06 | 200 | EFA102541 | 4998 | EFA1c0028_orf_3p | 10602 |
| E3M10000023C03 | 201 | EFA101409 | 4934 | EFA1c0022_orf_11p | 10524 |
| E3M10000023C03 | 201 | EFA101410 | 4935 | EFA1c0022_orf_12p | 10525 |
| E3M10000023C04 | 202 | EFA102541 | 4998 | EFA1c0028_orf_3p | 10602 |
| E3M10000023C06 | 203 | EFA101413 | 4938 | #N/A | #N/A |
| E3M10000023C08 | 204 | EFA100955 | 4902 | EFA1c0022_orf_28p | 10542 |
| E3M10000023C09 | 205 | EFA101159 | 4916 | EFA1c0022_orf_2p | 10543 |
| E3M10000023C09 | 205 | EFA101160 | 4917 | EFA1c0022_orf_3p | 10549 |
| E3M10000023D02 | 206 | EFA102501 | 4994 | EFA1c0031_orf_35p | 10626 |
| E3M10000023D04 | 207 | EFA101160 | 4917 | EFA1c0022_orf_3p | 10549 |
| E3M10000023D10 | 208 | EFA101413 | 4938 | #N/A | #N/A |
| E3M10000023E04 | 209 | EFA101412 | 4937 | EFA1c0022_orf_14p | 10527 |
| E3M10000023E07 | 210 | EFA101162 | 4919 | EFA1c0022_orf_5p | 10555 |
| E3M10000023E09 | 211 | EFA102501 | 4994 | EFA1c0031_orf_35p | 10626 |
| E3M10000023F02 | 212 | EFA101412 | 4937 | EFA1c0022_orf_14p | 10527 |
| E3M10000023F10 | 213 | EFA102551 | 5001 | EFA1c0022_orf_25p | 10539 |
| E3M10000023G02 | 214 | EFA101160 | 4917 | EFA1c0022_orf_3p | 10549 |
| E3M10000023G04 | 215 | EFA101414 | 4939 | EFA1c0022_orf_15p | 10528 |
| E3M10000023G10 | 216 | EFA101411 | 4936 | EFA1c0022_orf_13p | 10526 |
| E3M10000023H08 | 217 | EFA102502 | 4995 | EFA1c0031_orf_36p | 10627 |
| E3M10000024A03 | 218 | EFA101161 | 4918 | EFA1c0022_orf_4p | 10551 |
| E3M10000024A04 | 219 | EFA102006 | 4973 | EFA1c0025_orf_17p | 10580 |
| E3M10000024A08 | 220 | EFA101160 | 4917 | EFA1c0022_orf_3p | 10549 |
| E3M10000024A08 | 220 | EFA101161 | 4918 | EFA1c0022_orf_4p | 10551 |
| E3M10000024C06 | 221 | EFA102501 | 4994 | EFA1c0031_orf_35p | 10626 |
| E3M10000025A06 | 222 | EFA101160 | 4917 | EFA1c0022_orf_3p | 10549 |
| E3M10000025B01 | 223 | EFA100194 | 4868 | EFA1c0022_orf_26p | 10540 |
| E3M10000025B01 | 223 | EFA100978 | 4904 | EFA1c0022_orf_27p | 10541 |
| E3M10000025B03 | 224 | EFA101411 | 4936 | EFA1c0022_orf_13p | 10526 |
| E3M10000025B03 | 224 | EFA101412 | 4937 | EFA1c0022_orf_14p | 10527 |
| E3M10000025B05 | 225 | EFA100978 | 4904 | EFA1c0022_orf_27p | 10541 |
| E3M10000025B10 | 226 | EFA101162 | 4919 | EFA1c0022_orf_5p | 10555 |
| E3M10000025C01 | 227 | EFA102502 | 4995 | EFA1c0031_orf_36p | 10627 |
| E3M10000025C04 | 228 | EFA101159 | 4916 | EFA1c0022_orf_2p | 10543 |
| E3M10000025C05 | 229 | EFA102549 | 5000 | EFA1c0022_orf_24p | 10538 |
| E3M10000025C05 | 229 | EFA102551 | 5001 | EFA1c0022_orf_25p | 10539 |
| E3M10000025C07 | 230 | EFA100642 | 4884 | EFA1c0041_orf_56p | 10792 |
| E3M10000025C08 | 231 | EFA100870 | 4899 | EFA1c0031_orf_36p | 10627 |
| E3M10000025C08 | 231 | EFA102502 | 4995 | EFA1c0031_orf_36p | 10627 |
| E3M10000025C09 | 232 | EFA102501 | 4994 | EFA1c0031_orf_35p | 10626 |
| E3M10000025C11 | 233 | EFA101162 | 4919 | EFA1c0022_orf_5p | 10555 |
| E3M10000025D01 | 234 | EFA101160 | 4917 | EFA1c0022_orf_3p | 10549 |
| E3M10000025D01 | 234 | EFA101161 | 4918 | EFA1c0022_orf_4p | 10551 |
| E3M10000025D10 | 235 | EFA102501 | 4994 | EFA1c0031_orf_35p | 10626 |
| E3M10000025E07 | 236 | EFA101165 | 4922 | EFA1c0022_orf_8p | 10559 |
| E3M10000025E08 | 237 | EFA100955 | 4902 | EFA1c0022_orf_28p | 10542 |
| E3M10000025E12 | 238 | EFA102728 | 5006 | EFA1c0045_orf_93p | 10948 |
| E3M10000025F04 | 239 | EFA101160 | 4917 | EFA1c0022_orf_3p | 10549 |
| E3M10000025F04 | 239 | EFA101161 | 4918 | EFA1c0022_orf_4p | 10551 |
| E3M10000025F06 | 240 | EFA101410 | 4935 | EFA1c0022_orf_12p | 10525 |
| E3M10000025F06 | 240 | EFA101411 | 4936 | EFA1c0022_orf_13p | 10526 |
| E3M10000025F06 | 240 | EFA101412 | 4937 | EFA1c0022_orf_14p | 10527 |
| E3M10000025F08 | 241 | EFA103038 | 5017 | EFA1c0030_orf_17p | 10613 |
| E3M10000025F09 | 242 | EFA100704 | 4887 | EFA1c0010_orf_4p | 10482 |
| E3M10000025F10 | 243 | EFA101161 | 4918 | EFA1c0022_orf_4p | 10551 |
| E3M10000025F11 | 244 | EFA100955 | 4902 | EFA1c0022_orf_28p | 10542 |
| E3M10000025F12 | 245 | EFA101163 | 4920 | EFA1c0022_orf_6p | 10557 |
| E3M10000025G02 | 246 | EFA101164 | 4921 | EFA1c0022_orf_7p | 10558 |
| E3M10000025007 | 247 | EFA101159 | 4916 | EFA1c0022_orf_2p | 10543 |
| E3M10000025G09 | 248 | EFA102185 | 4980 | EFA1c0045_orf_95p | 10950 |
| E3M10000027A02 | 249 | EFA101416 | 4941 | EFA1c0022_orf_17p | 10530 |
| E3M10000027A07 | 250 | EFA101160 | 4917 | EFA1c0022_orf_3p | 10549 |
| E3M10000027A09 | 251 | EFA101413 | 4938 | #N/A | #N/A |
| E3M10000027A09 | 251 | EFA101414 | 4939 | EFA1c0022_orf_15p | 10528 |
| E3M10000027B07 | 252 | EFA101163 | 4920 | EFA1c0022_orf_6p | 10557 |
| E3M10000027B08 | 253 | EFA101160 | 4917 | EFA1c0022_orf_3p | 10549 |
| E3M10000027B09 | 254 | EFA100870 | 4899 | EFA1c0031_orf_36p | 10627 |
| E3M10000027B09 | 254 | EFA102502 | 4995 | EFA1c0031_orf_36p | 10627 |
| E3M10000027C02 | 255 | EFA103062 | 5019 | EFA1c0030_orf_19p | 10615 |
| E3M10000027C03 | 256 | EFA101160 | 4917 | EFA1c0022_orf_3p | 10549 |
| E3M10000027C08 | 257 | EFA101165 | 4922 | EFA1c0022_orf_8p | 10559 |
| E3M10000027D03 | 258 | EFA100870 | 4899 | EFA1c0031_orf_36p | 10627 |
| E3M10000027D03 | 258 | EFA102502 | 4995 | EFA1c0031_orf_36p | 10627 |
| E3M10000027D05 | 259 | EFA101162 | 4919 | EFA1c0022_orf_5p | 10555 |
| E3M10000027D08 | 260 | EFA103504 | 5028 | EFA1c0033_orf_94p | 10671 |
| E3M10000027D10 | 261 | EFA100704 | 4887 | EFA1c0010_orf_4p | 10482 |
| E3M10000027G01 | 262 | EFA102186 | 4981 | EFA1c0045_orf_94p | 10949 |
| E3M10000027G08 | 263 | EFA101409 | 4934 | EFA1c0022_orf_11p | 10524 |
| E3M10000027H04 | 264 | EFA101160 | 4917 | EFA1c0022_orf_3p | 10549 |
| E3M10000027H07 | 265 | EFA101161 | 4918 | EFA1c0022_orf_4p | 10551 |
| E3M10000027H07 | 265 | EFA101162 | 4919 | EFA1c0022_orf_5p | 10555 |
| E3M10000028A02 | 266 | EFA102554 | 5002 | EFA1c0022_orf_19p | 10532 |
| E3M10000028A03 | 267 | EFA102551 | 5001 | EFA1c0022_orf_25p | 10539 |
| E3M10000028A04 | 268 | EFA101410 | 4935 | EFA1c0022_orf_12p | 10525 |
| E3M10000028A04 | 268 | EFA101411 | 4936 | EFA1c0022_orf_13p | 10526 |
| E3M10000028A05 | 269 | EFA101080 | 4909 | #N/A | #N/A |
| E3M10000028A05 | 269 | EFA102915 | 5014 | EFA1c0032_orf_27p | 10640 |
| E3M10000028A06 | 270 | EFA103210 | 5022 | EFA1c0036_orf_119p | 10688 |
| E3M10000028A08 | 271 | EFA101424 | 4943 | EFA1c0041_orf_39p | 10784 |
| E3M10000028A08 | 271 | EFA101425 | 4944 | EFA1c0041_orf_40p | 10785 |
| E3M10000028B01 | 272 | EFA103021 | 5015 | EFA1c0030_orf_16p | 10612 |
| E3M10000028B02 | 273 | EFA102541 | 4998 | EFA1c0028_orf_3p | 10602 |
| E3M10000028B02 | 273 | EFA102542 | 4999 | EFA1c0028_orf_4p | 10603 |
| E3M10000028B03 | 274 | EFA101160 | 4917 | EFA1c0022_orf_3p | 10549 |
| E3M10000028B04 | 275 | EFA101161 | 4918 | EFA1c0022_orf_4p | 10551 |
| E3M10000028B05 | 276 | EFA101424 | 4943 | EFA1c0041_orf_39p | 10784 |
| E3M10000028B05 | 276 | EFA101425 | 4944 | EFA1c0041_orf_40p | 10785 |
| E3M10000028B06 | 277 | EFA103038 | 5017 | EFA1c0030_orf_17p | 10613 |
| E3M10000028B07 | 278 | EFA101160 | 4917 | EFA1c0022_orf_3p | 10549 |
| E3M10000028B08 | 279 | EFA101417 | 4942 | EFA1c0022_orf_18p | 10531 |
| E3M10000028C01 | 280 | EFA102541 | 4998 | EFA1c0028_orf_3p | 10602 |
| E3M10000028C01 | 280 | EFA102542 | 4999 | EFA1c0028_orf_4p | 10603 |
| E3M10000028C02 | 281 | EFA102541 | 4998 | EFA1c0028_orf_3p | 10602 |
| E3M10000028C02 | 281 | EFA102542 | 4999 | EFA1c0028_orf_4p | 10603 |
| E3M10000028C04 | 282 | EFA101322 | 4927 | EFA1c0030_orf_57p | 10620 |
| E3M10000028C05 | 283 | EFA101160 | 4917 | EFA1c0022_orf_3p | 10549 |
| E3M10000028C06 | 284 | EFA100151 | 4864 | EFA1c0021_orf_14p | 10516 |
| E3M10000028C07 | 285 | EFA101022 | 4906 | EFA1c0043_orf_69p | 10875 |
| E3M10000028C08 | 286 | EFA102541 | 4998 | EFA1c0028_orf_3p | 10602 |
| E3M10000028C08 | 286 | EFA102542 | 4999 | EFA1c0028_orf_4p | 10603 |
| E3M10000028D01 | 287 | EFA100194 | 4868 | EFA1c0022_orf_26p | 10540 |
| E3M10000028D01 | 287 | EFA100978 | 4904 | EFA1c0022_orf_27p | 10541 |
| E3M10000028D02 | 288 | EFA101022 | 4906 | EFA1c0043_orf_69p | 10875 |
| E3M10000028D05 | 289 | EFA101080 | 4909 | #N/A | #N/A |
| E3M10000028D06 | 290 | EFA103021 | 5015 | EFA1c0030_orf_16p | 10612 |
| E3M10000028D08 | 291 | EFA103268 | 5023 | EFA1c0010_orf_1p | 10479 |
| E3M10000028E01 | 292 | EFA101121 | 4912 | EFA1c0036_orf_112p | 10686 |
| E3M10000028E04 | 293 | EFA101370 | 4931 | EFA1c0040_orf_103p | 10738 |
| E3M10000028E07 | 294 | EFA102541 | 4998 | EFA1c0028_orf_3p | 10602 |
| E3M10000028F02 | 295 | EFA101161 | 4918 | EFA1c0022_orf_4p | 10551 |
| E3M10000028F03 | 296 | EFA100742 | 4891 | EFA1c0022_orf_20p | 10534 |
| E3M10000028F03 | 296 | EFA101417 | 4942 | EFA1c0022_orf_18p | 10531 |
| E3M10000028F03 | 296 | EFA102554 | 5002 | EFA1c0022_orf_19p | 10532 |
| E3M10000028F04 | 297 | EFA101163 | 4920 | EFA1c0022_orf_6p | 10557 |
| E3M10000028F04 | 297 | EFA101164 | 4921 | EFA1c0022_orf_7p | 10558 |
| E3M10000028F05 | 298 | EFA100704 | 4887 | EFA1c0010_orf_4p | 10482 |
| E3M10000028F06 | 299 | EFA101164 | 4921 | EFA1c0022_orf_7p | 10558 |
| E3M10000028F07 | 300 | EFA100642 | 4884 | EFA1c0041_orf_56p | 10792 |
| E3M10000028G05 | 301 | EFA100704 | 4887 | EFA1c0010_orf_4p | 10482 |
| E3M10000028G06 | 302 | EFA100748 | 4892 | EFA1c0011_orf_10p | 10483 |
| E3M10000028G07 | 303 | EFA101410 | 4935 | EFA1c0022_orf_12p | 10525 |
| E3M10000028G07 | 303 | EFA101411 | 4936 | EFA1c0022_orf_13p | 10526 |
| E3M10000028H04 | 304 | EFA101409 | 4934 | EFA1c0022_orf_11p | 10524 |
| E3M10000028H07 | 305 | EFA103062 | 5019 | EFA1c0030_orf_19p | 10615 |
| E3M10000029A02 | 306 | EFA101160 | 4917 | EFA1c0022_orf_3p | 10549 |
| E3M10000029A04 | 307 | EFA100210 | 4870 | EFA1c0022_orf_9p | 10560 |
| E3M10000029A05 | 308 | EFA100642 | 4884 | EFA1c0041_orf_56p | 10792 |
| E3M10000029A10 | 309 | EFA102091 | 4977 | EFA1c0010_orf_3p | 10481 |
| E3M10000029A11 | 310 | EFA101413 | 4938 | #N/A | #N/A |
| E3M10000029B01 | 311 | EFA103295 | 5024 | EFA1c0032_orf_1p | 10633 |
| E3M10000029B02 | 312 | EFA101160 | 4917 | EFA1c0022_orf_3p | 10549 |
| E3M10000029B05 | 313 | EFA103038 | 5017 | EFA1c0030_orf_17p | 10613 |
| E3M10000029B06 | 314 | EFA100914 | 4900 | EFA1c0024_orf_9p | 10579 |
| E3M10000029B08 | 315 | EFA102338 | 4987 | EFA1c0032_orf_8p | 10651 |
| E3M10000029B11 | 316 | EFA100397 | 4877 | EFA1c0041_orf_148p | 10773 |
| E3M10000029B12 | 317 | EFA100642 | 4884 | EFA1c0041_orf_56p | 10792 |
| E3M10000029C01 | 318 | EFA102541 | 4998 | EFA1c0028_orf_3p | 10602 |
| E3M10000029C02 | 319 | EFA102788 | 5011 | EFA1c0033_orf_41p | 10661 |
| E3M10000029C03 | 320 | EFA102253 | 4984 | EFA1c0038_orf_85p | 10727 |
| E3M10000029C04 | 321 | EFA102503 | 4996 | EFA1c0032_orf_32p | 10643 |
| E3M10000029C05 | 322 | EFA100399 | 4878 | EFA1c0041_orf_104p | 10766 |
| E3M10000029C06 | 323 | EFA101414 | 4939 | EFA1c0022_orf_15p | 10528 |
| E3M10000029C06 | 323 | EFA101415 | 4940 | EFA1c0022_orf_16p | 10529 |
| E3M10000029C07 | 324 | EFA102352 | 4990 | EFA1c0032_orf_21p | 10635 |
| E3M10000029C07 | 324 | EFA102353 | 4991 | EFA1c0032_orf_22p | 10636 |
| E3M10000029C08 | 325 | EFA101868 | 4966 | EFA1c0042_orf_69p | 10829 |
| E3M10000029C09 | 326 | EFA101121 | 4912 | EFA1c0036_orf_112p | 10686 |
| E3M10000029C10 | 327 | EFA102656 | 5004 | EFA1c0039_orf_26p | 10734 |
| E3M10000029C12 | 328 | EFA101121 | 4912 | EFA1c0036_orf_112p | 10686 |
| E3M10000029D01 | 329 | EFA101080 | 4909 | #N/A | #N/A |
| E3M10000029D03 | 330 | EFA101160 | 4917 | EFA1c0022_orf_3p | 10549 |
| E3M10000029D04 | 331 | EFA102656 | 5004 | EFA1c0039_orf_26p | 10734 |
| E3M10000029D05 | 332 | EFA100210 | 4870 | EFA1c0022_orf_9p | 10560 |
| E3M10000029D06 | 333 | EFA100210 | 4870 | EFA1c0022_orf_9p | 10560 |
| E3M10000029D06 | 333 | EFA101165 | 4922 | EFA1c0022_orf_8p | 10559 |
| E3M10000029D08 | 334 | EFA102736 | 5007 | EFA1c0022_orf_60p | 10556 |
| E3M10000029D12 | 335 | EFA101410 | 4935 | EFA1c0022_orf_12p | 10525 |
| E3M10000029E01 | 336 | EFA101404 | 4933 | EFA1c0033_orf_55p | 10663 |
| E3M10000029E02 | 337 | EFA102051 | 4976 | #N/A | #N/A |
| E3M10000029E03 | 338 | EFA102502 | 4995 | EFA1c0031_orf_36p | 10627 |
| E3M10000029E05 | 339 | EFA101686 | 4953 | EFA1c0045_orf_63p | 10940 |
| E3M10000029E07 | 340 | EFA100919 | 4901 | EFA1c0013_orf_12p | 10491 |
| E3M10000029E08 | 341 | EFA101022 | 4906 | EFA1c0043_orf_69p | 10875 |
| E3M10000029E09 | 342 | EFA102656 | 5004 | EFA1c0039_orf_26p | 10734 |
| E3M10000029E12 | 343 | EFA100397 | 4877 | EFA1c0041_orf_148p | 10773 |
| E3M10000029F01 | 344 | EFA100023 | 4862 | EFA1c0017_orf_1p | 10505 |
| E3M10000029F05 | 345 | EFA102503 | 4996 | EFA1c0032_orf_32p | 10643 |
| E3M10000029F06 | 346 | EFA101795 | 4962 | EFA1c0045_orf_165p | 10922 |
| E3M10000029F09 | 347 | EFA100689 | 4886 | EFA1c0038_orf_54p | 10717 |
| E3M10000029F10 | 348 | EFA100919 | 4901 | EFA1c0013_orf_12p | 10491 |
| E3M10000029F11 | 349 | EFA102541 | 4998 | EFA1c0028_orf_3p | 10602 |
| E3M10000029F12 | 350 | EFA102282 | 4985 | EFA1c0038_orf_89p | 10729 |
| E3M10000029G01 | 351 | EFA100394 | 4876 | EFA1c0034_orf_6p | 10675 |
| E3M10000029G04 | 352 | EFA102656 | 5004 | EFA1c0039_orf_26p | 10734 |
| E3M10000029G05 | 353 | EFA102351 | 4989 | EFA1c0032_orf_20p | 10634 |
| E3M10000029G07 | 354 | EFA101121 | 4912 | EFA1c0036_orf_112p | 10686 |
| E3M10000029G08 | 355 | EFA103571 | 5030 | EFA1c0044_orf_101p | 10879 |
| E3M10000029G09 | 356 | EFA102201 | 4982 | #N/A | #N/A |
| E3M10000029G10 | 357 | EFA101797 | 4963 | EFA1c0045_orf_167p | 10924 |
| E3M10000029G11 | 358 | EFA102006 | 4973 | EFA1c0025_orf_17p | 10580 |
| E3M10000029G12 | 359 | EFA101541 | 4948 | EFA1c0012_orf_5p | 10488 |
| E3M10000029H02 | 360 | EFA101339 | 4928 | EFA1c0040_orf_13p | 10743 |
| E3M10000029H02 | 360 | EFA101340 | 4929 | EFA1c0040_orf_15p | 10745 |
| E3M10000029H04 | 361 | EFA102352 | 4990 | EFA1c0032_orf_21p | 10635 |
| E3M10000029H04 | 361 | EFA102353 | 4991 | EFA1c0032_orf_22p | 10636 |
| E3M10000029H05 | 362 | EFA102091 | 4977 | EFA1c0010_orf_3p | 10481 |
| E3M10000029H07 | 363 | EFA100190 | 4867 | EFA1c0010_orf_2p | 10480 |
| E3M10000029H08 | 364 | EFA101416 | 4941 | EFA1c0022_orf_17p | 10530 |
| E3M10000029H11 | 365 | EFA101159 | 4916 | EFA1c0022_orf_2p | 10543 |
| E3M10000030A05 | 366 | EFA102501 | 4994 | EFA1c0031_orf_35p | 10626 |
| E3M10000030A08 | 367 | EFA102351 | 4989 | EFA1c0032_orf_20p | 10634 |
| E3M10000030A09 | 368 | EFA102501 | 4994 | EFA1c0031_orf_35p | 10626 |
| E3M10000030A11 | 369 | EFA102736 | 5007 | EFA1c0022_orf_60p | 10556 |
| E3M10000030B03 | 370 | EFA100704 | 4887 | EFA1c0010_orf_4p | 10482 |
| E3M10000030B04 | 371 | EFA103038 | 5017 | EFA1c0030_orf_17p | 10613 |
| E3M10000030B05 | 372 | EFA102656 | 5004 | EFA1c0039_orf_26p | 10734 |
| E3M10000030B06 | 373 | EFA101162 | 4919 | EFA1c0022_orf_5p | 10555 |
| E3M10000030B07 | 374 | EFA100642 | 4884 | EFA1c0041_orf_56p | 10792 |
| E3M10000030B08 | 375 | EFA102656 | 5004 | EFA1c0039_orf_26p | 10734 |
| E3M10000030B10 | 376 | EFA102655 | 5003 | EFA1c0039_orf_25p | 10733 |
| E3M10000030B11 | 377 | EFA101121 | 4912 | EFA1c0036_orf_112p | 10686 |
| E3M10000030B12 | 378 | EFA102352 | 4990 | EFA1c0032_orf_21p | 10635 |
| E3M10000030B12 | 378 | EFA102353 | 4991 | EFA1c0032_orf_22p | 10636 |
| E3M10000030C03 | 379 | EFA100151 | 4864 | EFA1c0021_orf_14p | 10516 |
| E3M10000030C04 | 380 | EFA101165 | 4922 | EFA1c0022_orf_8p | 10559 |
| E3M10000030C12 | 381 | EFA102351 | 4989 | EFA1c0032_orf_20p | 10634 |
| E3M10000030D02 | 382 | EFA102350 | 4988 | EFA1c0032_orf_19p | 10632 |
| E3M10000030D05 | 383 | EFA101414 | 4939 | EFA1c0022_orf_15p | 10528 |
| E3M10000030D08 | 384 | EFA102780 | 5010 | EFA1c0045_orf_101p | 10908 |
| E3M10000030D09 | 385 | EFA102780 | 5010 | EFA1c0045_orf_101p | 10908 |
| E3M10000030D10 | 386 | EFA102656 | 5004 | EFA1c0039_orf_26p | 10734 |
| E3M10000030D12 | 387 | EFA101417 | 4942 | EFA1c0022_orf_18p | 10531 |
| E3M10000030E01 | 388 | EFA101410 | 4935 | EFA1c0022_orf_12p | 10525 |
| E3M10000030E01 | 388 | EFA101411 | 4936 | EFA1c0022_orf_13p | 10526 |
| E3M10000030E02 | 389 | EFA100329 | 4875 | EFA1c0041_orf_35p | 10782 |
| E3M10000030E04 | 390 | EFA102655 | 5003 | EFA1c0039_orf_25p | 10733 |
| E3M10000030E08 | 391 | EFA101540 | 4947 | EFA1c0012_orf_4p | 10487 |
| E3M10000030E09 | 392 | EFA103365 | 5026 | EFA1c0022_orf_1p | 10533 |
| E3M10000030E10 | 393 | EFA102656 | 5004 | EFA1c0039_orf_26p | 10734 |
| E3M10000030F01 | 394 | EFA102655 | 5003 | EFA1c0039_orf_25p | 10733 |
| E3M10000030F04 | 395 | EFA101162 | 4919 | EFA1c0022_orf_5p | 10555 |
| E3M10000030F06 | 396 | EFA101162 | 4919 | EFA1c0022_orf_5p | 10555 |
| E3M10000030F07 | 397 | EFA102656 | 5004 | EFA1c0039_orf_26p | 10734 |
| E3M10000030F10 | 398 | EFA101417 | 4942 | EFA1c0022_orf_18p | 10531 |
| E3M10000030F12 | 399 | EFA102091 | 4977 | EFA1c0010_orf_3p | 10481 |
| E3M10000030G01 | 400 | EFA102551 | 5001 | EFA1c0022_orf_25p | 10539 |
| E3M10000030G03 | 401 | EFA100023 | 4862 | EFA1c0017_orf_1p | 10505 |
| E3M10000030G06 | 402 | EFA101686 | 4953 | EFA1c0045_orf_63p | 10940 |
| E3M10000030G08 | 403 | EFA102501 | 4994 | EFA1c0031_orf_35p | 10626 |
| E3M10000030G09 | 404 | EFA103210 | 5022 | EFA1c0036_orf_119p | 10688 |
| E3M10000030G12 | 405 | EFA103504 | 5028 | EFA1c0033_orf_94p | 10671 |
| E3M10000030H03 | 406 | EFA101258 | 4926 | EFA1c0045_orf_160p | 10918 |
| E3M10000030H04 | 407 | EFA101121 | 4912 | EFA1c0036_orf_112p | 10686 |
| E3M10000030H06 | 408 | EFA101161 | 4918 | EFA1c0022_orf_4p | 10551 |
| E3M10000030H07 | 409 | EFA101165 | 4922 | EFA1c0022_orf_8p | 10559 |
| E3M10000030H08 | 410 | EFA102501 | 4994 | EFA1c0031_orf_35p | 10626 |
| E3M10000030H10 | 411 | EFA102091 | 4977 | EFA1c0010_orf_3p | 10481 |
| E3M10000030H11 | 412 | EFA100615 | 4881 | EFA1c0016_orf_29p | 10501 |
| E3M10000031A02 | 413 | EFA102006 | 4973 | EFA1c0025_orf_17p | 10580 |
| E3M10000031A06 | 414 | EFA100970 | 4903 | EFA1c0044_orf_98p | 10906 |
| E3M10000031A07 | 415 | EFA102201 | 4982 | #N/A | #N/A |
| E3M10000031A08 | 416 | EFA100642 | 4884 | EFA1c0041_orf_56p | 10792 |
| E3M10000031B02 | 417 | EFA100289 | 4872 | EFA1c0042_orf_139p | 10810 |
| E3M10000031B03 | 418 | EFA100426 | 4879 | EFA1c0036_orf_59p | 10702 |
| E3M10000031B04 | 419 | EFA100394 | 4876 | EFA1c0034_orf_6p | 10675 |
| E3M10000031B09 | 420 | EFA102183 | 4979 | EFA1c0045_orf_97p | 10952 |
| E3M10000031B10 | 421 | EFA101253 | 4924 | EFA1c0043_orf_178p | 10852 |
| E3M10000031B11 | 422 | EFA100190 | 4867 | EFA1c0010_orf_2p | 10480 |
| E3M10000031B12 | 423 | EFA100642 | 4884 | EFA1c0041_orf_56p | 10792 |
| E3M10000031C01 | 424 | EFA102736 | 5007 | EFA1c0022_orf_60p | 10556 |
| E3M10000031C04 | 425 | EFA101414 | 4939 | EFA1c0022_orf_15p | 10528 |
| E3M10000031C06 | 426 | EFA100704 | 4887 | EFA1c0010_orf_4p | 10482 |
| E3M10000031C10 | 427 | EFA101411 | 4936 | EFA1c0022_orf_13p | 10526 |
| E3M10000031C11 | 428 | EFA101120 | 4911 | EFA1c0036_orf_113p | 10687 |
| E3M10000031C12 | 429 | EFA100668 | 4885 | EFA1c0035_orf_58p | 10679 |
| E3M10000031D03 | 430 | EFA102503 | 4996 | EFA1c0032_orf_32p | 10643 |
| E3M10000031D04 | 431 | EFA102502 | 4995 | EFA1c0031_orf_36p | 10627 |
| E3M10000031D08 | 432 | EFA102503 | 4996 | EFA1c0032_orf_32p | 10643 |
| E3M10000031E03 | 433 | EFA102501 | 4994 | EFA1c0031_orf_35p | 10626 |
| E3M10000031E09 | 434 | EFA102736 | 5007 | EFA1c0022_orf_60p | 10556 |
| E3M10000031F02 | 435 | EFA100642 | 4884 | EFA1c0041_orf_56p | 10792 |
| E3M10000031F02 | 435 | EFA101685 | 4952 | EFA1c0041_orf_55p | 10791 |
| E3M10000031F04 | 436 | EFA101160 | 4917 | EFA1c0022_orf_3p | 10549 |
| E3M10000031F07 | 437 | EFA102656 | 5004 | EFA1c0039_orf_26p | 10734 |
| E3M10000031F09 | 438 | EFA102764 | 5008 | EFA1c0008_orf_3p | 10478 |
| E3M10000031F11 | 439 | EFA102549 | 5000 | EFA1c0022_orf_24p | 10538 |
| E3M10000031F11 | 439 | EFA102551 | 5001 | EFA1c0022_orf_25p | 10539 |
| E3M10000031G03 | 440 | EFA102655 | 5003 | EFA1c0039_orf_25p | 10733 |
| E3M10000031G04 | 441 | EFA103571 | 5030 | EFA1c0044_orf_101p | 10879 |
| E3M10000031G05 | 442 | EFA102501 | 4994 | EFA1c0031_orf_35p | 10626 |
| E3M10000031G06 | 443 | EFA102656 | 5004 | EFA1c0039_orf_26p | 10734 |
| E3M10000031G07 | 444 | EFA103038 | 5017 | EFA1c0030_orf_17p | 10613 |
| E3M10000031G08 | 445 | EFA100295 | 4873 | EFA1c0021_orf_15p | 10517 |
| E3M10000031G11 | 446 | EFA101162 | 4919 | EFA1c0022_orf_5p | 10555 |
| E3M10000031H05 | 447 | EFA101121 | 4912 | EFA1c0036_orf_112p | 10686 |
| E3M10000031H06 | 448 | EFA101540 | 4947 | EFA1c0012_orf_4p | 10487 |
| E3M10000031H07 | 449 | EFA103038 | 5017 | EFA1c0030_orf_17p | 10613 |
| E3M10000031H08 | 450 | EFA102736 | 5007 | EFA1c0022_orf_60p | 10556 |
| E3M10000031H10 | 451 | EFA103038 | 5017 | EFA1c0030_orf_17p | 10613 |
| E3M10000031H11 | 452 | EFA100642 | 4884 | EFA1c0041_orf_56p | 10792 |
| E3M10000031H11 | 452 | EFA101685 | 4952 | EFA1c0041_orf_55p | 10791 |
| E3M10000032A02 | 453 | EFA100704 | 4887 | EFA1c0010_orf_4p | 10482 |
| E3M10000032A04 | 454 | EFA101670 | 4950 | EFA1c0019_orf_20p | 10511 |
| E3M10000032A06 | 455 | EFA101022 | 4906 | EFA1c0043_orf_69p | 10875 |
| E3M10000032A07 | 456 | EFA101670 | 4950 | EFA1c0019_orf_20p | 10511 |
| E3M10000032A08 | 457 | EFA100329 | 4875 | EFA1c0041_orf_35p | 10782 |
| E3M10000032A09 | 458 | EFA100394 | 4876 | EFA1c0034_orf_6p | 10675 |
| E3M10000032A10 | 459 | EFA101410 | 4935 | EFA1c0022_orf_12p | 10525 |
| E3M10000032A11 | 460 | EFA100642 | 4884 | EFA1c0041_orf_56p | 10792 |
| E3M10000032A11 | 460 | EFA101685 | 4952 | EFA1c0041_orf_55p | 10791 |
| E3M10000032B03 | 461 | EFA101540 | 4947 | EFA1c0012_orf_4p | 10487 |
| E3M10000032B04 | 462 | EFA102091 | 4977 | EFA1c0010_orf_3p | 10481 |
| E3M10000032B07 | 463 | EFA101164 | 4921 | EFA1c0022_orf_7p | 10558 |
| E3M10000032B08 | 464 | EFA102698 | 5005 | EFA1c0045_orf_115p | 10909 |
| E3M10000032B09 | 465 | EFA102051 | 4976 | #N/A | #N/A |
| E3M10000032B11 | 466 | EFA102091 | 4977 | EFA1c0010_orf_3p | 10481 |
| E3M10000032B12 | 467 | EFA100295 | 4873 | EFA1c0021_orf_15p | 10517 |
| E3M10000032C01 | 468 | EFA103062 | 5019 | EFA1c0030_orf_19p | 10615 |
| E3M10000032C02 | 469 | EFA100151 | 4864 | EFA1c0021_orf_14p | 10516 |
| E3M10000032C03 | 470 | EFA103348 | 5025 | EFA1c0043_orf_67p | 10873 |
| E3M10000032C04 | 471 | EFA101163 | 4920 | EFA1c0022_orf_6p | 10557 |
| E3M10000032C06 | 472 | EFA101150 | 4915 | EFA1c0038_orf_57p | 10719 |
| E3M10000032C09 | 473 | EFA100740 | 4889 | EFA1c0022_orf_22p | 10536 |
| E3M10000032C11 | 474 | EFA102501 | 4994 | EFA1c0031_orf_35p | 10626 |
| E3M10000032C12 | 475 | EFA101165 | 4922 | EFA1c0022_orf_8p | 10559 |
| E3M10000032D01 | 476 | EFA103504 | 5028 | EFA1c0033_orf_94p | 10671 |
| E3M10000032D02 | 477 | EFA101162 | 4919 | EFA1c0022_orf_5p | 10555 |
| E3M10000032D03 | 478 | EFA100399 | 4878 | EFA1c0041_orf_104p | 10766 |
| E3M10000032D06 | 479 | EFA100151 | 4864 | EFA1c0021_orf_14p | 10516 |
| E3M10000032D09 | 480 | EFA100151 | 4864 | EFA1c0021_orf_14p | 10516 |
| E3M10000032D12 | 481 | EFA101165 | 4922 | EFA1c0022_orf_8p | 10559 |
| E3M10000032E04 | 482 | EFA101792 | 4961 | EFA1c0042_orf_113p | 10805 |
| E3M10000032E04 | 482 | EFA103786 | 5031 | EFA1c0042_orf_114p | 10806 |
| E3M10000032E05 | 483 | EFA103038 | 5017 | EFA1c0030_orf_17p | 10613 |
| E3M10000032E08 | 484 | EFA101164 | 4921 | EFA1c0022_orf_7p | 10558 |
| E3M10000032E10 | 485 | EFA100870 | 4899 | EFA1c0031_orf_36p | 10627 |
| E3M10000032E10 | 485 | EFA102502 | 4995 | EFA1c0031_orf_36p | 10627 |
| E3M10000032E11 | 486 | EFA101414 | 4939 | EFA1c0022_orf_15p | 10528 |
| E3M10000032E12 | 487 | EFA102326 | 4986 | #N/A | #N/A |
| E3M10000032F02 | 488 | EFA100210 | 4870 | EFA1c0022_orf_9p | 10560 |
| E3M10000032F02 | 488 | EFA101165 | 4922 | EFA1c0022_orf_8p | 10559 |
| E3M10000032F03 | 489 | EFA101414 | 4939 | EFA1c0022_orf_15p | 10528 |
| E3M10000032F05 | 490 | EFA102541 | 4998 | EFA1c0028_orf_3p | 10602 |
| E3M10000032F07 | 491 | EFA102780 | 5010 | EFA1c0045_orf_101p | 10908 |
| E3M10000032F08 | 492 | EFA102501 | 4994 | EFA1c0031_orf_35p | 10626 |
| E3M10000032F11 | 493 | EFA100642 | 4884 | EFA1c0041_orf_56p | 10792 |
| E3M10000032F12 | 494 | EFA102201 | 4982 | #N/A | #N/A |
| E3M10000032G01 | 495 | EFA102502 | 4995 | EFA1c0031_orf_36p | 10627 |
| E3M10000032G02 | 496 | EFA100870 | 4899 | EFA1c0031_orf_36p | 10627 |
| E3M10000032G04 | 497 | EFA100704 | 4887 | EFA1c0010_orf_4p | 10482 |
| E3M10000032G05 | 498 | EFA101540 | 4947 | EFA1c0012_orf_4p | 10487 |
| E3M10000032G06 | 499 | EFA100190 | 4867 | EFA1c0010_orf_2p | 10480 |
| E3M10000032G07 | 500 | EFA100919 | 4901 | EFA1c0013_orf_12p | 10491 |
| E3M10000032H05 | 501 | EFA100200 | 4869 | EFA1c0041_orf_88p | 10798 |
| E3M10000032H06 | 502 | EFA101833 | 4965 | EFA1c0038_orf_62p | 10720 |
| E3M10000032H08 | 503 | EFA102656 | 5004 | EFA1c0039_orf_26p | 10734 |
| E3M10000032H09 | 504 | EFA103571 | 5030 | EFA1c0044_orf_101p | 10879 |
| E3M10000032H10 | 505 | EFA100642 | 4884 | EFA1c0041_orf_56p | 10792 |
| E3M10000033A03 | 506 | EFA101253 | 4924 | EFA1c0043_orf_178p | 10852 |
| E3M10000033A04 | 507 | EFA102503 | 4996 | EFA1c0032_orf_32p | 10643 |
| E3M10000033A05 | 508 | EFA102551 | 5001 | EFA1c0022_orf_25p | 10539 |
| E3M10000033A06 | 509 | EFA101415 | 4940 | EFA1c0022_orf_16p | 10529 |
| E3M10000033A07 | 510 | EFA102774 | 5009 | EFA1c0044_orf_25p | 10896 |
| E3M10000033A08 | 511 | EFA102656 | 5004 | EFA1c0039_orf_26p | 10734 |
| E3M10000033A11 | 512 | EFA100642 | 4884 | EFA1c0041_orf_56p | 10792 |
| E3M10000033B01 | 513 | EFA102006 | 4973 | EFA1c0025_orf_17p | 10580 |
| E3M10000033B02 | 514 | EFA101412 | 4937 | EFA1c0022_orf_14p | 10527 |
| E3M10000033B04 | 515 | EFA101765 | 4958 | EFA1c0025_orf_33p | 10587 |
| E3M10000033B05 | 516 | EFA102541 | 4998 | EFA1c0028_orf_3p | 10602 |
| E3M10000033B06 | 517 | EFA102351 | 4989 | EFA1c0032_orf_20p | 10634 |
| E3M10000033B08 | 518 | EFA102091 | 4977 | EFA1c0010_orf_3p | 10481 |
| E3M10000033B09 | 519 | EFA100210 | 4870 | EFA1c0022_orf_9p | 10560 |
| E3M10000033C01 | 520 | EFA101540 | 4947 | EFA1c0012_orf_4p | 10487 |
| E3M10000033C02 | 521 | EFA103174 | 5021 | EFA1c0036_orf_120p | 10689 |
| E3M10000033C05 | 522 | EFA102541 | 4998 | EFA1c0028_orf_3p | 10602 |
| E3M10000033C05 | 522 | EFA102542 | 4999 | EFA1c0028_orf_4p | 10603 |
| E3M10000033C09 | 523 | EFA100811 | 4898 | EFA1c0022_orf_33p | 10546 |
| E3M10000033C10 | 524 | EFA101410 | 4935 | EFA1c0022_orf_12p | 10525 |
| E3M10000033C10 | 524 | EFA101411 | 4936 | EFA1c0022_orf_13p | 10526 |
| E3M10000033C11 | 525 | EFA103504 | 5028 | EFA1c0033_orf_94p | 10671 |
| E3M10000033C12 | 526 | EFA102389 | 4992 | EFA1c0044_orf_83p | 10904 |
| E3M10000033D01 | 527 | EFA102351 | 4989 | EFA1c0032_orf_20p | 10634 |
| E3M10000033D04 | 528 | EFA101682 | 4951 | EFA1c0041_orf_53p | 10789 |
| E3M10000033D05 | 529 | EFA101417 | 4942 | EFA1c0022_orf_18p | 10531 |
| E3M10000033D06 | 530 | EFA100641 | 4883 | EFA1c0041_orf_57p | 10793 |
| E3M10000033D06 | 530 | EFA100642 | 4884 | EFA1c0041_orf_56p | 10792 |
| E3M10000033D09 | 531 | EFA101414 | 4939 | EFA1c0022_orf_15p | 10528 |
| E3M10000033D10 | 532 | EFA102006 | 4973 | EFA1c0025_orf_17p | 10580 |
| E3M10000033D11 | 533 | EFA102091 | 4977 | EFA1c0010_orf_3p | 10481 |
| E3M10000033E02 | 534 | EFA101477 | 4945 | EFA1c0043_orf_224p | 10861 |
| E3M10000033E03 | 535 | EFA101414 | 4939 | EFA1c0022_orf_15p | 10528 |
| E3M10000033E03 | 535 | EFA101415 | 4940 | EFA1c0022_orf_16p | 10529 |
| E3M10000033E04 | 536 | EFA102656 | 5004 | EFA1c0039_orf_26p | 10734 |
| E3M10000033E05 | 537 | EFA102503 | 4996 | EFA1c0032_orf_32p | 10643 |
| E3M10000033E07 | 538 | EFA102502 | 4995 | EFA1c0031_orf_36p | 10627 |
| E3M10000033E08 | 539 | EFA102351 | 4989 | EFA1c0032_orf_20p | 10634 |
| E3M10000033E09 | 540 | EFA100617 | 4882 | EFA1c0040_orf_93p | 10764 |
| E3M10000033E11 | 541 | EFA102551 | 5001 | EFA1c0022_orf_25p | 10539 |
| E3M10000033F01 | 542 | EFA102502 | 4995 | EFA1c0031_orf_36p | 10627 |
| E3M10000033F03 | 543 | EFA101686 | 4953 | EFA1c0045_orf_63p | 10940 |
| E3M10000033F04 | 544 | EFA100704 | 4887 | EFA1c0010_orf_4p | 10482 |
| E3M10000033F05 | 545 | EFA102501 | 4994 | EFA1c0031_orf_35p | 10626 |
| E3M10000033F07 | 546 | EFA102502 | 4995 | EFA1c0031_orf_36p | 10627 |
| E3M10000033F08 | 547 | EFA101165 | 4922 | EFA1c0022_orf_8p | 10559 |
| E3M10000033F10 | 548 | EFA103571 | 5030 | EFA1c0044_orf_101p | 10879 |
| E3M10000033F12 | 549 | EFA102541 | 4998 | EFA1c0028_orf_3p | 10602 |
| E3M10000033F12 | 549 | EFA102542 | 4999 | EFA1c0028_orf_4p | 10603 |
| E3M10000033G01 | 550 | EFA101163 | 4920 | EFA1c0022_orf_6p | 10557 |
| E3M10000033G02 | 551 | EFA102813 | 5013 | EFA1c0043_orf_9p | 10878 |
| E3M10000033G03 | 552 | EFA102656 | 5004 | EFA1c0039_orf_26p | 10734 |
| E3M10000033G04 | 553 | EFA102326 | 4986 | #N/A | #N/A |
| E3M10000033G06 | 554 | EFA101404 | 4933 | EFA1c0033_orf_55p | 10663 |
| E3M10000033G07 | 555 | EFA101685 | 4952 | EFA1c0041_orf_55p | 10791 |
| E3M10000033G08 | 556 | EFA101141 | 4914 | EFA1c0030_orf_18p | 10614 |
| E3M10000033G09 | 557 | EFA102656 | 5004 | EFA1c0039_orf_26p | 10734 |
| E3M10000033G12 | 558 | EFA101686 | 4953 | EFA1c0045_orf_63p | 10940 |
| E3M10000033H02 | 559 | EFA101415 | 4940 | EFA1c0022_orf_16p | 10529 |
| E3M10000033H04 | 560 | EFA102780 | 5010 | EFA1c0045_orf_101p | 10908 |
| E3M10000033H05 | 561 | EFA100741 | 4890 | EFA1c0022_orf_21p | 10535 |
| E3M10000033H07 | 562 | EFA102502 | 4995 | EFA1c0031_orf_36p | 10627 |
| E3M10000033H08 | 563 | EFA101160 | 4917 | EFA1c0022_orf_3p | 10549 |
| E3M10000033H09 | 564 | EFA100642 | 4884 | EFA1c0041_orf_56p | 10792 |
| E3M10000033H10 | 565 | EFA101079 | 4908 | #N/A | #N/A |
| E3M10000033H11 | 566 | EFA100190 | 4867 | EFA1c0010_orf_2p | 10480 |
| E3M10000034A02 | 567 | EFA102501 | 4994 | EFA1c0031_orf_35p | 10626 |
| E3M10000034A03 | 568 | EFA100978 | 4904 | EFA1c0022_orf_27p | 10541 |
| E3M10000034A04 | 569 | EFA103038 | 5017 | EFA1c0030_orf_17p | 10613 |
| E3M10000034B02 | 570 | EFA103504 | 5028 | EFA1c0033_orf_94p | 10671 |
| E3M10000034B04 | 571 | EFA102655 | 5003 | EFA1c0039_orf_25p | 10733 |
| E3M10000034C04 | 572 | EFA102502 | 4995 | EFA1c0031_orf_36p | 10627 |
| E3M10000034D01 | 573 | EFA100704 | 4887 | EFA1c0010_orf_4p | 10482 |
| E3M10000034D02 | 574 | EFA100190 | 4867 | EFA1c0010_orf_2p | 10480 |
| E3M10000034E01 | 575 | EFA101162 | 4919 | EFA1c0022_orf_5p | 10555 |
| E3M10000034E04 | 576 | EFA100190 | 4867 | EFA1c0010_orf_2p | 10480 |
| E3M10000034F02 | 577 | EFA101162 | 4919 | EFA1c0022_orf_5p | 10555 |
| E3M10000034F03 | 578 | EFA103038 | 5017 | EFA1c0030_orf_17p | 10613 |
| E3M10000034F04 | 579 | EFA100190 | 4867 | EFA1c0010_orf_2p | 10480 |
| E3M10000034G02 | 580 | EFA102501 | 4994 | EFA1c0031_orf_35p | 10626 |
| E3M10000034G03 | 581 | EFA100740 | 4889 | EFA1c0022_orf_22p | 10536 |
| E3M10000034H02 | 582 | EFA101257 | 4925 | EFA1c0045_orf_159p | 10917 |
| E3M10000034H03 | 583 | EFA102501 | 4994 | EFA1c0031_orf_35p | 10626 |
| E3M10000035A02 | 584 | EFA103268 | 5023 | EFA1c0010_orf_1p | 10479 |
| E3M10000035A04 | 585 | EFA103571 | 5030 | EFA1c0044_orf_101p | 10879 |
| E3M10000035A05 | 586 | EFA101540 | 4947 | EFA1c0012_orf_4p | 10487 |
| E3M10000035A06 | 587 | EFA103571 | 5030 | EFA1c0044_orf_101p | 10879 |
| E3M10000035A08 | 588 | EFA103038 | 5017 | EFA1c0030_orf_17p | 10613 |
| E3M10000035A09 | 589 | EFA100210 | 4870 | EFA1c0022_orf_9p | 10560 |
| E3M10000035A11 | 590 | EFA100151 | 4864 | EFA1c0021_orf_14p | 10516 |
| E3M10000035B01 | 591 | EFA101022 | 4906 | EFA1c0043_orf_69p | 10875 |
| E3M10000035B03 | 592 | EFA100704 | 4887 | EFA1c0010_orf_4p | 10482 |
| E3M10000035B06 | 593 | EFA101164 | 4921 | EFA1c0022_orf_7p | 10558 |
| E3M10000035B07 | 594 | EFA103571 | 5030 | EFA1c0044_orf_101p | 10879 |
| E3M10000035B08 | 595 | EFA102780 | 5010 | EFA1c0045_orf_101p | 10908 |
| E3M10000035B10 | 596 | EFA100151 | 4864 | EFA1c0021_orf_14p | 10516 |
| E3M10000035B11 | 597 | EFA103571 | 5030 | EFA1c0044_orf_101p | 10879 |
| E3M10000035B12 | 598 | EFA103038 | 5017 | EFA1c0030_orf_17p | 10613 |
| E3M10000035C01 | 599 | EFA100704 | 4887 | EFA1c0010_orf_4p | 10482 |
| E3M10000035C03 | 600 | EFA101417 | 4942 | EFA1c0022_orf_18p | 10531 |
| E3M10000035C04 | 601 | EFA103038 | 5017 | EFA1c0030_orf_17p | 10613 |
| E3M10000035C05 | 602 | EFA100870 | 4899 | EFA1c0031_orf_36p | 10627 |
| E3M10000035C06 | 603 | EFA101160 | 4917 | EFA1c0022_orf_3p | 10549 |
| E3M10000035C07 | 604 | EFA100870 | 4899 | EFA1c0031_orf_36p | 10627 |
| E3M10000035C08 | 605 | EFA100741 | 4890 | EFA1c0022_orf_21p | 10535 |
| E3M10000035C08 | 605 | EFA100742 | 4891 | EFA1c0022_orf_20p | 10534 |
| E3M10000035C09 | 606 | EFA103062 | 5019 | EFA1c0030_orf_19p | 10615 |
| E3M10000035C11 | 607 | EFA100704 | 4887 | EFA1c0010_orf_4p | 10482 |
| E3M10000035C12 | 608 | EFA100704 | 4887 | EFA1c0010_orf_4p | 10482 |
| E3M10000035D02 | 609 | EFA101160 | 4917 | EFA1c0022_orf_3p | 10549 |
| E3M10000035D03 | 610 | EFA103504 | 5028 | EFA1c0033_orf_94p | 10671 |
| E3M10000035D04 | 611 | EFA101540 | 4947 | EFA1c0012_orf_4p | 10487 |
| E3M10000035D05 | 612 | EFA101162 | 4919 | EFA1c0022_orf_5p | 10555 |
| E3M10000035D10 | 613 | EFA103571 | 5030 | EFA1c0044_orf_101p | 10879 |
| E3M10000035D11 | 614 | EFA100919 | 4901 | EFA1c0013_orf_12p | 10491 |
| E3M10000035E03 | 615 | EFA101414 | 4939 | EFA1c0022_orf_15p | 10528 |
| E3M10000035E04 | 616 | EFA101141 | 4914 | EFA1c0030_orf_18p | 10614 |
| E3M10000035E05 | 617 | EFA102006 | 4973 | EFA1c0025_orf_17p | 10580 |
| E3M10000035E07 | 618 | EFA100919 | 4901 | EFA1c0013_orf_12p | 10491 |
| E3M10000035E08 | 619 | EFA101162 | 4919 | EFA1c0022_orf_5p | 10555 |
| E3M10000035E09 | 620 | EFA100312 | 4874 | EFA1c0032_orf_28p | 10641 |
| E3M10000035E10 | 621 | EFA101022 | 4906 | EFA1c0043_orf_69p | 10875 |
| E3M10000035E11 | 622 | EFA100870 | 4899 | EFA1c0031_orf_36p | 10627 |
| E3M10000035E12 | 623 | EFA100704 | 4887 | EFA1c0010_orf_4p | 10482 |
| E3M10000035F01 | 624 | EFA101417 | 4942 | EFA1c0022_orf_18p | 10531 |
| E3M10000035F02 | 625 | EFA101925 | 4971 | EFA1c0044_orf_19p | 10893 |
| E3M10000035F03 | 626 | EFA100312 | 4874 | EFA1c0032_orf_28p | 10641 |
| E3M10000035F06 | 627 | EFA101080 | 4909 | #N/A | #N/A |
| E3M10000035F07 | 628 | EFA101165 | 4922 | EFA1c0022_orf_8p | 10559 |
| E3M10000035F08 | 629 | EFA100704 | 4887 | EFA1c0010_orf_4p | 10482 |
| E3M10000035F09 | 630 | EFA101410 | 4935 | EFA1c0022_orf_12p | 10525 |
| E3M10000035F09 | 630 | EFA101411 | 4936 | EFA1c0022_orf_13p | 10526 |
| E3M10000035F11 | 631 | EFA100704 | 4887 | EFA1c0010_orf_4p | 10482 |
| E3M10000035F12 | 632 | EFA101120 | 4911 | EFA1c0036_orf_113p | 10687 |
| E3M10000035G02 | 633 | EFA100190 | 4867 | EFA1c0010_orf_2p | 10480 |
| E3M10000035G02 | 633 | EFA102091 | 4977 | EFA1c0010_orf_3p | 10481 |
| E3M10000035G04 | 634 | EFA100210 | 4870 | EFA1c0022_orf_9p | 10560 |
| E3M10000035G05 | 635 | EFA102502 | 4995 | EFA1c0031_orf_36p | 10627 |
| E3M10000035G08 | 636 | EFA100642 | 4884 | EFA1c00241_orf_56p | 10792 |
| E3M10000035G09 | 637 | EFA103504 | 5028 | EFA1c0033_orf_94p | 10671 |
| E3M10000035G09 | 637 | EFA103508 | 5029 | EFA1c0033_orf_95p | 10672 |
| E3M10000035G10 | 638 | EFA103038 | 5017 | EFA1c0030_orf_17p | 10613 |
| E3M10000035G11 | 639 | EFA101540 | 4947 | EFA1c0012_orf_4p | 10487 |
| E3M10000035H03 | 640 | EFA101080 | 4909 | #N/A | #N/A |
| E3M10000035H06 | 641 | EFA100210 | 4870 | EFA1c0022_orf_9p | 10560 |
| E3M10000035H09 | 642 | EFA102501 | 4994 | EFA1c0031_orf_35p | 10626 |
| E3M10000035H11 | 643 | EFA101257 | 4925 | EFA1c0045_orf_159p | 10917 |
| E3M10000035H11 | 643 | EFA101258 | 4926 | EFA1c0045_orf_160p | 10918 |
| E3M10000036A03 | 644 | EFA103504 | 5028 | EFA1c0033_orf_94p | 10671 |
| E3M10000036A04 | 645 | EFA101416 | 4941 | EFA1c0022_orf_17p | 10530 |
| B3M10000036A05 | 646 | EFA102780 | 5010 | EFA1c0045_orf_101p | 10908 |
| E3M10000036A06 | 647 | EFA101540 | 4947 | EFA1c0012_orf_4p | 10487 |
| E3M10000036A07 | 648 | EFA103268 | 5023 | EFA1c0010_orf_1p | 10479 |
| E3M10000036A08 | 649 | EFA103038 | 5017 | EFA1c0030_orf_17p | 10613 |
| E3M10000036A09 | 650 | EFA101165 | 4922 | EFA1c0022_orf_8p | 10559 |
| E3M10000036A10 | 651 | EFA100210 | 4870 | EFA1c0022_orf_9p | 10560 |
| E3M10000036B01 | 652 | EFA101121 | 4912 | EFA1c0036_orf_112p | 10686 |
| E3M10000036B03 | 653 | EFA101686 | 4953 | EFA1c0045_orf_63p | 10940 |
| E3M10000036B06 | 654 | EFA101162 | 4919 | EFA1c0022_orf_5p | 10555 |
| E3M10000036B07 | 655 | EFA103038 | 5017 | EFA1c0030_orf_17p | 10613 |
| E3M10000036B08 | 656 | EFA100151 | 4864 | EFA1c0021_orf_14p | 10516 |
| E3M10000036B09 | 657 | EFA100190 | 4867 | EFA1c0010_orf_2p | 10480 |
| E3M10000036B11 | 658 | EFA103504 | 5028 | EFA1c0033_orf_94p | 10671 |
| E3M10000036B12 | 659 | EFA101162 | 4919 | EFA1c0022_orf_5p | 10555 |
| E3M10000036B12 | 659 | EFA101163 | 4920 | EFA1c0022_orf_6p | 10557 |
| E3M10000036C01 | 660 | EFA101416 | 4941 | EFA1c0022_orf_17p | 10530 |
| E3M10000036C03 | 661 | EFA103571 | 5030 | EFA1c0044_orf_101p | 10879 |
| E3M10000036C06 | 662 | EFA102091 | 4977 | EFA1c0010_orf_3p | 10481 |
| E3M10000036C07 | 663 | EFA101141 | 4914 | EFA1c0030_orf_18p | 10614 |
| E3M10000036C08 | 664 | EFA100151 | 4864 | EFA1c0021_orf_14p | 10516 |
| E3M10000036C09 | 665 | EFA101540 | 4947 | EFA1c0012_orf_4p | 10487 |
| E3M10000036C10 | 666 | EFA101540 | 4947 | EFA1c0012_orf_4p | 10487 |
| E3M10000036C11 | 667 | EFA101417 | 4942 | EFA1c0022_orf_18p | 10531 |
| E3M10000036D03 | 668 | EFA100704 | 4887 | EFA1c0010_orf_4p | 10482 |
| E3M10000036D04 | 669 | EFA102201 | 4982 | #N/A | #N/A |
| E3M10000036D06 | 670 | EFA100740 | 4889 | EFA1c0022_orf_22p | 10536 |
| E3M10000036D08 | 671 | EFA101164 | 4921 | EFA1c0022_orf_7p | 10558 |
| E3M10000036D09 | 672 | EFA103571 | 5030 | EFA1c0044_orf_101p | 10879 |
| E3M10000036D10 | 673 | EFA101121 | 4912 | EFA1c0036_orf_112p | 10686 |
| E3M10000036D11 | 674 | EFA102502 | 4995 | EFA1c0031_orf_36p | 10627 |
| E3M10000036D12 | 675 | EFA102091 | 4977 | EFA1c0010_orf_3p | 10481 |
| E3M10000036E01 | 676 | EFA101121 | 4912 | EFA1c0036_orf_112p | 10686 |
| E3M10000036E04 | 677 | EFA101162 | 4919 | EFA1c0022_orf_5p | 10555 |
| E3M10000036E05 | 678 | EFA101414 | 4939 | EFA1c0022_orf_15p | 10528 |
| E3M10000036E07 | 679 | EFA101022 | 4906 | EFA1c0043_orf_69p | 10875 |
| E3M10000036E08 | 680 | EFA100210 | 4870 | EFA1c0022_orf_9p | 10560 |
| E3M10000036F03 | 681 | EFA100210 | 4870 | EFA1c0022_orf_9p | 10560 |
| E3M10000036F04 | 682 | EFA101686 | 4953 | EFA1c0045_orf_63p | 10940 |
| E3M10000036F05 | 683 | EFA101792 | 4961 | EFA1c0042_orf_113p | 10805 |
| E3M10000036F08 | 684 | EFA102091 | 4977 | EFA1c0010_orf_3p | 10481 |
| E3M10000036F09 | 685 | EFA101404 | 4933 | EFA1c0033_orf_55p | 10663 |
| E3M10000036F10 | 686 | EFA101162 | 4919 | EFA1c0022_orf_5p | 10555 |
| E3M10000036F12 | 687 | EFA101163 | 4920 | EFA1c0022_orf_6p | 10557 |
| E3M10000036G01 | 688 | EFA102549 | 5000 | EFA1c0022_orf_24p | 10538 |
| E3M10000036G01 | 688 | EFA102551 | 5001 | EFA1c0022_orf_25p | 10539 |
| E3M10000036G02 | 689 | EFA101121 | 4912 | EFA1c0036_orf_112p | 10686 |
| E3M10000036G03 | 690 | EFA102656 | 5004 | EFA1c0039_orf_26p | 10734 |
| E3M10000036G04 | 691 | EFA102091 | 4977 | EFA1c0010_orf_3p | 10481 |
| B3M10000036G06 | 692 | EFA100295 | 4873 | EFA1c0021_orf_15p | 10517 |
| E3M10000036G10 | 693 | EFA101162 | 4919 | EFA1c0022_orf_5p | 10555 |
| E3M10000036H02 | 694 | EFA103038 | 5017 | EFA1c0030_orf_17p | 10613 |
| E3M10000036H03 | 695 | EFA103571 | 5030 | EFA1c0044_orf_101p | 10879 |
| E3M10000036H04 | 696 | EFA103365 | 5026 | EFA1c0022_orf_1p | 10533 |
| E3M10000036H05 | 697 | EFA100194 | 4868 | EFA1c0022_orf_26p | 10540 |
| E3M10000036H06 | 698 | EFA101162 | 4919 | EFA1c0022_orf_5p | 10555 |
| E3M10000036H07 | 699 | EFA102501 | 4994 | EFA1c0031_orf_35p | 10626 |
| E3M10000036H08 | 700 | EFA103210 | 5022 | EFA1c0036_orf_119p | 10688 |
| E3M10000036H09 | 701 | EFA101162 | 4919 | EFA1c0022_orf_5p | 10555 |
| E3M10000036H10 | 702 | EFA101141 | 4914 | EFA1c0030_orf_18p | 10614 |
| E3M10000037A03 | 703 | EFA102091 | 4977 | EFA1c0010_orf_3p | 10481 |
| E3M10000037A06 | 704 | EFA100870 | 4899 | EFA1c0031_orf_36p | 10627 |
| E3M10000037A08 | 705 | EFA103365 | 5026 | EFA1c0022_orf_1p | 10533 |
| E3M10000037A09 | 706 | EFA100756 | 4893 | EFA1c0024_orf_39p | 10575 |
| E3M10000037A10 | 707 | EFA103268 | 5023 | EFA1c0010_orf_1p | 10479 |
| E3M10000037B02 | 708 | EFA100641 | 4883 | EFA1c0041_orf_57p | 10793 |
| E3M10000037B02 | 708 | EFA100642 | 4884 | EFA1c0041_orf_56p | 10792 |
| E3M10000037B07 | 709 | EFA101162 | 4919 | EFA1c0022_orf_5p | 10555 |
| E3M10000037B08 | 710 | EFA100151 | 4864 | EFA1c0021_orf_14p | 10516 |
| E3M10000037B11 | 711 | EFA101686 | 4953 | EFA1c0045_orf_63p | 10940 |
| E3M10000037C01 | 712 | EFA101080 | 4909 | #N/A | #N/A |
| E3M10000037C02 | 713 | EFA102351 | 4989 | EFA1c0032_orf_20p | 10634 |
| E3M10000037C04 | 714 | EFA103504 | 5028 | EFA1c0033_orf_94p | 10671 |
| E3M10000037C05 | 715 | EFA102655 | 5003 | EFA1c0039_orf_25p | 10733 |
| B3M10000037C07 | 716 | EFA101160 | 4917 | EFA1c0022_orf_3p | 10549 |
| E3M10000037C07 | 716 | EFA101161 | 4918 | EFA1c0022_orf_4p | 10551 |
| E3M10000037C11 | 717 | EFA100615 | 4881 | EFA1c0016_orf_29p | 10501 |
| E3M10000037C12 | 718 | EFA102502 | 4995 | EFA1c0031_orf_36p | 10627 |
| E3M10000037D02 | 719 | EFA100642 | 4884 | EFA1c0041_orf_56p | 10792 |
| E3M10000037D03 | 720 | EFA100795 | 4896 | EFA1c0043_orf_229p | 10863 |
| E3M10000037D03 | 720 | EFA103081 | 5020 | EFA1c0043_orf_28p | 10862 |
| E3M10000037D04 | 721 | EFA100210 | 4870 | EFA1c0022_orf_9p | 10560 |
| E3M10000037D05 | 722 | EFA101416 | 4941 | EFA1c0022_orf_17p | 10530 |
| E3M10000037D06 | 723 | EFA101161 | 4918 | EFA1c0022_orf_4p | 10551 |
| E3M10000037D09 | 724 | EFA100190 | 4867 | EFA1c0010_orf_2p | 10480 |
| E3M10000037D09 | 724 | EFA102091 | 4977 | EFA1c0010_orf_3p | 10481 |
| E3M10000037D11 | 725 | EFA100210 | 4870 | EFA1c0022_orf_9p | 10560 |
| E3M10000037E01 | 726 | EFA102736 | 5007 | EFA1c0022_orf_60p | 10556 |
| E3M10000037E02 | 727 | EFA100704 | 4887 | EFA1c0010_orf_4p | 10482 |
| E3M10000037E03 | 728 | EFA102503 | 4996 | EFA1c0032_orf_32p | 10643 |
| E3M10000037E05 | 729 | EFA101080 | 4909 | #N/A | #N/A |
| E3M10000037E07 | 730 | EFA100210 | 4870 | EFA1c0022_orf_9p | 10560 |
| E3M10000037E08 | 731 | EFA100642 | 4884 | EFA1c0041_orf_56p | 10792 |
| E3M10000037E10 | 732 | EFA101253 | 4924 | EFA1c0043_orf_178p | 10852 |
| E3M10000037E12 | 733 | EFA101686 | 4953 | EFA1c0045_orf_63p | 10940 |
| E3M10000037F01 | 734 | EFA103504 | 5028 | EFA1c0033_orf_94p | 10671 |
| E3M10000037F02 | 735 | EFA101160 | 4917 | EFA1c0022_orf_3p | 10549 |
| E3M10000037F06 | 736 | EFA100210 | 4870 | EFA1c0022_orf_9p | 10560 |
| E3M10000037F07 | 737 | EFA100210 | 4870 | EFA1c0022_orf_9p | 10560 |
| E3M10000037F12 | 738 | EFA101161 | 4918 | EFA1c0022_orf_4p | 10551 |
| E3M10000037G01 | 739 | EFA102656 | 5004 | EFA1c0039_orf_26p | 10734 |
| E3M10000037G02 | 740 | EFA101165 | 4922 | EFA1c0022_orf_8p | 10559 |
| E3M10000037G03 | 741 | EFA102780 | 5010 | EFA1c0045_orf_101p | 10908 |
| E3M10000037G05 | 742 | EFA102780 | 5010 | EFA1c0045_orf_101p | 10908 |
| E3M10000037G06 | 743 | EFA103295 | 5024 | EFA1c0032_orf_1p | 10633 |
| E3M10000037G07 | 744 | EFA101541 | 4948 | EFA1c0012_orf_5p | 10488 |
| E3M10000037G08 | 745 | EFA101121 | 4912 | EFA1c0036_orf_112p | 10686 |
| E3M10000037G10 | 746 | EFA101412 | 4937 | EFA1c0022_orf_14p | 10527 |
| E3M10000037G11 | 747 | EFA103038 | 5017 | EFA1c0030_orf_17p | 10613 |
| E3M10000037H02 | 748 | EFA101413 | 4938 | #N/A | #N/A |
| E3M10000037H05 | 749 | EFA101686 | 4953 | EFA1c0045_orf_63p | 10940 |
| E3M10000037H07 | 750 | EFA100955 | 4902 | EFA1c0022_orf_28p | 10542 |
| E3M10000037H10 | 751 | EFA101080 | 4909 | #N/A | #N/A |
| E3M10000037H11 | 752 | EFA102541 | 4998 | EFA1c0028_orf_3p | 10602 |
| E3M10000038A02 | 753 | EFA102541 | 4998 | EFA1c0028_orf_3p | 10602 |
| E3M10000038A03 | 754 | EFA103038 | 5017 | EFA1c0030_orf_17p | 10613 |
| E3M10000038A05 | 755 | EFA100151 | 4864 | EFA1c0021_orf_14p | 10516 |
| E3M10000038A06 | 756 | EFA102549 | 5000 | EFA1c0022_orf_24p | 10538 |
| E3M10000038A07 | 757 | EFA102501 | 4994 | EFA1c0031_orf_35p | 10626 |
| E3M10000038A09 | 758 | EFA102736 | 5007 | EFA1c0022_orf_60p | 10556 |
| E3M10000038A10 | 759 | EFA100210 | 4870 | EFA1c0022_orf_9p | 10560 |
| E3M10000038A11 | 760 | EFA101417 | 4942 | EFA1c0022_orf_18p | 10531 |
| E3M10000038B02 | 761 | EFA103210 | 5022 | EFA1c0036_orf_119p | 10688 |
| E3M10000038B03 | 762 | EFA102389 | 4992 | EFA1c0044_orf_83p | 10904 |
| E3M10000038B04 | 763 | EFA101414 | 4939 | EFA1c0022_orf_15p | 10528 |
| E3M10000038B05 | 764 | EFA100795 | 4896 | EFA1c0043_orf_229p | 10863 |
| E3M10000038B05 | 764 | EFA103081 | 5020 | EFA1c0043_orf_28p | 10862 |
| E3M10000038B07 | 765 | EFA100190 | 4867 | EFA1c0010_orf_2p | 10480 |
| E3M10000038B08 | 766 | EFA101160 | 4917 | EFA1c0022_orf_3p | 10549 |
| E3M10000038B09 | 767 | EFA101685 | 4952 | EFA1c0041_orf_55p | 10791 |
| E3M10000038B11 | 768 | EFA102656 | 5004 | EFA1c0039_orf_26p | 10734 |
| E3M10000038C02 | 769 | EFA102780 | 5010 | EFA1c0045_orf_101p | 10908 |
| E3M10000038C03 | 770 | EFA102656 | 5004 | EFA1c0039_orf_26p | 10734 |
| E3M10000038C05 | 771 | EFA101686 | 4953 | EFA1c0045_orf_63p | 10940 |
| E3M10000038C07 | 772 | EFA101963 | 4972 | EFA1c0043_orf_162p | 10848 |
| E3M10000038C10 | 773 | EFA102655 | 5003 | EFA1c0039_orf_25p | 10733 |
| E3M10000038C12 | 774 | EFA101080 | 4909 | #N/A | #N/A |
| E3M10000038D01 | 775 | EFA101540 | 4947 | EFA1c0012_orf_4p | 10487 |
| E3M10000038D02 | 776 | EFA103504 | 5028 | EFA1c0033_orf_94p | 10671 |
| E3M10000038D04 | 777 | EFA101540 | 4947 | EFA1c0012_orf_4p | 10487 |
| E3M10000038D08 | 778 | EFA101160 | 4917 | EFA1c0022_orf_3p | 10549 |
| B3M10000038D10 | 779 | EFA103504 | 5028 | EFA1c0033_orf_94p | 10671 |
| E3M10000038D11 | 780 | EFA103571 | 5030 | EFA1c0044_orf_101p | 10879 |
| E3M10000038D12 | 781 | EFA101540 | 4947 | EFA1c0012_orf_4p | 10487 |
| E3M10000038E02 | 782 | EFA100704 | 4887 | EFA1c0010_orf_4p | 10482 |
| E3M10000038E03 | 783 | EFA101159 | 4916 | EFA1c0022_orf_2p | 10543 |
| E3M10000038E04 | 784 | EFA101540 | 4947 | EFA1c0012_orf_4p | 10487 |
| E3M10000038E05 | 785 | EFA102656 | 5004 | EFA1c0039_orf_26p | 10734 |
| E3M10000038E07 | 786 | EFA102655 | 5003 | EFA1c0039_orf_25p | 10733 |
| E3M10000038E08 | 787 | EFA101121 | 4912 | EFA1c0036_orf_112p | 10686 |
| E3M10000038E11 | 788 | EFA102780 | 5010 | EFA1c0045_orf_101p | 10908 |
| E3M10000038F02 | 789 | EFA102541 | 4998 | EFA1c0028_orf_3p | 10602 |
| E3M10000038F04 | 790 | EFA101686 | 4953 | EFA1c0045_orf_63p | 10940 |
| E3M10000038F05 | 791 | EFA101160 | 4917 | EFA1c0022_orf_3p | 10549 |
| E3M10000038F05 | 791 | EFA101161 | 4918 | EFA1c0022_orf_4p | 10551 |
| E3M10000038F06 | 792 | EFA103571 | 5030 | EFA1c0044_orf_101p | 10879 |
| E3M10000038F07 | 793 | EFA103210 | 5022 | EFA1c0036_orf_119p | 10688 |
| E3M10000038F09 | 794 | EFA102185 | 4980 | EFA1c0045_orf_95p | 10950 |
| E3M10000038F10 | 795 | EFA101080 | 4909 | #N/A | #N/A |
| E3M10000038F11 | 796 | EFA100740 | 4889 | EFA1c0022_orf_22p | 10536 |
| E3M10000038G02 | 797 | EFA100919 | 4901 | EFA1c0013_orf_12p | 10491 |
| E3M10000038G03 | 798 | EFA101414 | 4939 | EFA1c0022_orf_15p | 10528 |
| E3M10000038G06 | 799 | EFA100704 | 4887 | EFA1c0010_orf_4p | 10482 |
| E3M10000038G07 | 800 | EFA102352 | 4990 | EFA1c0032_orf_21p | 10635 |
| E3M10000038G07 | 800 | EFA102353 | 4991 | EFA1c0032_orf_22p | 10636 |
| E3M10000038G11 | 801 | EFA102541 | 4998 | EFA1c0028_orf_3p | 10602 |
| E3M10000038H02 | 802 | EFA101414 | 4939 | EFA1c0022_orf_15p | 10528 |
| E3M10000038H05 | 803 | EFA101160 | 4917 | EFA1c0022_orf_3p | 10549 |
| E3M10000038H06 | 804 | EFA100295 | 4873 | EFA1c0021_orf_15p | 10517 |
| E3M10000038H07 | 805 | EFA101417 | 4942 | EFA1c0022_orf_18p | 10531 |
| E3M10000038H08 | 806 | EFA100295 | 4873 | EFA1c0021_orf_15p | 10517 |
| E3M10000038H09 | 807 | EFA102802 | 5012 | EFA1c0043_orf_18p | 10854 |
| E3M10000038H10 | 808 | EFA101541 | 4948 | EFA1c0012_orf_5p | 10488 |
| E3M10000039A02 | 809 | EFA101736 | 4955 | EFA1c0041_orf_14p | 10775 |
| E3M10000039A02 | 809 | EFA101737 | 4956 | EFA1c0041_orf_15p | 10778 |
| E3M10000039A06 | 810 | EFA102656 | 5004 | EFA1c0039_orf_26p | 10734 |
| E3M10000039A07 | 811 | EFA102006 | 4973 | EFA1c0025_orf_17p | 10580 |
| E3M10000039A08 | 812 | EFA101162 | 4919 | EFA1c0022_orf_5p | 10555 |
| E3M10000039A10 | 813 | EFA101257 | 4925 | EFA1c0045_orf_159p | 10917 |
| E3M10000039A11 | 814 | EFA101412 | 4937 | EFA1c0022_orf_14p | 10527 |
| E3M10000039B01 | 815 | EFA102541 | 4998 | EFA1c0028_orf_3p | 10602 |
| E3M10000039B03 | 816 | EFA101160 | 4917 | EFA1c0022_orf_3p | 10549 |
| E3M10000039B04 | 817 | EFA101415 | 4940 | EFA1c0022_orf_16p | 10529 |
| E3M10000039B04 | 817 | EFA101416 | 4941 | EFA1c0022_orf_17p | 10530 |
| E3M10000039B06 | 818 | EFA100870 | 4899 | EFA1c0031_orf_36p | 10627 |
| E3M10000039B07 | 819 | EFA102110 | 4978 | EFA1c0042_orf_99p | 10841 |
| E3M10000039B08 | 820 | EFA101416 | 4941 | EFA1c0022_orf_17p | 10530 |
| E3M10000039B09 | 821 | EFA101792 | 4961 | EFA1c0042_orf_113p | 10805 |
| E3M10000039B11 | 822 | EFA101080 | 4909 | #N/A | #N/A |
| E3M10000039C02 | 823 | EFA103062 | 5019 | EFA1c0030_orf_19p | 10615 |
| E3M10000039C04 | 824 | EFA101162 | 4919 | EFA1c0022_orf_5p | 10555 |
| E3M10000039C05 | 825 | EFA100739 | 4888 | EFA1c0022_orf_23p | 10537 |
| E3M10000039C06 | 826 | EFA103504 | 5028 | EFA1c0033_orf_94p | 10671 |
| E3M10000039C07 | 827 | EFA101791 | 4960 | EFA1c0042_orf_112p | 10804 |
| E3M10000039C07 | 827 | EFA101792 | 4961 | EFA1c0042_orf_113p | 10805 |
| E3M10000039C08 | 828 | EFA101159 | 4916 | EFA1c0022_orf_2p | 10543 |
| E3M10000039C09 | 829 | EFA102503 | 4996 | EFA1c0032_orf_32p | 10643 |
| E3M10000039C10 | 830 | EFA101162 | 4919 | EFA1c0022_orf_5p | 10555 |
| E3M10000039D02 | 831 | EFA101165 | 4922 | EFA1c0022_orf_8p | 10559 |
| E3M10000039D03 | 832 | EFA102655 | 5003 | EFA1c0039_orf_25p | 10733 |
| E3M10000039D04 | 833 | EFA102656 | 5004 | EFA1c0039_orf_26p | 10734 |
| E3M10000039D06 | 834 | EFA101540 | 4947 | EFA1c0012_orf_4p | 10487 |
| E3M10000039E01 | 835 | EFA102201 | 4982 | #N/A | #N/A |
| E3M10000039E02 | 836 | EFA101540 | 4947 | EFA1c0012_orf_4p | 10487 |
| E3M10000039E03 | 837 | EFA100919 | 4901 | EFA1c0013_orf_12p | 10491 |
| E3M10000039E05 | 838 | EFA101686 | 4953 | EFA1c0045_orf_63p | 10940 |
| E3M10000039E07 | 839 | EFA103295 | 5024 | EFA1c0032_orf_1p | 10633 |
| E3M10000039E08 | 840 | EFA101685 | 4952 | EFA1c0041_orf_55p | 10791 |
| E3M10000039F01 | 841 | EFA102656 | 5004 | EFA1c0039_orf_26p | 10734 |
| E3M10000039F02 | 842 | EFA103021 | 5015 | EFA1c0030_orf_16p | 10612 |
| E3M10000039F03 | 843 | EFA102788 | 5011 | EFA1c0033_orf_41p | 10661 |
| E3M10000039F03 | 843 | EFA103375 | 5027 | EFA1c0033_orf_40p | 10660 |
| E3M10000039F06 | 844 | EFA100739 | 4888 | EFA1c0022_orf_23p | 10537 |
| E3M10000039F07 | 845 | EFA102541 | 4998 | EFA1c0028_orf_3p | 10602 |
| E3M10000039F08 | 846 | EFA101162 | 4919 | EFA1c0022_orf_5p | 10555 |
| E3M10000039G01 | 847 | EFA102502 | 4995 | EFA1c0031_orf_36p | 10627 |
| E3M10000039G02 | 848 | EFA101686 | 4953 | EFA1c0045_orf_63p | 10940 |
| E3M10000039G05 | 849 | EFA100919 | 4901 | EFA1c0013_orf_12p | 10491 |
| E3M10000039G07 | 850 | EFA101686 | 4953 | EFA1c0045_orf_63p | 10940 |
| E3M10000039G09 | 851 | EFA102541 | 4998 | EFA1c0028_orf_3p | 10602 |
| E3M10000039G10 | 852 | EFA101682 | 4951 | EFA1c0041_orf_53p | 10789 |
| E3M10000039H02 | 853 | EFA101160 | 4917 | EFA1c0022_orf_3p | 10549 |
| E3M10000039H07 | 854 | EFA101080 | 4909 | #N/A | #N/A |
| E3M10000039H08 | 855 | EFA101121 | 4912 | EFA1c0036_orf_112p | 10686 |
| E3M10000039H10 | 856 | EFA101413 | 4938 | #N/A | #N/A |
| E3M10000039H11 | 857 | EFA101120 | 4911 | EFA1c0036_orf_113p | 10687 |
| E3M10000039H11 | 857 | EFA101121 | 4912 | EFA1c0036_orf_112p | 10686 |
| E3M10000040A03 | 858 | EFA101123 | 4913 | EFA1c0040_orf_22p | 10748 |
| E3M10000040A05 | 859 | EFA101080 | 4909 | #N/A | #N/A |
| E3M10000040A07 | 860 | EFA100157 | 4865 | EFA1c0034_orf_63p | 10673 |
| E3M10000040A09 | 861 | EFA102502 | 4995 | EFA1c0031_orf_36p | 10627 |
| E3M10000040A10 | 862 | EFA101417 | 4942 | EFA1c0022_orf_18p | 10531 |
| E3M10000040A11 | 863 | EFA101685 | 4952 | EFA1c0041_orf_55p | 10791 |
| E3M10000040B01 | 864 | EFA102788 | 5011 | EFA1c0033_orf_41p | 10661 |
| E3M10000040B02 | 865 | EFA102655 | 5003 | EFA1c0039_orf_25p | 10733 |
| E3M10000040B05 | 866 | EFA100190 | 4867 | EFA1c0010_orf_2p | 10480 |
| E3M10000040B05 | 866 | EFA103268 | 5023 | EFA1c0010_orf_1p | 10479 |
| E3M10000040B06 | 867 | EFA102518 | 4997 | EFA1c0032_orf_46p | 10647 |
| E3M10000040B08 | 868 | EFA100919 | 4901 | EFA1c0013_orf_12p | 10491 |
| E3M10000040B09 | 869 | EFA102502 | 4995 | EFA1c0031_orf_36p | 10627 |
| E3M10000040B10 | 870 | EFA102656 | 5004 | EFA1c0039_orf_26p | 10734 |
| E3M10000040B11 | 871 | EFA102764 | 5008 | EFA1c0008_orf_3p | 10478 |
| E3M10000040B12 | 872 | EFA100210 | 4870 | EFA1c0022_orf_9p | 10560 |
| E3M10000040C02 | 873 | EFA101080 | 4909 | #N/A | #N/A |
| E3M10000040C05 | 874 | EFA102501 | 4994 | EFA1c0031_orf_35p | 10626 |
| E3M10000040C06 | 875 | EFA102091 | 4977 | EFA1c0010_orf_3p | 10481 |
| E3M10000040C07 | 876 | EFA101121 | 4912 | EFA1c0036_orf_112p | 10686 |
| E3M10000040C08 | 877 | EFA102780 | 5010 | EFA1c0045_orf_101p | 10908 |
| E3M10000040C09 | 878 | EFA100165 | 4866 | EFA1c0032_orf_23p | 10637 |
| E3M10000040C09 | 878 | EFA102353 | 4991 | EFA1c0032_orf_22p | 10636 |
| E3M10000040C10 | 879 | EFA101686 | 4953 | EFA1c0045_orf_63p | 10940 |
| B3M10000040C11 | 880 | EFA102501 | 4994 | EFA1c0031_orf_35p | 10626 |
| E3M10000040C12 | 881 | EFA102780 | 5010 | EFA1c0045_orf_101p | 10908 |
| E3M10000040D03 | 882 | EFA102201 | 4982 | #N/A | #N/A |
| E3M10000040D04 | 883 | EFA101080 | 4909 | #N/A | #N/A |
| E3M10000040D08 | 884 | EFA101686 | 4953 | EFA1c0045_orf_63p | 10940 |
| E3M10000040D12 | 885 | EFA101686 | 4953 | EFA1c0045_orf_63p | 10940 |
| E3M10000040E02 | 886 | EFA102051 | 4976 | #N/A | #N/A |
| E3M10000040E10 | 887 | EFA101415 | 4940 | EFA1c0022_orf_16p | 10529 |
| E3M10000040E11 | 888 | EFA103039 | 5018 | EFA1c0043_orf_16p | 10850 |
| E3M10000040E12 | 889 | EFA102091 | 4977 | EFA1c0010_orf_3p | 10481 |
| E3M10000040F01 | 890 | EFA100295 | 4873 | EFA1c0021_orf_15p | 10517 |
| E3M10000040F03 | 891 | EFA102503 | 4996 | EFA1c0032_orf_32p | 10643 |
| E3M10000040F08 | 892 | EFA101080 | 4909 | #N/A | #N/A |
| E3M10000040F09 | 893 | EFA100919 | 4901 | EFA1c0013_orf_12p | 10491 |
| E3M10000040F10 | 894 | EFA102051 | 4976 | #N/A | #N/A |
| E3M10000040G01 | 895 | EFA101415 | 4940 | EFA1c0022_orf_16p | 10529 |
| E3M10000040G02 | 896 | EFA101424 | 4943 | EFA1c0041_orf_39p | 10784 |
| E3M10000040G02 | 896 | EFA101425 | 4944 | EFA1c0041_orf_40p | 10785 |
| E3M10000040G04 | 897 | EFA101141 | 4914 | EFA1c0030_orf_18p | 10614 |
| E3M10000040G05 | 898 | EFA101159 | 4916 | EFA1c0022_orf_2p | 10543 |
| E3M10000040G07 | 899 | EFA101079 | 4908 | #N/A | #N/A |
| E3M10000040G07 | 899 | EFA101080 | 4909 | #N/A | #N/A |
| E3M10000040G08 | 900 | EFA102186 | 4981 | EFA1c0045_orf_94p | 10949 |
| E3M10000040G09 | 901 | EFA103021 | 5015 | EFA1c0030_orf_16p | 10612 |
| E3M10000040G11 | 902 | EFA101414 | 4939 | EFA1c0022_orf_15p | 10528 |
| E3M10000040H02 | 903 | EFA102780 | 5010 | EFA1c0045_orf_101p | 10908 |
| E3M10000040H03 | 904 | EFA100394 | 4876 | EFA1c0034_orf_6p | 10675 |
| E3M10000040H04 | 905 | EFA100642 | 4884 | EFA1c0041_orf_56p | 10792 |
| E3M10000040H04 | 905 | EFA101685 | 4952 | EFA1c0041_orf_55p | 10791 |
| E3M10000040H05 | 906 | EFA100642 | 4884 | EFA1c0041_orf_56p | 10792 |
| E3M10000040H05 | 906 | EFA101685 | 4952 | EFA1c0041_orf_55p | 10791 |
| E3M10000040H09 | 907 | EFA101416 | 4941 | EFA1c0022_orf_17p | 10530 |
| E3M10000040H09 | 907 | EFA101417 | 4942 | EFA1c0022_orf_18p | 10531 |
| E3M10000041A03 | 908 | EFA100615 | 4881 | EFA1c0016_orf_29p | 10501 |
| E3M10000041A05 | 909 | EFA102502 | 4995 | EFA1c0031_orf_36p | 10627 |
| E3M10000041A08 | 910 | EFA100704 | 4887 | EFA1c0010_orf_4p | 10482 |
| E3M10000041A09 | 911 | EFA101354 | 4930 | EFA1c0032_orf_69p | 10648 |
| E3M10000041A10 | 912 | EFA10G001 | 4861 | EFA1c0030_orf_3p | 10618 |
| E3M10000041A11 | 913 | EFA100642 | 4884 | EFA1c0041_orf_56p | 10792 |
| E3M10000041A11 | 913 | EFA101685 | 4952 | EFA1c0041_orf_55p | 10791 |
| E3M10000041B02 | 914 | EFA102656 | 5004 | EFA1c0039_orf_26p | 10734 |
| E3M10000041B03 | 915 | EFA101414 | 4939 | EFA1c0022_orf_15p | 10528 |
| E3M10000041B05 | 916 | EFA102091 | 4977 | EFA1c0010_orf_3p | 10481 |
| E3M10000041B06 | 917 | EFA102091 | 4977 | EFA1c0010_orf_3p | 10481 |
| E3M10000041B08 | 918 | EFA102655 | 5003 | EFA1c0039_orf_25p | 10733 |
| E3M10000041B09 | 919 | EFA101924 | 4970 | EFA1c0044_orf_18p | 10891 |
| E3M10000041B09 | 919 | EFA101925 | 4971 | EFA1c0044_orf_19p | 10893 |
| E3M10000041B10 | 920 | EFA101080 | 4909 | #N/A | #N/A |
| E3M10000041B11 | 921 | EFA101416 | 4941 | EFA1c0022_orf_17p | 10530 |
| E3M10000041B11 | 921 | EFA101417 | 4942 | EFA1c0022_orf_18p | 10531 |
| E3M10000041B12 | 922 | EFA101411 | 4936 | EFA1c0022_orf_13p | 10526 |
| E3M10000041C01 | 923 | EFA100151 | 4864 | EFA1c0021_orf_14p | 10516 |
| E3M10000041C07 | 924 | EFA100739 | 4888 | EFA1c0022_orf_23p | 10537 |
| E3M10000041C08 | 925 | EFA101121 | 4912 | EFA1c0036_orf_112p | 10686 |
| E3M10000041C09 | 926 | EFA103365 | 5026 | EFA1c0022_orf_1p | 10533 |
| E3M10000041C10 | 927 | EFA102503 | 4996 | EFA1c0032_orf_32p | 10643 |
| E3M10000041C11 | 928 | EFA102655 | 5003 | EFA1c0039_orf_25p | 10733 |
| E3M10000041C12 | 929 | EFA100798 | 4897 | EFA1c0042_orf_160p | 10818 |
| E3M10000041D02 | 930 | EFA102502 | 4995 | EFA1c0031_orf_36p | 10627 |
| E3M10000041D03 | 931 | EFA101060 | 4907 | EFA1c0038_orf_73p | 10722 |
| E3M10000041D04 | 932 | EFA100642 | 4884 | EFA1c0041_orf_56p | 10792 |
| E3M10000041D04 | 932 | EFA101685 | 4952 | EFA1c0041_orf_55p | 10791 |
| E3M10000041D05 | 933 | EFA101080 | 4909 | #N/A | #N/A |
| E3M10000041D06 | 934 | EFA102656 | 5004 | EFA1c0039_orf_26p | 10734 |
| E3M10000041D08 | 935 | EFA101417 | 4942 | EFA1c0022_orf_18p | 10531 |
| E3M10000041D09 | 936 | EFA101120 | 4911 | EFA1c0036_orf_113p | 10687 |
| E3M10000041D10 | 937 | EFA102780 | 5010 | EFA1c0045_orf_101p | 10908 |
| E3M10000041D11 | 938 | EFA100704 | 4887 | EFA1c0010_orf_4p | 10482 |
| E3M10000041D12 | 939 | EFA100394 | 4876 | EFA1c0034_orf_6p | 10675 |
| E3M10000041E02 | 940 | EFA101797 | 4963 | EFA1c0045_orf_167p | 10924 |
| E3M10000041E03 | 941 | EFA102091 | 4977 | EFA1c0010_orf_3p | 10481 |
| E3M10000041E05 | 942 | EFA101415 | 4940 | EFA1c0022_orf_16p | 10529 |
| E3M10000041E07 | 943 | EFA102091 | 4977 | EFA1c0010_orf_3p | 10481 |
| E3M10000041E10 | 944 | EFA100704 | 4887 | EFA1c0010_orf_4p | 10482 |
| E3M10000041E11 | 945 | EFA100190 | 4867 | EFA1c0010_orf_2p | 10480 |
| E3M10000041F03 | 946 | EFA102503 | 4996 | EFA1c0032_orf_32p | 10643 |
| E3M10000041F05 | 947 | EFA102006 | 4973 | EFA1c0025_orf_17p | 10580 |
| E3M10000041F06 | 948 | EFA102501 | 4994 | EFA1c0031_orf_35p | 10626 |
| E3M10000041F07 | 949 | EFA101159 | 4916 | EFA1c0022_orf_2p | 10543 |
| E3M10000041F08 | 950 | EFA100295 | 4873 | EFA1c0021_orf_15p | 10517 |
| E3M10000041F09 | 951 | EFA101417 | 4942 | EFA1c0022_orf_18p | 10531 |
| E3M10000041F10 | 952 | EFA101079 | 4908 | #N/A | #N/A |
| E3M10000041F10 | 952 | EFA101080 | 4909 | #N/A | #N/A |
| E3M10000041F11 | 953 | EFA101160 | 4917 | EFA1c0022_orf_3p | 10549 |
| E3M10000041G02 | 954 | EFA101141 | 4914 | EFA1c0030_orf_18p | 10614 |
| E3M10000041G03 | 955 | EFA102253 | 4984 | EFA1c0038_orf_85p | 10727 |
| E3M10000041G04 | 956 | EFA101685 | 4952 | EFA1c0041_orf_55p | 10791 |
| E3M10000041G06 | 957 | EFA100978 | 4904 | EFA1c0022_orf_27p | 10541 |
| E3M10000041G07 | 958 | EFA101141 | 4914 | EFA1c0030_orf_18p | 10614 |
| E3M10000041G08 | 959 | EFA100704 | 4887 | EFA1c0010_orf_4p | 10482 |
| E3M10000041G09 | 960 | EFA100704 | 4887 | EFA1c0010_orf_4p | 10482 |
| E3M10000041G10 | 961 | EFA100394 | 4876 | EFA1c0034_orf_6p | 10675 |
| E3M10000041G12 | 962 | EFA100394 | 4876 | EFA1c0034_orf_6p | 10675 |
| E3M10000041H04 | 963 | EFA102351 | 4989 | EFA1c0032_orf_20p | 10634 |
| E3M10000041H05 | 964 | EFA100329 | 4875 | EFA1c0041_orf_35p | 10782 |
| E3M10000041H06 | 965 | EFA102502 | 4995 | EFA1c0031_orf_36p | 10627 |
| E3M10000041H07 | 966 | EFA103062 | 5019 | EFA1c0030_orf_19p | 10615 |
| E3M10000041H08 | 967 | EFA101686 | 4953 | EFA1c0045_orf_63p | 10940 |
| E3M10000041H09 | 968 | EFA102788 | 5011 | EFA1c0033_orf_41p | 10661 |
| E3M10000041H10 | 969 | EFA101685 | 4952 | EFA1c0041_orf_55p | 10791 |
| E3M10000041H11 | 970 | EFA102253 | 4984 | EFA1c0038_orf_85p | 10727 |
| E3M10000042A03 | 971 | EFA101120 | 4911 | EFA1c0036_orf_113p | 10687 |
| E3M10000042A03 | 971 | EFA101121 | 4912 | EFA1c0036_orf_112p | 10686 |
| E3M10000042A08 | 972 | EFA102351 | 4989 | EFA1c0032_orf_20p | 10634 |
| E3M10000042A10 | 973 | EFA101121 | 4912 | EFA1c0036_orf_112p | 10686 |
| E3M10000042B01 | 974 | EFA101404 | 4933 | EFA1c0033_orf_55p | 10663 |
| E3M10000042B02 | 975 | EFA100668 | 4885 | EFA1c0035_orf_58p | 10679 |
| E3M10000042B04 | 976 | EFA102186 | 4981 | EFA1c0045_orf_94p | 10949 |
| E3M10000042B04 | 976 | EFA102453 | 4993 | EFA1c0045_orf_203p | 10931 |
| E3M10000042B08 | 977 | EFA101417 | 4942 | EFA1c0022_orf_18p | 10531 |
| E3M10000042B09 | 978 | EFA101797 | 4963 | EFA1c0045_orf_167p | 10924 |
| E3M10000042B10 | 979 | EFA101121 | 4912 | EFA1c0036_orf_112p | 10686 |
| E3M10000042B11 | 980 | EFA101165 | 4922 | EFA1c0022_orf_8p | 10559 |
| E3M10000042C02 | 981 | EFA101150 | 4915 | EFA1c0038_orf_57p | 10719 |
| E3M10000042C03 | 982 | EFA102780 | 5010 | EFA1c0045_orf_101p | 10908 |
| E3M10000042C04 | 983 | EFA102656 | 5004 | EFA1c0039_orf_26p | 10734 |
| E3M10000042C10 | 984 | EFA100151 | 4864 | EFA1c0021_orf_14p | 10516 |
| E3M10000042C10 | 984 | EFA100295 | 4873 | EFA1c0021_orf_15p | 10517 |
| E3M10000042D01 | 985 | EFA100615 | 4881 | EFA1c0016_orf_29p | 10501 |
| E3M10000042D02 | 986 | EFA102501 | 4994 | EFA1c0031_orf_35p | 10626 |
| E3M10000042D03 | 987 | EFA100394 | 4876 | EFA1c0034_orf_6p | 10675 |
| E3M10000042D06 | 988 | EFA102091 | 4977 | EFA1c0010_orf_3p | 10481 |
| E3M10000042D09 | 989 | EFA101141 | 4914 | EFA1c0030_orf_18p | 10614 |
| E3M10000042D11 | 990 | EFA101412 | 4937 | EFA1c0022_orf_14p | 10527 |
| E3M10000042D12 | 991 | EFA100795 | 4896 | EFA1c0043_orf_229p | 10863 |
| E3M10000042E05 | 992 | EFA102501 | 4994 | EFA1c0031_orf_35p | 10626 |
| E3M10000042E12 | 993 | EFA102351 | 4989 | EFA1c0032_orf_20p | 10634 |
| E3M10000042F11 | 994 | EFA101792 | 4961 | EFA1c0042_orf_113p | 10805 |
| E3M10000042G01 | 995 | EFA101412 | 4937 | EFA1c0022_orf_14p | 10527 |
| E3M10000042G05 | 996 | EFA101685 | 4952 | EFA1c0041_orf_55p | 10791 |
| E3M10000042G07 | 997 | EFA101169 | 4923 | EFA1c0024_orf_38p | 10574 |
| E3M10000042G08 | 998 | EFA102780 | 5010 | EFA1c0045_orf_101p | 10908 |
| E3M10000042G11 | 999 | EFA101120 | 4911 | EFA1c0036_orf_113p | 10687 |
| E3M10000042G11 | 999 | EFA101121 | 4912 | EFA1c0036_orf_112p | 10686 |
| E3M10000042G12 | 1000 | EFA102501 | 4994 | EFA1c0031_orf_35p | 10626 |
| E3M10000042H06 | 1001 | EFA101799 | 4964 | EFA1c0045_orf_169p | 10926 |
| E3M10000042H08 | 1002 | EFA101120 | 4911 | EFA1c0036_orf_113p | 10687 |
| E3M10000042H11 | 1003 | EFA100668 | 4885 | EFA1c0035_orf_58p | 10679 |
| E3M10000043A02 | 1004 | EFA101799 | 4964 | EFA1c0045_orf_169p | 10926 |
| E3M10000043A03 | 1005 | EFA101414 | 4939 | EFA1c0022_orf_15p | 10528 |
| E3M10000043A05 | 1006 | EFA102502 | 4995 | EFA1c0031_orf_36p | 10627 |
| E3M10000043A08 | 1007 | EFA100689 | 4886 | EFA1c0038_orf_54p | 10717 |
| E3M10000043A09 | 1008 | EFA101414 | 4939 | EFA1c0022_orf_15p | 10528 |
| E3M10000043A09 | 1008 | EFA101415 | 4940 | EFA1c0022_orf_16p | 10529 |
| E3M10000043A10 | 1009 | EFA101080 | 4909 | #N/A | #N/A |
| E3M10000043A11 | 1010 | EFA102006 | 4973 | EFA1c0025_orf_17p | 10580 |
| E3M10000043B01 | 1011 | EFA100151 | 4864 | EFA1c0021_orf_14p | 10516 |
| E3M10000043B02 | 1012 | EFA101121 | 4912 | EFA1c0036_orf_112p | 10686 |
| E3M10000043B03 | 1013 | EFA103038 | 5017 | EFA1c0030_orf_17p | 10613 |
| E3M10000043B06 | 1014 | EFA101404 | 4933 | EFA1c0033_orf_55p | 10663 |
| E3M10000043B08 | 1015 | EFA101123 | 4913 | EFA1c0040_orf_22p | 10748 |
| E3M10000043B09 | 1016 | EFA101892 | 4969 | EFA1c0017_orf_21p | 10506 |
| E3M10000043B10 | 1017 | EFA102656 | 5004 | EFA1c0039_orf_26p | 10734 |
| E3M10000043B11 | 1018 | EFA100704 | 4887 | EFA1c0010_orf_4p | 10482 |
| E3M10000043B12 | 1019 | EFA100151 | 4864 | EFA1c0021_orf_14p | 10516 |
| E3M10000043C01 | 1020 | EFA102656 | 5004 | EFA1c0039_orf_26p | 10734 |
| E3M10000043C08 | 1021 | EFA101412 | 4937 | EFA1c0022_orf_14p | 10527 |
| E3M10000043C09 | 1022 | EFA100151 | 4864 | EFA1c0021_orf_14p | 10516 |
| E3M10000043D01 | 1023 | EFA101417 | 4942 | EFA1c0022_orf_18p | 10531 |
| E3M10000043D02 | 1024 | EFA102502 | 4995 | EFA1c0031_orf_36p | 10627 |
| E3M10000043D09 | 1025 | EFA102351 | 4989 | EFA1c0032_orf_20p | 10634 |
| E3M10000043D10 | 1026 | EFA101872 | 4967 | EFA1c0042_orf_152p | 10815 |
| E3M10000043D10 | 1026 | EFA101873 | 4968 | EFA1c0042_orf_153p | 10816 |
| E3M10000043D12 | 1027 | EFA102502 | 4995 | EFA1c0031_orf_36p | 10627 |
| E3M10000043E03 | 1028 | EFA100397 | 4877 | EFA1c0041_orf_148p | 10773 |
| E3M10000043E07 | 1029 | EFA101339 | 4928 | EFA1c0040_orf_13p | 10743 |
| E3M10000043E08 | 1030 | EFA101872 | 4967 | EFA1c0042_orf_152p | 10815 |
| E3M10000043E08 | 1030 | EFA101873 | 4968 | EFA1c0042_orf_153p | 10816 |
| E3M10000043E10 | 1031 | EFA102656 | 5004 | EFA1c0039_orf_26p | 10734 |
| E3M10000043E11 | 1032 | EFA102813 | 5013 | EFA1c0043_orf_9p | 10878 |
| E3M10000043F03 | 1033 | EFA102655 | 5003 | EFA1c0039_orf_25p | 10733 |
| E3M10000043F04 | 1034 | EFA102006 | 4973 | EFA1c0025_orf_17p | 10580 |
| E3M10000043F06 | 1035 | EFA100615 | 4881 | EFA1c0016_orf_29p | 10501 |
| E3M10000043F08 | 1036 | EFA101121 | 4912 | EFA1c0036_orf_112p | 10686 |
| E3M10000043F10 | 1037 | EFA101159 | 4916 | EFA1c0022_orf_2p | 10543 |
| E3M10000043F12 | 1038 | EFA101080 | 4909 | #N/A | #N/A |
| E3M10000043G03 | 1039 | EFA102502 | 4995 | EFA1c0031_orf_36p | 10627 |
| E3M10000043G04 | 1040 | EFA102502 | 4995 | EFA1c0031_orf_36p | 10627 |
| E3M10000043G05 | 1041 | EFA101686 | 4953 | EFA1c0045_orf_63p | 10940 |
| E3M10000043G07 | 1042 | EFA100157 | 4865 | EFA1c0034_orf_63p | 10673 |
| E3M10000043G08 | 1043 | EFA101080 | 4909 | #N/A | #N/A |
| E3M10000043G10 | 1044 | EFA101792 | 4961 | EFA1c0042_orf_113p | 10805 |
| E3M10000043G11 | 1045 | EFA101080 | 4909 | #N/A | #N/A |
| E3M10000043G12 | 1046 | EFA101121 | 4912 | EFA1c0036_orf_112p | 10686 |
| E3M10000043H02 | 1047 | EFA101414 | 4939 | EFA1c0022_orf_15p | 10528 |
| E3M10000043H05 | 1048 | EFA101080 | 4909 | #N/A | #N/A |
| E3M10000043H08 | 1049 | EFA100615 | 4881 | EFA1c0016_orf_29p | 10501 |
| E3M10000043H09 | 1050 | EFA102006 | 4973 | EFA1c0025_orf_17p | 10580 |
| E3M10000043H11 | 1051 | EFA102655 | 5003 | EFA1c0039_orf_25p | 10733 |
| E3M10000044C02 | 1052 | EFA100955 | 4902 | EFA1c0022_orf_28p | 10542 |
| E3M10000044E01 | 1053 | EFA102091 | 4977 | EFA1c0010_orf_3p | 10481 |
| K1M10000002F02 | 1054 | KPN101750 | 5037 | KPN1c1723_orf_1p | 11652 |
| K1M10000003C01 | 1055 | KPN103882 | 5040 | KPN1c2848_orf_1p | 11716 |
| K1M10000007F01 | 1057 | KPN104183 | 5041 | KPN1c1646_orf_2p | 11650 |
| K1M10000007F01 | 1057 | KPN106659 | 5049 | KPN1c1646_orf_1p | 11649 |
| K1M10000008C02 | 1058 | KPN107626 | 5051 | #N/A | #N/A |
| K1M10000008C10 | 1059 | KPN101729 | 5036 | KPN1c1566_orf_1p | 11647 |
| K1M10000008G10 | 1060 | KPN106840 | 5050 | KPN1c2087_orf_1p | 11664 |
| K1M10000009D04 | 1061 | KPN107776 | 5052 | KPN1c4041_orf_1p | 11771 |
| K1M10000013E04 | 1062 | KPN105779 | 5047 | KPN1c4012_orf_1p | 11770 |
| K1M10000020B02 | 1065 | KPN101729 | 5036 | KPN1c1566_orf_1p | 11647 |
| K1M10000022C10 | 1067 | KPN100854 | 5033 | KPN1c0845_orf_1p | 11630 |
| K1M10000030C07 | 1070 | KPN104716 | 5045 | KPN1c3094_orf_5p | 11757 |
| K1M10000030E07 | 1071 | KPN104538 | 5044 | KPN1c2918_orf_2p | 11726 |
| K1M10000032E11 | 1073 | KPN101729 | 5036 | KPN1c1566_orf_1p | 11647 |
| K1M10000033B02 | 1074 | KPN101729 | 5036 | KPN1c1566_orf_1p | 11647 |
| K1M10000033E01 | 1075 | KPN100432 | 5032 | KPN1c0331_orf_1p | 11628 |
| K1M10000036G08 | 1076 | KPN106044 | 5048 | #N/A | #N/A |
| K1M10000037D10 | 1077 | KPN104281 | 5042 | KPN1c3000_orf_3p | 11742 |
| K1M10000038H09 | 1078 | KPN102057 | 5038 | KPN1c1958_orf_1p | 11661 |
| K1M10000039H03 | 1079 | KPN106840 | 5050 | KPN1c2087_orf_1p | 11664 |
| K1M10000043D05 | 1081 | KPN102638 | 5039 | KPN1c2127_orf_1p | 11667 |
| K1M10000043H10 | 1082 | KPN105722 | 5046 | #N/A | #N/A |
| K1M10000044D08 | 1084 | KPN104430 | 5043 | #N/A | #N/A |
| K1M10000044G05 | 1086 | KPN101026 | 5035 | KPN1c0875_orf_1p | 11631 |
| K1M10000045A07 | 1087 | KPN101022 | 5034 | KPN1c1316_orf_3p | 11642 |
| K1M10000045D10 | 1088 | KPN102638 | 5039 | KPN1c2127_orf_1p | 11667 |
| P1M10000008C06 | 1092 | PA2424 | 5107 | #N/A | #N/A |
| P1M10000008G04 | 1093 | PA0337 | 5060 | #N/A | #N/A |
| P1M10000010C03 | 1094 | PA4997 | 5202 | #N/A | #N/A |
| P1M10000014H10 | 1095 | PA4252 | 5168 | #N/A | #N/A |
| P1M10000014H10 | 1095 | PA4253 | 5169 | #N/A | #N/A |
| P1M10000015C06 | 1096 | PA0413 | 5064 | #N/A | #N/A |
| P1M10000015C06 | 1096 | PA0414 | 5065 | #N/A | #N/A |
| P1M10000015C09 | 1097 | PA3041 | 5124 | #N/A | #N/A |
| P1M10000016C04 | 1098 | PA2680 | 5117 | #N/A | #N/A |
| P1M10000018B01 | 1099 | PA4264 | 5177 | #N/A | #N/A |
| P1M10000018C01 | 1100 | PA4264 | 5177 | #N/A | #N/A |
| P1M10000018E01 | 1101 | PA4067 | 5151 | #N/A | #N/A |
| P1M10000018G01 | 1102 | PA4067 | 5151 | #N/A | #N/A |
| P1M10000019F01 | 1103 | PA4271 | 5180 | #N/A | #N/A |
| P1M10000019F01 | 1103 | PA4272 | 5181 | #N/A | #N/A |
| P1M10000021G03 | 1104 | PA4264 | 5177 | #N/A | #N/A |
| P1M10000021G05 | 1105 | PA4251 | 5167 | #N/A | #N/A |
| P1M10000022D09 | 1106 | PA5299 | 5211 | #N/A | #N/A |
| P1M10000024D06 | 1107 | PA3160 | 5130 | #N/A | #N/A |
| P1M10000024E06 | 1108 | PA4888 | 5200 | #N/A | #N/A |
| P1M10000024H03 | 1109 | PA2313 | 5105 | #N/A | #N/A |
| P1M10000025A06 | 1110 | PA2222 | 5104 | #N/A | #N/A |
| P1M10000025G07 | 1111 | PA3153 | 5128 | #N/A | #N/A |
| P1M10000025H07 | 1112 | PA3153 | 5128 | #N/A | #N/A |
| P1M10000025H07 | 1112 | PA3154 | 5129 | #N/A | #N/A |
| P1M10000026E06 | 1113 | PA0715 | 5074 | #N/A | #N/A |
| P1M10000026F04 | 1114 | PA2222 | 5104 | #N/A | #N/A |
| P1M10000026G09 | 1115 | PA3011 | 5122 | #N/A | #N/A |
| P1M10000026H02 | 1116 | PA3013 | 5123 | #N/A | #N/A |
| P1M10000026H05 | 1117 | PA3154 | 5129 | #N/A | #N/A |
| P1M10000027A06 | 1118 | PA4257 | 5172 | #N/A | #N/A |
| P1M10000027B02 | 1119 | PA3154 | 5129 | #N/A | #N/A |
| P1M10000027G05 | 1120 | PA2313 | 5105 | #N/A | #N/A |
| P1M10000028A08 | 1121 | PA0788 | 5075 | #N/A | #N/A |
| P1M10000028B01 | 1122 | PA4263 | 5176 | #N/A | #N/A |
| P1M10000028E02 | 1123 | PA2584 | 5112 | #N/A | #N/A |
| P1M10000029A09 | 1124 | PA3154 | 5129 | #N/A | #N/A |
| P1M10000029G03 | 1125 | PA1301 | 5083 | #N/A | #N/A |
| P1M10000029H05 | 1126 | PA0353 | 5061 | #N/A | #N/A |
| P1M10000032F04 | 1127 | PA0265 | 5058 | #N/A | #N/A |
| P1M10000033A02 | 1128 | PA3068 | 5126 | #N/A | #N/A |
| P1M10000033B08 | 1129 | PA4244 | 5160 | #N/A | #N/A |
| P1M10000033E03 | 1130 | PA3984 | 5147 | #N/A | #N/A |
| P1M10000033F01 | 1131 | PA1986 | 5095 | #N/A | #N/A |
| P1M10000033G08 | 1132 | PA2009 | 5096 | #N/A | #N/A |
| P1M10000035A06 | 1133 | PA4249 | 5165 | #N/A | #N/A |
| P1M10000037B12 | 1134 | PA4254 | 5170 | #N/A | #N/A |
| P1M10000037G12 | 1135 | PA5076 | 5204 | #N/A | #N/A |
| P1M10000038B08 | 1136 | PA4070 | 5152 | #N/A | #N/A |
| P1M10000038C03 | 1137 | PA3931 | 5146 | #N/A | #N/A |
| P1M10000038C06 | 1138 | PA2197 | 5103 | #N/A | #N/A |
| P1M10000038F04 | 1139 | PA5207 | 5208 | #N/A | #N/A |
| P1M10000038G02 | 1140 | PA4542 | 5192 | #N/A | #N/A |
| P1M10000039G05 | 1141 | PA3764 | 5141 | #N/A | #N/A |
| P1M10000039G12 | 1142 | PA5567 | 5220 | #N/A | #N/A |
| P1M10000040C01 | 1143 | PA4105 | 5154 | #N/A | #N/A |
| P1M10000040C04 | 1144 | PA1115 | 5081 | #N/A | #N/A |
| P1M10000040D04 | 1145 | PA0378 | 5062 | #N/A | #N/A |
| P1M10000040D05 | 1146 | PA5209 | 5209 | #N/A | #N/A |
| P1M10000040E10 | 1147 | PA2128 | 5100 | #N/A | #N/A |
| P1M10000040H03 | 1148 | PA1115 | 5081 | #N/A | #N/A |
| P1M10000041A12 | 1149 | PA4254 | 5170 | #N/A | #N/A |
| P1M10000041B02 | 1150 | PA2128 | 5100 | #N/A | #N/A |
| P1M10000041E01 | 1151 | PA2398 | 5106 | #N/A | #N/A |
| P1M10000041F01 | 1152 | PA4681 | 5196 | #N/A | #N/A |
| P1M10000042B12 | 1153 | PA0642 | 5072 | #N/A | #N/A |
| P1M10000042E08 | 1154 | PA4252 | 5168 | #N/A | #N/A |
| P1M10000042E08 | 1154 | PA4253 | 5169 | #N/A | #N/A |
| P1M10000043A03 | 1155 | PA3006 | 5121 | #N/A | #N/A |
| P1M10000043D06 | 1156 | PA3764 | 5141 | #N/A | #N/A |
| P1M10000044F07 | 1157 | PA4244 | 5160 | #N/A | #N/A |
| P1M10000046B03 | 1158 | PA1462 | 5087 | #N/A | #N/A |
| P1M10000046C07 | 1159 | PA2671 | 5116 | #N/A | #N/A |
| P1M10000046C08 | 1160 | PA0472 | 5069 | #N/A | #N/A |
| P1M10000046C09 | 1161 | PA3764 | 5141 | #N/A | #N/A |
| P1M10000046G11 | 1162 | PA1115 | 5081 | #N/A | #N/A |
| P1M10000047B04 | 1163 | PA3006 | 5121 | #N/A | #N/A |
| P1M10000047E11 | 1164 | PA2684 | 5118 | #N/A | #N/A |
| P1M10000047F07 | 1165 | PA4506 | 5190 | #N/A | #N/A |
| P1M10000047G10 | 1166 | PA4259 | 5174 | #N/A | #N/A |
| P1M10000048A03 | 1167 | PA4105 | 5154 | #N/A | #N/A |
| P1M10000049E08 | 1168 | PA4272 | 5181 | #N/A | #N/A |
| P1M10000049G10 | 1169 | PA4027 | 5149 | #N/A | #N/A |
| P1M10000050G11 | 1170 | PA4249 | 5165 | #N/A | #N/A |
| P1M10000051D11 | 1171 | PA1365 | 5085 | #N/A | #N/A |
| P1M10000051F01 | 1172 | PA1115 | 5081 | #N/A | #N/A |
| P1M10000052C03 | 1173 | PA0938 | 5078 | #N/A | #N/A |
| P1M10000052C12 | 1174 | PA5076 | 5204 | #N/A | #N/A |
| P1M10000052E04 | 1175 | PA1398 | 5086 | #N/A | #N/A |
| P1M10000053B12 | 1176 | PA5436 | 5215 | #N/A | #N/A |
| P1M10000053C02 | 1177 | PA0353 | 5061 | #N/A | #N/A |
| P1M10000053E07 | 1178 | PA4254 | 5170 | #N/A | #N/A |
| P1M10000053F08 | 1179 | PA1270 | 5082 | #N/A | #N/A |
| P1M10000055A11 | 1180 | PA5076 | 5204 | #N/A | #N/A |
| P1M10000055C08 | 1181 | PA1493 | 5088 | #N/A | #N/A |
| P1M10000055E05 | 1182 | PA5507 | 5219 | #N/A | #N/A |
| P1M10000056C07 | 1183 | PA1360 | 5084 | #N/A | #N/A |
| P1M10000056F05 | 1184 | PA4258 | 5173 | #N/A | #N/A |
| P1M10000056F05 | 1184 | PA4259 | 5174 | #N/A | #N/A |
| P1M10000056F06 | 1185 | PA2634 | 5114 | #N/A | #N/A |
| P1M10000056G01 | 1186 | PA5076 | 5204 | #N/A | #N/A |
| P1M10000058B07 | 1187 | PA5436 | 5215 | #N/A | #N/A |
| P1M10000059B04 | 1188 | PA4375 | 5186 | #N/A | #N/A |
| P1M10000059B10 | 1189 | PA4269 | 5179 | #N/A | #N/A |
| P1M10000059B11 | 1190 | PA0934 | 5077 | #N/A | #N/A |
| P1M10000059D11 | 1191 | PA4027 | 5149 | #N/A | #N/A |
| P1M10000059H08 | 1192 | PA4027 | 5149 | #N/A | #N/A |
| P1M10000059H09 | 1193 | PA4271 | 5180 | #N/A | #N/A |
| P1M10000060E03 | 1194 | PA0423 | 5067 | #N/A | #N/A |
| P1M10000060H02 | 1195 | PA0221 | 5057 | #N/A | #N/A |
| P1M10000060H04 | 1196 | PA4473 | 5189 | #N/A | #N/A |
| P1M10000061B04 | 1197 | PA2726 | 5119 | #N/A | #N/A |
| P1M10000061E04 | 1198 | PA4244 | 5160 | #N/A | #N/A |
| P1M10000061F04 | 1199 | PA3522 | 5136 | #N/A | #N/A |
| P1M10000062A12 | 1200 | PA4598 | 5194 | #N/A | #N/A |
| P1M10000062C03 | 1201 | PA0321 | 5059 | #N/A | #N/A |
| P1M10000062C04 | 1202 | PA4254 | 5170 | #N/A | #N/A |
| P1M10000062C07 | 1203 | PA4251 | 5167 | #N/A | #N/A |
| P1M10000062C12 | 1204 | PA5316 | 5212 | #N/A | #N/A |
| P1M10000062D07 | 1205 | PA4247 | 5163 | #N/A | #N/A |
| P1M10000062D08 | 1206 | PA0882 | 5076 | #N/A | #N/A |
| P1M10000062E08 | 1207 | PA4248 | 5164 | #N/A | #N/A |
| P1M10000062E08 | 1207 | PA4249 | 5165 | #N/A | #N/A |
| P1M10000062F06 | 1208 | PA0028 | 5053 | #N/A | #N/A |
| P1M10000062G11 | 1209 | PA4506 | 5190 | #N/A | #N/A |
| P1M10000062H01 | 1210 | PA3121 | 5127 | #N/A | #N/A |
| P1M10000062H04 | 1211 | PA4254 | 5170 | #N/A | #N/A |
| P1M10000063F02 | 1212 | PA2684 | 5118 | #N/A | #N/A |
| P1M10000063G02 | 1213 | PA4262 | 5175 | #N/A | #N/A |
| P1M10000063H02 | 1214 | PA4081 | 5153 | #N/A | #N/A |
| P1M10000064A10 | 1215 | PA4268 | 5178 | #N/A | #N/A |
| P1M10000064C02 | 1216 | PA0650 | 5073 | #N/A | #N/A |
| P1M10000064C03 | 1217 | PA5030 | 5203 | #N/A | #N/A |
| P1M10000064D03 | 1218 | PA0129 | 5055 | #N/A | #N/A |
| P1M10000064E05 | 1219 | PA4512 | 5191 | #N/A | #N/A |
| P1M10000064G12 | 1220 | PA2147 | 5101 | #N/A | #N/A |
| P1M10000064H07 | 1221 | PA1072 | 5080 | #N/A | #N/A |
| P1M10000065A04 | 1222 | PA3522 | 5136 | #N/A | #N/A |
| P1M10000065B07 | 1223 | PA4347 | 5184 | #N/A | #N/A |
| P1M10000065C03 | 1224 | PA4347 | 5184 | #N/A | #N/A |
| P1M10000065C05 | 1225 | PA0642 | 5072 | #N/A | #N/A |
| P1M10000065D06 | 1226 | PA4347 | 5184 | #N/A | #N/A |
| P1M10000065F01 | 1227 | PA2494 | 5111 | #N/A | #N/A |
| P1M10000065G06 | 1228 | PA0423 | 5067 | #N/A | #N/A |
| P1M10000065H07 | 1229 | PA1019 | 5079 | #N/A | #N/A |
| P1M10000066A10 | 1230 | PA4709 | 5197 | #N/A | #N/A |
| P1M10000066A11 | 1231 | PA2594 | 5113 | #N/A | #N/A |
| P1M10000066F04 | 1232 | PA4024 | 5148 | #N/A | #N/A |
| P1M10000067A05 | 1233 | PA3876 | 5144 | #N/A | #N/A |
| P1M10000067A05 | 1233 | PA3877 | 5145 | #N/A | #N/A |
| P1M10000067A06 | 1234 | PA0419 | 5066 | #N/A | #N/A |
| P1M10000067A08 | 1235 | PA0600 | 5071 | #N/A | #N/A |
| P1M10000067C04 | 1236 | PA3845 | 5142 | #N/A | #N/A |
| P1M10000067C06 | 1237 | PA4433 | 5188 | #N/A | #N/A |
| P1M10000067D05 | 1238 | PA3479 | 5134 | #N/A | #N/A |
| P1M10000067F05 | 1239 | PA3643 | 5137 | #N/A | #N/A |
| P1M10000067G05 | 1240 | PA5199 | 5207 | #N/A | #N/A |
| P1M10000068A09 | 1241 | PA0353 | 5061 | #N/A | #N/A |
| P1M10000068D04 | 1242 | PA5388 | 5213 | #N/A | #N/A |
| P1M10000068F04 | 1243 | PA4237 | 5158 | #N/A | #N/A |
| P1M10000068F08 | 1244 | PA5193 | 5206 | #N/A | #N/A |
| P1M10000068G01 | 1245 | PA3716 | 5140 | #N/A | #N/A |
| P1M10000068H05 | 1246 | PA4268 | 5178 | #N/A | #N/A |
| P1M10000069D09 | 1247 | PA4246 | 5162 | #N/A | #N/A |
| P1M10000069G06 | 1248 | PA4246 | 5162 | #N/A | #N/A |
| P1M10000069H02 | 1249 | PA4433 | 5188 | #N/A | #N/A |
| P1M10000070A05 | 1250 | PA2470 | 5109 | #N/A | #N/A |
| P1M10000070B10 | 1251 | PA5393 | 5214 | #N/A | #N/A |
| P1M10000070C06 | 1252 | PA4237 | 5158 | #N/A | #N/A |
| P1M10000070D08 | 1253 | PA4105 | 5154 | #N/A | #N/A |
| P1M10000070E03 | 1254 | PA4709 | 5197 | #N/A | #N/A |
| P1M10000070G06 | 1255 | PA3374 | 5133 | #N/A | #N/A |
| P1M10000070G12 | 1256 | PA3121 | 5127 | #N/A | #N/A |
| P1M10000070H06 | 1257 | PA3374 | 5133 | #N/A | #N/A |
| P1M10000071A03 | 1258 | PA4251 | 5167 | #N/A | #N/A |
| P1M10000071C01 | 1259 | PA4251 | 5167 | #N/A | #N/A |
| P1M10000071E04 | 1260 | PA3484 | 5135 | #N/A | #N/A |
| P1M10000071F01 | 1261 | PA0506 | 5070 | #N/A | #N/A |
| P1M10000073A06 | 1262 | PA4246 | 5162 | #N/A | #N/A |
| P1M10000073B10 | 1263 | PA5248 | 5210 | #N/A | #N/A |
| P1M10000073D04 | 1264 | PA1115 | 5081 | #N/A | #N/A |
| P1M10000073D09 | 1265 | PA1918 | 5094 | #N/A | #N/A |
| P1M10000073G03 | 1266 | PA5248 | 5210 | #N/A | #N/A |
| P1M10000074B01 | 1267 | PA4771 | 5199 | #N/A | #N/A |
| P1M10000074B04 | 1268 | PA1684 | 5091 | #N/A | #N/A |
| P1M10000074E04 | 1269 | PA0120 | 5054 | #N/A | #N/A |
| P1M10000074E09 | 1270 | PA3479 | 5134 | #N/A | #N/A |
| P1M10000074F10 | 1271 | PA1019 | 5079 | #N/A | #N/A |
| P1M10000074G12 | 1272 | PA4244 | 5160 | #N/A | #N/A |
| P1M10000074G12 | 1272 | PA4245 | 5161 | #N/A | #N/A |
| P1M10000075A04 | 1273 | PA3279 | 5131 | #N/A | #N/A |
| P1M10000075A04 | 1273 | PA3280 | 5132 | #N/A | #N/A |
| P1M10000075B03 | 1274 | PA4576 | 5193 | #N/A | #N/A |
| P1M10000075F02 | 1275 | PA4254 | 5170 | #N/A | #N/A |
| P1M10000075G05 | 1276 | PA3709 | 5139 | #N/A | #N/A |
| P1M10000076D05 | 1277 | PA1876 | 5093 | #N/A | #N/A |
| P1M10000076D10 | 1278 | PA1636 | 5090 | #N/A | #N/A |
| P1M10000077A08 | 1279 | PA3479 | 5134 | #N/A | #N/A |
| P1M10000077C08 | 1280 | PA1019 | 5079 | #N/A | #N/A |
| P1M10000077E04 | 1281 | PA3522 | 5136 | #N/A | #N/A |
| P1M10000077H05 | 1282 | PA4246 | 5162 | #N/A | #N/A |
| P1M10000079A10 | 1283 | PA4576 | 5193 | #N/A | #N/A |
| P1M10000079B10 | 1284 | PA4576 | 5193 | #N/A | #N/A |
| P1M10000079C10 | 1285 | PA4576 | 5193 | #N/A | #N/A |
| P1M10000079D01 | 1286 | PA1547 | 5089 | #N/A | #N/A |
| P1M10000079D10 | 1287 | PA5490 | 5217 | #N/A | #N/A |
| P1M10000079F06 | 1288 | PA3006 | 5121 | #N/A | #N/A |
| P1M10000080B01 | 1289 | PA3866 | 5143 | #N/A | #N/A |
| P1M10000080B06 | 1290 | PA4244 | 5160 | #N/A | #N/A |
| P1M10000080B06 | 1290 | PA4245 | 5161 | #N/A | #N/A |
| P1M10000080C01 | 1291 | PA0469 | 5068 | #N/A | #N/A |
| P1M10000080C06 | 1292 | PA4250 | 5166 | #N/A | #N/A |
| P1M10000080E04 | 1293 | PA4250 | 5166 | #N/A | #N/A |
| P1M10000081D12 | 1294 | PA3006 | 5121 | #N/A | #N/A |
| P1M10000081G05 | 1295 | PA4037 | 5150 | #N/A | #N/A |
| P1M10000081H05 | 1296 | PA4316 | 5182 | #N/A | #N/A |
| P1M10000082A05 | 1297 | PA0401 | 5063 | #N/A | #N/A |
| P1M10000082B04 | 1298 | PA3006 | 5121 | #N/A | #N/A |
| P1M10000082C05 | 1299 | PA4246 | 5162 | #N/A | #N/A |
| P1M10000082D05 | 1300 | PA4256 | 5171 | #N/A | #N/A |
| P1M10000082E05 | 1301 | PA4246 | 5162 | #N/A | #N/A |
| P1M10000083A11 | 1302 | PA3006 | 5121 | #N/A | #N/A |
| P1M10000083B01 | 1303 | PA4271 | 5180 | #N/A | #N/A |
| P1M10000083B12 | 1304 | PA4268 | 5178 | #N/A | #N/A |
| P1M10000083C11 | 1305 | PA4242 | 5159 | #N/A | #N/A |
| P1M10000083C12 | 1306 | PA3006 | 5121 | #N/A | #N/A |
| P1M10000084A04 | 1307 | PA4942 | 5201 | #N/A | #N/A |
| P1M10000084D03 | 1308 | PA3006 | 5121 | #N/A | #N/A |
| P1M10000084E04 | 1309 | PA5493 | 5218 | #N/A | #N/A |
| P1M10000084B11 | 1310 | PA2196 | 5102 | #N/A | #N/A |
| P1M10000084F08 | 1311 | PA4271 | 5180 | #N/A | #N/A |
| P1M10000085D06 | 1312 | PA3006 | 5121 | #N/A | #N/A |
| P1M10000086A02 | 1313 | PA4413 | 5187 | #N/A | #N/A |
| P1M10000086B01 | 1314 | PA4158 | 5157 | #N/A | #N/A |
| P1M10000086D02 | 1315 | PA2641 | 5115 | #N/A | #N/A |
| P1M10000086E05 | 1316 | PA3006 | 5121 | #N/A | #N/A |
| P1M10000087A11 | 1317 | PA4268 | 5178 | #N/A | #N/A |
| P1M10000087C09 | 1318 | PA2083 | 5097 | #N/A | #N/A |
| P1M10000087E04 | 1319 | PA4246 | 5162 | #N/A | #N/A |
| P1M10000087F04 | 1320 | PA0141 | 5056 | #N/A | #N/A |
| P1M10000087F09 | 1321 | PA4124 | 5155 | #N/A | #N/A |
| P1M10000087F09 | 1321 | PA4125 | 5156 | #N/A | #N/A |
| P1M10000088A07 | 1322 | PA2742 | 5120 | #N/A | #N/A |
| P1M10000088D06 | 1323 | PA2108 | 5099 | #N/A | #N/A |
| P1M10000089C08 | 1324 | PA3048 | 5125 | #N/A | #N/A |
| P1M10000089D11 | 1325 | PA4268 | 5178 | #N/A | #N/A |
| P1M10000089G08 | 1326 | PA2461 | 5108 | #N/A | #N/A |
| P1M10000090B11 | 1327 | PA3153 | 5128 | #N/A | #N/A |
| P1M10000090F06 | 1328 | PA2313 | 5105 | #N/A | #N/A |
| P1M10000090F08 | 1329 | PA4258 | 5173 | #N/A | #N/A |
| P1M10000090F08 | 1329 | PA4259 | 5174 | #N/A | #N/A |
| P1M10000091D02 | 1330 | PA3866 | 5143 | #N/A | #N/A |
| P1M10000091E09 | 1331 | PA5316 | 5212 | #N/A | #N/A |
| P1M10000091G10 | 1332 | PA2742 | 5120 | #N/A | #N/A |
| P1M10000092B02 | 1333 | PA2641 | 5115 | #N/A | #N/A |
| P1M10000092B10 | 1334 | PA4268 | 5178 | #N/A | #N/A |
| P1M10000092D09 | 1335 | PA2128 | 5100 | #N/A | #N/A |
| P1M10000092E02 | 1336 | PA4256 | 5171 | #N/A | #N/A |
| P1M10000092F05 | 1337 | PA0423 | 5067 | #N/A | #N/A |
| P1M10000093A03 | 1338 | PA5088 | 5205 | #N/A | #N/A |
| P1M10000093B09 | 1339 | PA3703 | 5138 | #N/A | #N/A |
| P1M10000093C08 | 1340 | PA1868 | 5092 | #N/A | #N/A |
| P1M10000093E09 | 1341 | PA4332 | 5183 | #N/A | #N/A |
| P1M10000093F03 | 1342 | PA2101 | 5098 | #N/A | #N/A |
| P1M10000093H07 | 1343 | PA4665 | 5195 | #N/A | #N/A |
| P1M10000094F04 | 1344 | PA4268 | 5178 | #N/A | #N/A |
| P1M10000094H03 | 1345 | PA4744 | 5198 | #N/A | #N/A |
| P1M10000095C01 | 1346 | PA2488 | 5110 | #N/A | #N/A |
| P1M10000095C09 | 1347 | PA5443 | 5216 | #N/A | #N/A |
| P1M10000095E04 | 1348 | PA4363 | 5185 | #N/A | #N/A |
| P1M10000095G04 | 1349 | PA4256 | 5171 | #N/A | #N/A |
| P1M10000096E04 | 1350 | PA0353 | 5061 | #N/A | #N/A |
| P1M10000096E12 | 1351 | PA4246 | 5162 | #N/A | #N/A |
| S1M10000001A05 | 1354 | SAU103232 | 5769 | SAU1c0045_orf_341p | 12697 |
| S1M10000001A05 | 1354 | SAU201508 | 5819 | SAU2c0432_orf_19p | 12947 |
| S1M10000001A08 | 1355 | SAU102437 | 5670 | SAU1c0045_orf_33p | 12695 |
| S1M10000001A09 | 1356 | SAU101907 | 5574 | SAU1c0040_orf_79p | 12442 |
| S1M10000001A10 | 1357 | SAU102602 | 5708 | SAU1c0032_orf_5p | 12249 |
| S1M10000001C06 | 1358 | SAU102939 | 5747 | #N/A | #N/A |
| S1M10000001D01 | 1359 | SAU101907 | 5574 | SAU1c0040_orf_79p | 12442 |
| S1M10000001D02 | 1360 | SAU100527 | 5285 | SAU1c0037_orf_101p | 12341 |
| S1M10000001D02 | 1360 | SAU100880 | 5346 | SAU1c0037_orf_100p | 12340 |
| S1M10000001D06 | 1361 | SAU101632 | 5499 | SAU1c0039_orf_3p | 12407 |
| S1M10000001D07 | 1362 | SAU101360 | 5431 | SAU1c0044_orf_109p | 12555 |
| S1M10000001E02 | 1363 | SAU102602 | 5708 | SAU1c0032_orf_5p | 12249 |
| S1M10000001E04 | 1364 | SAU102284 | 5635 | SAU1c0038_orf_5p | 12389 |
| S1M10000001E04 | 1364 | SAU201469 | 5816 | SAU2c0438_orf_6p | 12967 |
| S1M10000001E05 | 1365 | SAU102939 | 5747 | #N/A | #N/A |
| S1M10000001E09 | 1366 | SAU201752 | 5832 | SAU2c0436_orf_19p | 12963 |
| S1M10000001E10 | 1367 | SAU103038 | 5757 | #N/A | #N/A |
| S1M10000001E11 | 1368 | SAU302513 | 5906 | SAU3c1298_orf_1p | 13085 |
| S1M10000001F02 | 1369 | SAU101907 | 5574 | SAU1c0040_orf_79p | 12442 |
| S1M10000001F04 | 1370 | SAU100300 | 5253 | SAU1c0040_orf_90p | 12451 |
| S1M10000001F08 | 1371 | SAU102437 | 5670 | SAU1c0045_orf_33p | 12695 |
| S1M10000001F09 | 1372 | SAU101907 | 5574 | SAU1c0040_orf_79p | 12442 |
| S1M10000001F10 | 1373 | SAU102602 | 5708 | SAU1c0032_orf_5p | 12249 |
| S1M10000001F11 | 1374 | SAU102939 | 5747 | #N/A | #N/A |
| S1M10000001G01 | 1375 | SAU102939 | 5747 | #N/A | #N/A |
| S1M10000001G07 | 1376 | SAU102939 | 5747 | #N/A | #N/A |
| S1M10000001G08 | 1377 | SAU102939 | 5747 | #N/A | #N/A |
| S1M10000001G10 | 1378 | SAU100300 | 5253 | SAU1c0040_orf_90p | 12451 |
| S1M10000002A02 | 1379 | SAU102631 | 5721 | SAU1c0045_orf_94p | 12712 |
| S1M10000002A09 | 1380 | SAU101495 | 5467 | SAU1c0037_orf_65p | 12360 |
| S1M10000002A10 | 1381 | SAU201810 | 5836 | SAU2c0308_orf_2p | 12769 |
| S1M10000002A10 | 1381 | SAU202174 | 5845 | SAU2c0412_orf_3p | 12895 |
| S1M10000002A10 | 1381 | SAU301148 | 5888 | #N/A | #N/A |
| S1M10000002A12 | 1382 | SAU200916 | 5797 | SAU2c0373_orf_4p | 12838 |
| S1M10000002A12 | 1382 | SAU300455 | 5872 | #N/A | #N/A |
| S1M10000002A12 | 1382 | SAU301620 | 5899 | SAU3c1478_orf_2p | 13140 |
| S1M10000002B01 | 1383 | SAU102602 | 5708 | SAU1c0032_orf_5p | 12249 |
| S1M10000002B03 | 1384 | SAU101034 | 5371 | SAU1c0044_orf_27p | 12608 |
| S1M10000002B04 | 1385 | SAU101907 | 5574 | SAU1c0040_orf_79p | 12442 |
| S1M10000002B05 | 1386 | SAU101868 | 5565 | SAU1c0036_orf_23p | 12320 |
| S1M10000002B06 | 1387 | SAU100157 | 5237 | SAU1c0040_orf_81p | 12444 |
| S1M10000002B07 | 1388 | SAU101389 | 5441 | SAU1c0038_orf_54p | 12387 |
| S1M10000002B09 | 1389 | SAU201810 | 5836 | SAU2c0308_orf_2p | 12769 |
| S1M10000002B09 | 1389 | SAU202174 | 5845 | SAU2c0412_orf_3p | 12895 |
| S1M10000002B09 | 1389 | SAU301148 | 5888 | #N/A | #N/A |
| S1M10000002B11 | 1390 | SAU100521 | 5283 | SAU1c0044_orf_250p | 12600 |
| S1M10000002C02 | 1391 | SAU201810 | 5836 | SAU2c0308_orf_2p | 12769 |
| S1M10000002C02 | 1391 | SAU202174 | 5845 | SAU2c0412_orf_3p | 12895 |
| S1M10000002C02 | 1391 | SAU301148 | 5888 | #N/A | #N/A |
| S1M10000002C09 | 1392 | SAU101752 | 5522 | SAU1c0040_orf_85p | 12447 |
| S1M10000002C10 | 1393 | SAU103077 | 5759 | SAU1c0039_orf_44p | 12408 |
| S1M10000002C11 | 1394 | SAU202267 | 5848 | SAU2c0204_orf_2p | 12727 |
| S1M10000002C11 | 1394 | SAU202781 | 5853 | SAU2c0109_orf_2p | 12718 |
| S1M10000002C11 | 1394 | SAU203001 | 5859 | SAU2c0412_orf_15p | 12894 |
| S1M10000002C11 | 1394 | SAU302698 | 5909 | SAU3c1408_orf_2p | 13114 |
| S1M10000002C11 | 1394 | SAU302699 | 5910 | SAU3c1408_orf_3p | 13115 |
| S1M10000002C12 | 1395 | SAU101039 | 5373 | SAU1c0043_orf_181p | 12522 |
| S1M10000002D01 | 1396 | SAU101907 | 5574 | SAU1c0040_orf_79p | 12442 |
| S1M10000002D02 | 1397 | SAU100741 | 5318 | SAU1c0039_orf_48p | 12409 |
| S1M10000002D03 | 1398 | SAU102631 | 5721 | SAU1c0045_orf_94p | 12712 |
| S1M10000002D05 | 1399 | SAU202930 | 5856 | SAU2c0396_orf_3p | 12871 |
| S1M10000002D07 | 1400 | SAU101652 | 5503 | SAU1c0042_orf_123p | 12492 |
| S1M10000002D07 | 1400 | SAU101653 | 5504 | SAU1c0042_orf_124p | 12493 |
| S1M10000002D08 | 1401 | SAU101652 | 5503 | SAU1c0042_orf_123p | 12492 |
| S1M10000002D10 | 1402 | SAU102939 | 5747 | #N/A | #N/A |
| S1M10000002D12 | 1403 | SAU100952 | 5358 | SAU1c0043_orf_182p | 12523 |
| S1M10000002E01 | 1404 | SAU101616 | 5495 | SAU1c0040_orf_32p | 12432 |
| S1M10000002E02 | 1405 | SAU200914 | 5796 | SAU2c0373_orf_2p | 12837 |
| S1M10000002E07 | 1406 | SAU201810 | 5836 | SAU2c0308_orf_2p | 12769 |
| S1M10000002E07 | 1406 | SAU202174 | 5845 | SAU2c0412_orf_3p | 12895 |
| S1M10000002E07 | 1406 | SAU301148 | 5888 | #N/A | #N/A |
| S1M10000002E09 | 1407 | SAU100158 | 5238 | SAU1c0040_orf_80p | 12443 |
| S1M10000002E11 | 1408 | SAU102631 | 5721 | SAU1c0045_orf_94p | 12712 |
| S1M10000002E12 | 1409 | SAU101869 | 5566 | SAU1c0036_orf_24p | 12321 |
| S1M10000002F01 | 1410 | SAU200928 | 5798 | SAU2c0365_orf_5p | 12815 |
| S1M10000002F02 | 1411 | SAU301620 | 5899 | SAU3c1478_orf_2p | 13140 |
| S1M10000002F04 | 1412 | SAU102939 | 5747 | #N/A | #N/A |
| S1M10000002F09 | 1413 | SAU302513 | 5906 | SAU3c1298_orf_1p | 13085 |
| S1M10000002F12 | 1414 | SAU101907 | 5574 | SAU1c0040_orf_79p | 12442 |
| S1M10000002G01 | 1415 | SAU102939 | 5747 | #N/A | #N/A |
| S1M10000002G03 | 1416 | SAU100608 | 5297 | SAU1c0034_orf_69p | 12293 |
| S1M10000002G05 | 1417 | SAU101907 | 5574 | SAU1c0040_orf_79p | 12442 |
| S1M10000002G06 | 1418 | SAU101907 | 5574 | SAU1c0040_orf_79p | 12442 |
| S1M10000002G07 | 1419 | SAU103038 | 5757 | #N/A | #N/A |
| S1M10000002G08 | 1420 | SAU100158 | 5238 | SAU1c0040_orf_80p | 12443 |
| S1M10000002G09 | 1421 | SAU102939 | 5747 | #N/A | #N/A |
| S1M10000002G10 | 1422 | SAU101495 | 5467 | SAU1c0037_orf_65p | 12360 |
| S1M10000002G11 | 1423 | SAU102939 | 5747 | #N/A | #N/A |
| S1M10000002G12 | 1424 | SAU101907 | 5574 | SAU1c0040_orf_79p | 12442 |
| S1M10000003A01 | 1425 | SAU201810 | 5836 | SAU2c0308_orf_2p | 12769 |
| S1M10000003A01 | 1425 | SAU202174 | 5845 | SAU2c0412_orf_3p | 12895 |
| S1M10000003A01 | 1425 | SAU301148 | 5888 | #N/A | #N/A |
| S1M10000003A02 | 1426 | SAU101624 | 5497 | SAU1c0040_orf_25p | 12429 |
| S1M10000003A03 | 1427 | SAU101752 | 5522 | SAU1c0040_orf_85p | 12447 |
| S1M10000003A04 | 1428 | SAU101360 | 5431 | SAU1c0044_orf_109p | 12555 |
| S1M10000003A06 | 1429 | SAU101266 | 5408 | SAU1c0042_orf_117p | 12490 |
| S1M10000003A07 | 1430 | SAU101907 | 5574 | SAU1c0040_orf_79p | 12442 |
| S1M10000003A08 | 1431 | SAU102939 | 5747 | #N/A | #N/A |
| S1M10000003A10 | 1432 | SAU100432 | 5271 | SAU1c0040_orf_88p | 12450 |
| S1M10000003A11 | 1433 | SAU101495 | 5467 | SAU1c0037_orf_65p | 12360 |
| S1M10000003B06 | 1434 | SAU102007 | 5590 | SAU1c0040_orf_108p | 12428 |
| S1M10000003B08 | 1435 | SAU100952 | 5358 | SAU1c0043_orf_182p | 12523 |
| S1M10000003B09 | 1436 | SAU100771 | 5325 | SAU1c0043_orf_49p | 12545 |
| S1M10000003B12 | 1437 | SAU302060 | 5905 | SAU3c0879_orf_1p | 13042 |
| S1M10000003C06 | 1438 | SAU102447 | 5672 | SAU1c0045_orf_24p | 12685 |
| S1M10000003C07 | 1439 | SAU101271 | 5411 | SAU1c0037_orf_90p | 12366 |
| S1M10000003C10 | 1440 | SAU101907 | 5574 | SAU1c0040_orf_79p | 12442 |
| S1M10000003C12 | 1441 | SAU101907 | 5574 | SAU1c0040_orf_79p | 12442 |
| S1M10000003D05 | 1442 | SAU102939 | 5747 | #N/A | #N/A |
| S1M10000003D06 | 1443 | SAU101996 | 5584 | SAU1c0040_orf_99p | 12456 |
| S1M10000003D08 | 1444 | SAU100793 | 5329 | SAU1c0028_orf_52p | 12188 |
| S1M10000003D10 | 1445 | SAU102422 | 5666 | SAU1c0030_orf_22p | 12207 |
| S1M10000003E07 | 1446 | SAU100964 | 5363 | SAU1c0044_orf_86p | 12641 |
| S1M10000003E09 | 1447 | SAU101907 | 5574 | SAU1c0040_orf_79p | 12442 |
| S1M10000003E10 | 1448 | SAU101674 | 5508 | SAU1c0044_orf_226p | 12594 |
| S1M10000003E11 | 1449 | SAU101907 | 5574 | SAU1c0040_orf_79p | 12442 |
| S1M10000003F02 | 1450 | SAU101907 | 5574 | SAU1c0040_orf_79p | 12442 |
| S1M10000003F05 | 1451 | SAU101092 | 5381 | SAU1c0028_orf_9p | 12192 |
| S1M10000003F06 | 1452 | SAU100158 | 5238 | SAU1c0040_orf_80p | 12443 |
| S1M10000003F07 | 1453 | SAU200914 | 5796 | SAU2c0373_orf_2p | 12837 |
| S1M10000003F08 | 1454 | SAU102939 | 5747 | #N/A | #N/A |
| S1M10000003F12 | 1455 | SAU101360 | 5431 | SAU1c0044_orf_109p | 12555 |
| S1M10000003G03 | 1456 | SAU101907 | 5574 | SAU1c0040_orf_79p | 12442 |
| S1M10000003G04 | 1457 | SAU201810 | 5836 | SAU2c0308_orf_2p | 12769 |
| S1M10000003G04 | 1457 | SAU202174 | 5845 | SAU2c0412_orf_3p | 12895 |
| S1M10000003G04 | 1457 | SAU301148 | 5888 | #N/A | #N/A |
| S1M10000003G08 | 1458 | SAU102939 | 5747 | #N/A | #N/A |
| S1M10000003G10 | 1459 | SAU102939 | 5747 | #N/A | #N/A |
| S1M10000004A04 | 1460 | SAU102631 | 5721 | SAU1c0045_orf_94p | 12712 |
| S1M10000004A06 | 1461 | SAU100964 | 5363 | SAU1c0044_orf_86p | 12641 |
| S1M10000004A07 | 1462 | SAU200916 | 5797 | SAU2c0373_orf_4p | 12838 |
| S1M10000004A11 | 1463 | SAU100521 | 5283 | SAU1c0044_orf_250p | 12600 |
| S1M10000004A12 | 1464 | SAU102132 | 5605 | SAU1c0027_orf_19p | 12177 |
| S1M10000004B03 | 1465 | SAU102610 | 5714 | SAU1c0041_orf_53p | 12474 |
| S1M10000004B04 | 1466 | SAU102059 | 5597 | SAU1c0034_orf_51p | 1286 |
| S1M10000004B06 | 1467 | SAU102939 | 5747 | #N/A | #N/A |
| S1M10000004B08 | 1468 | SAU100272 | 5251 | SAU1c0018_orf_7p | 12141 |
| S1M10000004B09 | 1469 | SAU101476 | 5459 | SAU1c0032_orf_69p | 12254 |
| S1M10000004B11 | 1470 | SAU101495 | 5467 | SAU1c0037_orf_65p | 12360 |
| S1M10000004C01 | 1471 | SAU102631 | 5721 | SAU1c0045_orf_94p | 12712 |
| S1M10000004C02 | 1472 | SAU201810 | 5836 | SAU2c0308_orf_2p | 12769 |
| S1M10000004C02 | 1472 | SAU202174 | 5845 | SAU2c0412_orf_3p | 12895 |
| S1M10000004C02 | 1472 | SAU301148 | 5888 | #N/A | #N/A |
| S1M10000004C03 | 1473 | SAU102939 | 5747 | #N/A | #N/A |
| S1M10000004C06 | 1474 | SAU102883 | 5741 | SAU1c0045_orf_38p | 12702 |
| S1M10000004C07 | 1475 | SAU102939 | 5747 | #N/A | #N/A |
| S1M10000004C08 | 1476 | SAU101455 | 5456 | SAU1c0045_orf_250p | 12686 |
| S1M10000004C08 | 1476 | SAU200916 | 5797 | SAU2c0373_orf_4p | 12838 |
| S1M10000004C09 | 1477 | SAU201810 | 5836 | SAU2c0308_orf_2p | 12769 |
| S1M10000004C09 | 1477 | SAU202174 | 5845 | SAU2c0412_orf_3p | 12895 |
| S1M10000004C09 | 1477 | SAU301148 | 5888 | #N/A | #N/A |
| S1M10000004C10 | 1478 | SAU101271 | 5411 | SAU1c0037_orf_90p | 12366 |
| S1M10000004C10 | 1478 | SAU101286 | 5413 | SAU1c0034_orf_67p | 12292 |
| S1M10000004C10 | 1478 | SAU302931 | 5913 | SAU3c1507_orf_10p | 13155 |
| S1M10000004C12 | 1479 | SAU102007 | 5590 | SAU1c0040_orf_108p | 12428 |
| S1M10000004D01 | 1480 | SAU101301 | 5416 | SAU1c0044_orf_114p | 12558 |
| S1M10000004D01 | 1480 | SAU101302 | 5417 | SAU1c0044_orf_115p | 12559 |
| S1M10000004D03 | 1481 | SAU102390 | 5657 | SAU1c0033_orf_38p | 12269 |
| S1M10000004D03 | 1481 | SAU201333 | 5810 | SAU2c0418_orf_8p | 12905 |
| S1M10000004D04 | 1482 | SAU101807 | 5547 | SAU1c0032_orf_26p | 12231 |
| S1M10000004D04 | 1482 | SAU101808 | 5548 | SAU1c0032_orf_27p | 12232 |
| S1M10000004D06 | 1483 | SAU201571 | 5824 | SAU2c0447_orf_17p | 12997 |
| S1M10000004D07 | 1484 | SAU201810 | 5836 | SAU2c0308_orf_2p | 12769 |
| S1M10000004D07 | 1484 | SAU202174 | 5845 | SAU2c0412_orf_3p | 12895 |
| S1M10000004D07 | 1484 | SAU301148 | 5888 | #N/A | #N/A |
| S1M10000004D08 | 1485 | SAU100414 | 5270 | SAU1c0022_orf_24p | 12148 |
| S1M10000004D10 | 1486 | SAU101365 | 5432 | SAU1c0044_orf_112p | 12556 |
| S1M10000004D12 | 1487 | SAU101545 | 5474 | SAU1c0037_orf_132p | 12348 |
| S1M10000004D12 | 1487 | SAU101546 | 5475 | SAU1c0037_orf_133p | 12349 |
| S1M10000004E03 | 1488 | SAU101371 | 5435 | SAU1c0033_orf_7p | 12275 |
| S1M10000004E04 | 1489 | SAU102602 | 5708 | SAU1c0032_orf_5p | 12249 |
| S1M10000004E06 | 1490 | SAU101791 | 5532 | SAU1c0032_orf_12p | 12216 |
| S1M10000004E07 | 1491 | SAU101476 | 5459 | SAU1c0032_orf_69p | 12254 |
| S1M10000004E11 | 1492 | SAU102939 | 5747 | #N/A | #N/A |
| S1M10000004E12 | 1493 | SAU101996 | 5584 | SAU1c0040_orf_99p | 12456 |
| S1M10000004F01 | 1494 | SAU101039 | 5373 | SAU1c0043_orf_181p | 12522 |
| S1M10000004F02 | 1495 | SAU100157 | 5237 | SAU1c0040_orf_81p | 12444 |
| S1M10000004F06 | 1496 | SAU201611 | 5825 | SAU2c0440_orf_14p | 12973 |
| S1M10000004F07 | 1497 | SAU102764 | 5734 | SAU1c0044_orf_56p | 12625 |
| S1M10000004F08 | 1498 | SAU101807 | 5547 | SAU1c0032_orf_26p | 12231 |
| S1M10000004F08 | 1498 | SAU101808 | 5548 | SAU1c0032_orf_27p | 12232 |
| S1M10000004F09 | 1499 | SAU201810 | 5836 | SAU2c0308_orf_2p | 12769 |
| S1M10000004F09 | 1499 | SAU202174 | 5845 | SAU2c0412_orf_3p | 12895 |
| S1M10000004F09 | 1499 | SAU301148 | 5888 | #N/A | #N/A |
| S1M10000004F12 | 1500 | SAU101652 | 5503 | SAU1c0042_orf_123p | 12492 |
| S1M10000004G01 | 1501 | SAU201810 | 5836 | SAU2c0308_orf_2p | 12769 |
| S1M10000004G01 | 1501 | SAU202174 | 5845 | SAU2c0412_orf_3p | 12895 |
| S1M10000004G01 | 1501 | SAU301148 | 5888 | #N/A | #N/A |
| S1M10000004G02 | 1502 | SAU102939 | 5747 | #N/A | #N/A |
| S1M10000004G03 | 1503 | SAU102449 | 5674 | SAU1c0045_orf_22p | 12677 |
| S1M10000004G05 | 1504 | SAU101907 | 5574 | SAU1c0040_orf_79p | 12442 |
| S1M10000004G06 | 1505 | SAU102939 | 5747 | #N/A | #N/A |
| S1M10000004G07 | 1506 | SAU100964 | 5363 | SAU1c0044_orf_86p | 12641 |
| S1M10000004G07 | 1506 | SAU100965 | 5364 | SAU1c0044_orf_57p | 12642 |
| S1M10000004G09 | 1507 | SAU101869 | 5566 | SAU1c0036_orf_24p | 12321 |
| S1M10000004G12 | 1508 | SAU100497 | 5280 | SAU1c0018_orf_3p | 12140 |
| S1M10000005A01 | 1509 | SAU201810 | 5836 | SAU2c0308_orf_2p | 12769 |
| S1M10000005A01 | 1509 | SAU202174 | 5845 | SAU2c0412_orf_3p | 12895 |
| S1M10000005A01 | 1509 | SAU301148 | 5888 | #N/A | #N/A |
| S1M10000005A03 | 1510 | SAU101090 | 5380 | SAU1c0028_orf_8p | 12191 |
| S1M10000005A05 | 1511 | SAU102939 | 5747 | #N/A | #N/A |
| S1M10000005A06 | 1512 | SAU102939 | 5747 | #N/A | #N/A |
| S1M10000005A07 | 1513 | SAU100952 | 5358 | SAU1c0043_orf_182p | 12523 |
| S1M10000005A08 | 1514 | SAU201810 | 5836 | SAU2c0308_orf_2p | 12769 |
| S1M10000005A08 | 1514 | SAU202174 | 5845 | SAU2c0412_orf_3p | 12895 |
| S1M10000005A08 | 1514 | SAU301148 | 5888 | #N/A | #N/A |
| S1M10000005A09 | 1515 | SAU103038 | 5757 | #N/A | #N/A |
| S1M10000005A10 | 1516 | SAU101239 | 5402 | SAU1c0044_orf_15p | 12570 |
| S1M10000005A10 | 1516 | SAU101240 | 5403 | SAU1c0044_orf_16p | 12573 |
| S1M10000005A11 | 1517 | SAU100964 | 5363 | SAU1c0044_orf_86p | 12641 |
| S1M10000005B02 | 1518 | SAU102527 | 5693 | SAU1c0032_orf_9p | 12260 |
| S1M10000005B04 | 1519 | SAU101545 | 5474 | SAU1c0037_orf_132p | 12348 |
| S1M10000005B07 | 1520 | SAU201810 | 5836 | SAU2c0308_orf_2p | 12769 |
| S1M10000005B07 | 1520 | SAU202174 | 5845 | SAU2c0412_orf_3p | 12895 |
| S1M10000005B07 | 1520 | SAU301148 | 5888 | #N/A | #N/A |
| S1M10000005B08 | 1521 | SAU101907 | 5574 | SAU1c0040_orf_79p | 12442 |
| S1M10000005B09 | 1522 | SAU102422 | 5666 | SAU1c0030_orf_22p | 12207 |
| S1M10000005B12 | 1523 | SAU102284 | 5635 | SAU1c0038_orf_5p | 12389 |
| S1M10000005B12 | 1523 | SAU201469 | 5816 | SAU2c0438_orf_6p | 12967 |
| S1M10000005C01 | 1524 | SAU201810 | 5836 | SAU2c0308_orf_2p | 12769 |
| S1M10000005C01 | 1524 | SAU202174 | 5845 | SAU2c0412_orf_3p | 12895 |
| S1M10000005C01 | 1524 | SAU301148 | 5888 | #N/A | #N/A |
| S1M10000005C05 | 1525 | SAU101869 | 5566 | SAU1c0036_orf_24p | 12321 |
| S1M10000005C06 | 1526 | SAU100885 | 5348 | SAU1c0038_orf_38p | 12376 |
| S1M10000005C09 | 1527 | SAU302513 | 5906 | SAU3c1298_orf_1p | 13085 |
| S1M10000005C11 | 1528 | SAU101495 | 5467 | SAU1c0037_orf_65p | 12360 |
| S1M10000005D01 | 1529 | SAU103038 | 5757 | #N/A | #N/A |
| S1M10000005D02 | 1530 | SAU102007 | 5590 | SAU1c0040_orf_108p | 12428 |
| S1M10000005D03 | 1531 | SAU101907 | 5574 | SAU1c0040_orf_79p | 12442 |
| S1M10000005D04 | 1532 | SAU101545 | 5474 | SAU1c0037_orf_132p | 12348 |
| S1M10000005D04 | 1532 | SAU101546 | 5475 | SAU1c0037_orf_133p | 12349 |
| S1M10000005D05 | 1533 | SAU100964 | 5363 | SAU1c0044_orf_86p | 12641 |
| S1M10000005D06 | 1534 | SAU101545 | 5474 | SAU1c0037_orf_132p | 12348 |
| S1M10000005D06 | 1534 | SAU101546 | 5475 | SAU1c0037_orf_133p | 12349 |
| S1M10000005D07 | 1535 | SAU101869 | 5566 | SAU1c0036_orf_24p | 12321 |
| S1M10000005D08 | 1536 | SAU101624 | 5497 | SAU1c0040_orf_25p | 12429 |
| S1M10000005D09 | 1537 | SAU101752 | 5522 | SAU1c0040_orf_85p | 12447 |
| S1M10000005D11 | 1538 | SAU100158 | 5238 | SAU1c0040_orf_80p | 12443 |
| S1M10000005D12 | 1539 | SAU100964 | 5363 | SAU1c0044_orf_86p | 12641 |
| S1M10000005E01 | 1540 | SAU100542 | 5288 | SAU1c0043_orf_210p | 12532 |
| S1M10000005E02 | 1541 | SAU102631 | 5721 | SAU1c0045_orf_94p | 12712 |
| S1M10000005E05 | 1542 | SAU201810 | 5836 | SAU2c0308_orf_2p | 12769 |
| S1M10000005E05 | 1542 | SAU202174 | 5845 | SAU2c0412_orf_3p | 12895 |
| S1M10000005E05 | 1542 | SAU301148 | 5888 | #N/A | #N/A |
| S1M10000005E06 | 1543 | SAU102939 | 5747 | #N/A | #N/A |
| S1M10000005E07 | 1544 | SAU102939 | 5747 | #N/A | #N/A |
| S1M10000005E08 | 1545 | SAU201810 | 5836 | SAU2c0308_orf_2p | 12769 |
| S1M10000005E08 | 1545 | SAU202174 | 5845 | SAU2c0412_orf_3p | 12895 |
| S1M10000005E08 | 1545 | SAU301148 | 5888 | #N/A | #N/A |
| S1M10000005E10 | 1546 | SAU102939 | 5747 | #N/A | #N/A |
| S1M10000005E11 | 1547 | SAU100381 | 5265 | SAU1c0033_orf_9p | 12276 |
| S1M10000005E12 | 1548 | SAU102939 | 5747 | #N/A | #N/A |
| S1M10000005F02 | 1549 | SAU100964 | 5363 | SAU1c0044_orf_86p | 12641 |
| S1M10000005F02 | 1549 | SAU100965 | 5364 | SAU1c0044_orf_87p | 12642 |
| S1M10000005F03 | 1550 | SAU100793 | 5329 | SAU1c0028_orf_52p | 12188 |
| S1M10000005F03 | 1550 | SAU301433 | 5895 | SAU3c1420_orf_2p | 13118 |
| S1M10000005F04 | 1551 | SAU102044 | 5593 | SAU1c0039_orf_65p | 12414 |
| S1M10000005F04 | 1551 | SAU102046 | 5594 | SAU1c0039_orf_66p | 12415 |
| S1M10000005F04 | 1551 | SAU201961 | 5840 | #N/A | #N/A |
| S1M10000006A03 | 1552 | SAU201810 | 5836 | SAU2c0308_orf_2p | 12769 |
| S1M10000006A03 | 1552 | SAU202174 | 5845 | SAU2c0412_orf_3p | 12895 |
| S1M10000006A03 | 1552 | SAU301148 | 5888 | #N/A | #N/A |
| S1M10000006A04 | 1553 | SAU101271 | 5411 | SAU1c0037_orf_90p | 12366 |
| S1M10000006A05 | 1554 | SAU101807 | 5547 | SAU1c0032_orf_26p | 12231 |
| S1M10000006A05 | 1554 | SAU101808 | 5548 | SAU1c0032_orf_27p | 12232 |
| S1M10000006A07 | 1555 | SAU100952 | 5358 | SAU1c0043_orf_182p | 12523 |
| S1M10000006A08 | 1556 | SAU201810 | 5836 | SAU2c0308_orf_2p | 12769 |
| S1M10000006A08 | 1556 | SAU202174 | 5845 | SAU2c0412_orf_3p | 12895 |
| S1M10000006A08 | 1556 | SAU301148 | 5888 | #N/A | #N/A |
| S1M10000006A10 | 1557 | SAU201810 | 5836 | SAU2c0308_orf_2p | 12769 |
| S1M10000006A10 | 1557 | SAU202174 | 5845 | SAU2c0412_orf_3p | 12895 |
| S1M10000006A10 | 1557 | SAU301148 | 5888 | #N/A | #N/A |
| S1M10000006A12 | 1558 | SAU101907 | 5574 | SAU1c0040_orf_79p | 12442 |
| S1M10000006B02 | 1559 | SAU100741 | 5318 | SAU1c0039_orf_48p | 12409 |
| S1M10000006B03 | 1560 | SAU102631 | 5721 | SAU1c0045_orf_94p | 12712 |
| S1M10000006B04 | 1561 | SAU201810 | 5836 | SAU2c0308_orf_2p | 12769 |
| S1M10000006B04 | 1561 | SAU202174 | 5845 | SAU2c0412_orf_3p | 12895 |
| S1M10000006B04 | 1561 | SAU301148 | 5888 | #N/A | #N/A |
| S1M10000006B07 | 1562 | SAU102059 | 5597 | SAU1c0034_orf_51p | 1286 |
| S1M10000006B10 | 1563 | SAU101791 | 5532 | SAU1c0032_orf_12p | 12216 |
| S1M10000006B11 | 1564 | SAU101365 | 5432 | SAU1c0044_orf_112p | 12556 |
| S1M10000006C02 | 1565 | SAU102939 | 5747 | #N/A | #N/A |
| S1M10000006C04 | 1566 | SAU102287 | 5637 | SAU1c0038_orf_7p | 12398 |
| S1M10000006C06 | 1567 | SAU102486 | 5687 | SAU1c0039_orf_93p | 12420 |
| S1M10000006C06 | 1567 | SAU102487 | 5688 | SAU1c0039_orf_92p | 12419 |
| S1M10000006C07 | 1568 | SAU100157 | 5237 | SAU1c0040_orf_81p | 12444 |
| S1M10000006C08 | 1569 | SAU102939 | 5747 | #N/A | #N/A |
| S1M10000006C10 | 1570 | SAU201810 | 5836 | SAU2c0308_orf_2p | 12769 |
| S1M10000006C10 | 1570 | SAU202174 | 5845 | SAU2c0412_orf_3p | 12895 |
| S1M10000006C10 | 1570 | SAU301148 | 5888 | #N/A | #N/A |
| S1M10000006D03 | 1571 | SAU100608 | 5297 | SAU1c0034_orf_69p | 12293 |
| S1M10000006D05 | 1572 | SAU201810 | 5836 | SAU2c0308_orf_2p | 12769 |
| S1M10000006D05 | 1572 | SAU202174 | 5845 | SAU2c0412_orf_3p | 12895 |
| S1M10000006D05 | 1572 | SAU301148 | 5888 | #N/A | #N/A |
| S1M10000006D06 | 1573 | SAU201810 | 5836 | SAU2c0308_orf_2p | 12769 |
| S1M10000006D06 | 1573 | SAU202174 | 5845 | SAU2c0412_orf_3p | 12895 |
| S1M10000006D06 | 1573 | SAU301148 | 5888 | #N/A | #N/A |
| S1M10000006D07 | 1574 | SAU102936 | 5746 | SAU1c0037_orf_57p | 12356 |
| S1M10000006D08 | 1575 | SAU102939 | 5747 | #N/A | #N/A |
| S1M10000006E02 | 1576 | SAU201810 | 5836 | SAU2c0308_orf_2p | 12769 |
| S1M10000006E02 | 1576 | SAU202174 | 5845 | SAU2c0412_orf_3p | 12895 |
| S1M10000006E02 | 1576 | SAU301148 | 5888 | #N/A | #N/A |
| S1M10000006E03 | 1577 | SAU100275 | 5252 | SAU1c0036_orf_15p | 12314 |
| S1M10000006E04 | 1578 | SAU101777 | 5527 | SAU1c0037_orf_39p | 12352 |
| S1M10000006E07 | 1579 | SAU201810 | 5836 | SAU2c0308_orf_2p | 12769 |
| S1M10000006E07 | 1579 | SAU202174 | 5845 | SAU2c0412_orf_3p | 12895 |
| S1M10000006E07 | 1579 | SAU301148 | 5888 | #N/A | #N/A |
| S1M10000006E08 | 1580 | SAU101793 | 5534 | SAU1c0032_orf_14p | 12218 |
| S1M10000006F01 | 1581 | SAU101869 | 5566 | SAU1c0036_orf_24p | 12321 |
| S1M10000006F02 | 1582 | SAU201469 | 5816 | SAU2c0438_orf_6p | 12967 |
| S1M10000006F03 | 1583 | SAU102294 | 5639 | SAU1c0044_orf_288p | 12610 |
| S1M10000006F03 | 1583 | SAU301080 | 5885 | SAU3c1287_orf_1p | 13083 |
| S1M10000006F04 | 1584 | SAU100964 | 5363 | SAU1c0044_orf_86p | 12641 |
| S1M10000006F06 | 1585 | SAU101907 | 5574 | SAU1c0040_orf_79p | 12442 |
| S1M10000006G02 | 1586 | SAU101833 | 5555 | SAU1c0038_orf_34p | 12373 |
| S1M10000006G03 | 1587 | SAU101400 | 5444 | SAU1c0036_orf_35p | 12326 |
| S1M10000006G05 | 1588 | SAU100275 | 5252 | SAU1c0036_orf_15p | 12314 |
| S1M10000006G06 | 1589 | SAU201571 | 5824 | SAU2c0447_orf_17p | 12997 |
| S1M10000006G07 | 1590 | SAU101612 | 5493 | SAU1c0044_orf_7p | 12637 |
| S1M10000006G07 | 1590 | SAU202945 | 5857 | SAU2c0394_orf_7p | 12868 |
| S1M10000006G09 | 1591 | SAU102939 | 5747 | #N/A | #N/A |
| S1M10000006G10 | 1592 | SAU102602 | 5708 | SAU1c0032_orf_5p | 12249 |
| S1M10000006G11 | 1593 | SAU101438 | 5450 | SAU1c0038_orf_40p | 12379 |
| S1M10000007A02 | 1594 | SAU102939 | 5747 | #N/A | #N/A |
| S1M10000007A03 | 1595 | SAU101653 | 5504 | SAU1c0042_orf_124p | 12493 |
| S1M10000007B02 | 1596 | SAU102352 | 5650 | SAU1c0040_orf_38p | 12434 |
| S1M10000007B02 | 1596 | SAU202872 | 5854 | SAU2c0393_orf_6p | 12866 |
| S1M10000007B11 | 1597 | SAU101476 | 5459 | SAU1c0032_orf_69p | 12254 |
| S1M10000007C02 | 1598 | SAU102939 | 5747 | #N/A | #N/A |
| S1M10000007C04 | 1599 | SAU100608 | 5297 | SAU1c0034_orf_69p | 12293 |
| S1M10000007C05 | 1600 | SAU100158 | 5238 | SAU1c0040_orf_80p | 12443 |
| S1M10000007C06 | 1601 | SAU101652 | 5503 | SAU1c0042_orf_123p | 12492 |
| S1M10000007C07 | 1602 | SAU101266 | 5408 | SAU1c0042_orf_117p | 12490 |
| S1M10000007C08 | 1603 | SAU101717 | 5513 | SAU1c0016_orf_16p | 12131 |
| S1M10000007C09 | 1604 | SAU102939 | 5747 | 4N/A | #N/A |
| S1M10000007D03 | 1605 | SAU201810 | 5836 | SAU2c0308_orf_2p | 12769 |
| S1M10000007D03 | 1605 | SAU202174 | 5845 | SAU2c0412_orf_3p | 12895 |
| S1M10000007D03 | 1605 | SAU301148 | 5888 | #N/A | #N/A |
| S1M10000007D06 | 1606 | SAU100158 | 5238 | SAU1c0040_orf_80p | 12443 |
| S1M10000007D08 | 1607 | SAU102939 | 5747 | #N/A | #N/A |
| S1M10000007D10 | 1608 | SAU100300 | 5253 | SAU1c0040_orf_90p | 12451 |
| S1M10000007D11 | 1609 | SAU101652 | 5503 | SAU1c0042_orf_123p | 12492 |
| S1M10000007E04 | 1610 | SAU201810 | 5836 | SAU2c0308_orf_2p | 12769 |
| S1M10000007E04 | 1610 | SAU202174 | 5845 | SAU2c0412_orf_3p | 12895 |
| S1M10000007E04 | 1610 | SAU301148 | 5888 | #N/A | #N/A |
| S1M10000007E06 | 1611 | SAU101495 | 5467 | SAU1c0037_orf_65p | 12360 |
| S1M10000007E07 | 1612 | SAU101365 | 5432 | SAU1c0044_orf_112p | 12556 |
| S1M10000007F01 | 1613 | SAU100275 | 5252 | SAU1c0036_orf_15p | 12314 |
| S1M10000007F02 | 1614 | SAU101685 | 5512 | SAU1c0023_orf_11p | 12152 |
| S1M10000007F04 | 1615 | SAU101491 | 5464 | SAU1c0025_orf_20p | 12165 |
| S1M10000007F08 | 1616 | SAU100794 | 5330 | SAU1c0028_orf_53p | 12189 |
| S1M10000007F09 | 1617 | SAU202930 | 5856 | SAU2c0396_orf_3p | 12871 |
| S1M10000007F10 | 1618 | SAU101791 | 5532 | SAU1c0032_orf_12p | 12216 |
| S1M10000007F11 | 1619 | SAU102939 | 5747 | #N/A | #N/A |
| S1M10000007F12 | 1620 | SAU102939 | 5747 | #N/A | #N/A |
| S1M10000007G02 | 1621 | SAU101270 | 5410 | SAU1c0037_orf_89p | 12365 |
| S1M10000007G03 | 1622 | SAU100952 | 5358 | SAU1c0043_orf_182p | 12523 |
| S1M10000007G05 | 1623 | SAU101907 | 5574 | SAU1c0040_orf_79p | 12442 |
| S1M10000007G07 | 1624 | SAU102652 | 5725 | SAU1c0045_orf_115p | 12653 |
| S1M10000007G08 | 1625 | SAU103038 | 5757 | #N/A | #N/A |
| S1M10000008A03 | 1626 | SAU101476 | 5459 | SAU1c0032_orf_69p | 12254 |
| S1M10000008A04 | 1627 | SAU101491 | 5464 | SAU1c0025_orf_20p | 12165 |
| S1M10000008A05 | 1628 | SAU102939 | 5747 | #N/A | #N/A |
| S1M10000008A08 | 1629 | SAU102905 | 5742 | SAU1c0033_orf_45p | 12273 |
| S1M10000008A08 | 1629 | SAU301869 | 5903 | SAU3c1353_orf_1p | 13093 |
| S1M10000008A09 | 1630 | SAU100741 | 5318 | SAU1c0039_orf_48p | 12409 |
| S1M10000008A12 | 1631 | SAU100608 | 5297 | SAU1c0034_orf_69p | 12293 |
| S1M10000008B03 | 1632 | SAU103144 | 5761 | SAU1c0045_orf_15p | 12663 |
| S1M10000008B04 | 1633 | SAU201810 | 5836 | SAU2c0308_orf_2p | 12769 |
| S1M10000008B04 | 1633 | SAU202174 | 5845 | SAU2c0412_orf_3p | 12895 |
| S1M10000008B04 | 1633 | SAU301148 | 5888 | #N/A | #N/A |
| S1M10000008B06 | 1634 | SAU101806 | 5546 | SAU1c0032_orf_25p | 12230 |
| S1M10000008B08 | 1635 | SAU101652 | 5503 | SAU1c0042_orf_123p | 12492 |
| S1M10000008B09 | 1636 | SAU102117 | 5603 | SAU1c0027_orf_6p | 12181 |
| S1M10000008B10 | 1637 | SAU100608 | 5297 | SAU1c0034_orf_69p | 12293 |
| S1M10000008C05 | 1638 | SAU102939 | 5747 | #N/A | #N/A |
| S1M10000008C06 | 1639 | SAU102939 | 5747 | #N/A | #N/A |
| S1M10000008C07 | 1640 | SAU102939 | 5747 | #N/A | #N/A |
| S1M10000008C08 | 1641 | SAU201571 | 5824 | SAU2c0447_orf_17p | 12997 |
| S1M10000008C09 | 1642 | SAU101793 | 5534 | SAU1c0032_orf_14p | 12218 |
| S1M10000008D05 | 1643 | SAU100414 | 5270 | SAU1c0022_orf_24p | 12148 |
| S1M10000008D09 | 1644 | SAU103038 | 5757 | #N/A | #N/A |
| S1M10000008E05 | 1645 | SAU101545 | 5474 | SAU1c0037_orf_132p | 12348 |
| S1M10000008E08 | 1646 | SAU101907 | 5574 | SAU1c0040_orf_79p | 12442 |
| S1M10000008Eo9 | 1647 | SAU101343 | 5425 | SAU1c0044_orf_40p | 12619 |
| S1M10000008E10 | 1648 | SAU101360 | 5431 | SAU1c0044_orf_109p | 12555 |
| S1M10000008F01 | 1649 | SAU102284 | 5635 | SAU1c0038_orf_5p | 12389 |
| S1M10000008F01 | 1649 | SAU201469 | 5816 | SAU2c0438_orf_6p | 12967 |
| S1M10000008F02 | 1650 | SAU102007 | 5590 | SAU1c0040_orf_108p | 12428 |
| S1M10000008F03 | 1651 | SAU101028 | 5370 | SAU1c0043_orf_7p | 12552 |
| S1M10000008F06 | 1652 | SAU100741 | 5318 | SAU1c0039_orf_48p | 12409 |
| S1M10000008F08 | 1653 | SAU101365 | 5432 | SAU1c0044_orf_112p | 12556 |
| S1M10000008F09 | 1654 | SAU201810 | 5836 | SAU2c0308_orf_2p | 12769 |
| S1M10000008F09 | 1654 | SAU202174 | 5845 | SAU2c0412_orf_3p | 12895 |
| S1M10000008F09 | 1654 | SAU301148 | 5888 | #N/A | #N/A |
| S1M10000008F10 | 1655 | SAU100300 | 5253 | SAU1c0040_orf_90p | 12451 |
| S1M10000008F11 | 1656 | SAU301620 | 5899 | SAU3c1478_orf_2p | 13140 |
| S1M10000008G02 | 1657 | SAU201167 | 5803 | SAU2c0407_orf_5p | 12887 |
| S1M10000008G03 | 1658 | SAU101637 | 5500 | SAU1c0029_orf_8p | 12201 |
| S1M10000008G05 | 1659 | SAU102870 | 5738 | SAU1c0026_orf_17p | 12170 |
| S1M10000009A02 | 1660 | SAU101159 | 5387 | SAU1c0036_orf_46p | 12331 |
| S1M10000009A04 | 1661 | SAU102979 | 5750 | SAU1c0043_orf_227p | 12536 |
| S1M10000009A07 | 1662 | SAU101371 | 5435 | SAU1c0033_orf_7p | 12275 |
| S1M10000009A08 | 1663 | SAU100658 | 5303 | SAU1c0038_orf_59p | 12388 |
| S1M10000009A08 | 1663 | SAU100659 | 5304 | SAU1c0038_orf_60p | 12390 |
| S1M10000009A09 | 1664 | SAU201571 | 5824 | SAU2c0447_orf_17p | 12997 |
| S1M10000009A10 | 1665 | SAU100658 | 5303 | SAU1c0038_orf_59p | 12388 |
| S1M10000009A11 | 1666 | SAU100114 | 5228 | SAU1c0043_orf_225p | 12535 |
| S1M10000009B01 | 1667 | SAU201506 | 5818 | SAU2c0432_orf_18p | 12946 |
| S1M10000009B02 | 1668 | SAU101159 | 5387 | SAU1c0036_orf_46p | 12331 |
| S1M10000009B03 | 1669 | SAU201506 | 5818 | SAU2c0432_orf_18p | 12946 |
| S1M10000009B04 | 1670 | SAU102117 | 5603 | SAU1c0027_orf_6p | 12181 |
| S1M10000009B05 | 1671 | SAU101752 | 5522 | SAU1c0040_orf_85p | 12447 |
| S1M10000009B06 | 1672 | SAU101271 | 5411 | SAU1c0037_orf_90p | 12366 |
| S1M10000009B07 | 1673 | SAU201952 | 5839 | SAU2c0457_orf_10p | 13020 |
| S1M10000009B10 | 1674 | SAU100141 | 5236 | SAU1c0032_orf_8p | 12259 |
| S1M10000009B10 | 1674 | SAU102527 | 5693 | SAU1c0032_orf_9p | 12260 |
| S1M10000009B11 | 1675 | SAU301898 | 5904 | SAU3c1079_orf_1p | 13057 |
| S1M10000009B12 | 1676 | SAU102433 | 5668 | SAU1c0045_orf_37p | 12701 |
| S1M10000009C01 | 1677 | SAU101572 | 5484 | SAU1c0044_orf_211p | 12586 |
| S1M10000009C01 | 1677 | SAU101573 | 5485 | SAU1c0044_orf_212p | 12587 |
| S1M10000009C02 | 1678 | SAU102418 | 5664 | SAU1c0030_orf_18p | 12205 |
| S1M10000009C05 | 1679 | SAU101752 | 5522 | SAU1c0040_orf_85p | 12447 |
| S1M10000009C06 | 1680 | SAU102613 | 5715 | SAU1c0041_orf_55p | 12475 |
| S1M10000009C07 | 1681 | SAU102460 | 5678 | SAU1c0026_orf_18p | 12171 |
| S1M10000009C08 | 1682 | SAU100658 | 5303 | SAU1c0038_orf_59p | 12388 |
| S1M10000009C09 | 1683 | SAU102129 | 5604 | SAU1c0027_orf_17p | 12176 |
| S1M10000009C10 | 1684 | SAU102336 | 5646 | SAU1c0045_off_146p | 12659 |
| S1M10000009C11 | 1685 | SAU102340 | 5647 | SAU1c0045_orf_149p | 12660 |
| S1M10000009D01 | 1686 | SAU102262 | 5627 | SAU1c0032_orf_58p | 12248 |
| S1M10000009D02 | 1687 | SAU100355 | 5263 | SAU1c0023_orf_6p | 12155 |
| S1M10000009D03 | 1688 | SAU102418 | 5664 | SAU1c0030_orf_18p | 12205 |
| S1M10000009D04 | 1689 | SAU102979 | 5750 | SAU1c0043_orf_227p | 12536 |
| S1M10000009D05 | 1690 | SAU100799 | 5331 | SAU1c0045_orf_243p | 12682 |
| S1M10000009D07 | 1691 | SAU200994 | 5802 | SAU2c0428_orf_4p | 12935 |
| S1M10000009D09 | 1692 | SAU101681 | 5510 | SAU1c0044_orf_220p | 12592 |
| S1M10000009D09 | 1692 | SAU101682 | 5511 | SAU1c0044_orf_219p | 12591 |
| S1M10000009D11 | 1693 | SAU101455 | 5456 | SAU1c0045_orf_250p | 12686 |
| S1M10000009D11 | 1693 | SAU200916 | 5797 | SAU2c0373_orf_4p | 12838 |
| S1M10000009D11 | 1693 | SAU301620 | 5899 | SAU3c1478_orf_2p | 13140 |
| S1M10000009E02 | 1694 | SAU101572 | 5484 | SAU1c0044_orf_211p | 12586 |
| S1M10000009E02 | 1694 | SAU101573 | 5485 | SAU1c0044_orf_212p | 12587 |
| S1M10000009E06 | 1695 | SAU102059 | 5597 | SAU1c0034_orf_51p | 1286 |
| S1M10000009E08 | 1696 | SAU201539 | 5821 | SAU2c0431_orf_15p | 12943 |
| S1M10000009E09 | 1697 | SAU100114 | 5228 | SAU1c0043_orf_225p | 12535 |
| S1M10000009E11 | 1698 | SAU101501 | 5541 | #N/A | #N/A |
| S1M10000009E12 | 1699 | SAU101572 | 5484 | SAU1c0044_orf_211p | 12586 |
| S1M10000009F01 | 1700 | SAU101452 | 5455 | SAU1c0045_orf_247p | 12684 |
| S1M10000009F02 | 1701 | SAU101818 | 5553 | SAU1c0038_orf_20p | 12369 |
| S1M10000009F03 | 1702 | SAU101488 | 5463 | SAU1c0025_orf_18p | 12164 |
| S1M10000009F05 | 1703 | SAU101752 | 5522 | SAU1c0040_orf_85p | 12447 |
| S1M10000009F06 | 1704 | SAU101752 | 5522 | SAU1c0040_orf_85p | 12447 |
| S1M10000009F07 | 1705 | SAU102607 | 5712 | SAU1c0041_orf_51p | 12472 |
| S1M10000009F07 | 1705 | SAU102944 | 5749 | SAU1c0041_orf_47p | 12468 |
| S1M10000009F09 | 1706 | SAU202176 | 5846 | SAU2c0412_orf_3p | 12895 |
| S1M10000009F09 | 1706 | SAU302805 | 5911 | SAU3c1458_orf_1p | 13133 |
| S1M10000009F10 | 1707 | SAU102392 | 5658 | SAU1c0033_orf_40p | 12270 |
| S1M10000009F10 | 1707 | SAU201541 | 5822 | SAU2c0431_orf_14p | 12942 |
| S1M10000009G02 | 1708 | SAU101572 | 5484 | SAU1c0044_orf_211p | 12586 |
| S1M10000009G02 | 1708 | SAU101573 | 5485 | SAU1c0044_orf_212p | 12587 |
| S1M10000009G03 | 1709 | SAU301620 | 5899 | SAU3c1478_orf_2p | 13140 |
| S1M10000009G05 | 1710 | SAU101752 | 5522 | SAU1c0040_orf_85p | 12447 |
| S1M10000009G06 | 1711 | SAU102909 | 5743 | SAU1c0036_orf_16p | 12315 |
| S1M10000009G07 | 1712 | SAU200468 | 5781 | SAU2c0429_orf_19p | 12937 |
| S1M10000009G09 | 1713 | SAU102693 | 5731 | SAU1c0044_orf_58p | 12627 |
| S1M10000009G10 | 1714 | SAU100646 | 5302 | SAU1c0025_orf_5p | 12168 |
| S1M10000009G11 | 1715 | SAU100131 | 5232 | SAU1c0043_orf_156p | 12517 |
| S1M10000009H01 | 1716 | SAU201506 | 5818 | SAU2c0432_orf_18p | 12946 |
| S1M10000009H02 | 1717 | SAU102658 | 5726 | SAU1c0045_orf_121p | 12654 |
| S1M10000009H03 | 1718 | SAU201654 | 5829 | SAU2c0442_orf_12p | 12982 |
| S1M10000009H05 | 1719 | SAU100582 | 5292 | SAU1c0042_orf_21p | 12503 |
| S1M10000009H05 | 1719 | SAU102165 | 5610 | SAU1c0041_orf_25p | 12460 |
| S1M10000009H05 | 1719 | SAU201929 | 5838 | SAU2c0451_orf_19p | 13008 |
| S1M10000009H07 | 1720 | SAU102297 | 5640 | SAU1c0045_orf_41p | 12704 |
| S1M10000009H09 | 1721 | SAU200928 | 5798 | SAU2c0365_orf_5p | 12815 |
| S1M10000009H11 | 1722 | SAU101801 | 5541 | #N/A | #N/A |
| S1M10000011A02 | 1723 | SAU100414 | 5270 | SAU1c0022_orf_24p | 12148 |
| S1M10000011A03 | 1724 | SAU101271 | 5411 | SAU1c0037_orf_90p | 12366 |
| S1M10000011A04 | 1725 | SAU101791 | 5532 | SAU1c0032_orf_12p | 12216 |
| S1M10000011A06 | 1726 | SAU101574 | 5486 | SAU1c0044_orf_213p | 12588 |
| S1M10000011A06 | 1726 | SAU101575 | 5487 | SAU1c0044_orf_214p | 12589 |
| S1M10000011B01 | 1727 | SAU102881 | 5740 | SAU1c0032_orf_4p | 12242 |
| S1M10000011B02 | 1728 | SAU101541 | 5472 | SAU1c0037_orf_128p | 12344 |
| S1M10000011B03 | 1729 | SAU101849 | 5559 | SAU1c0044_orf_148p | 12567 |
| S1M10000011B04 | 1730 | SAU101574 | 5486 | SAU1c0044_orf_213p | 12588 |
| S1M10000011B04 | 1730 | SAU101575 | 5487 | SAU1c0044_orf_214p | 12589 |
| S1M10000011B05 | 1731 | SAU200934 | 5799 | SAU2c0375_orf_9p | 12842 |
| S1M10000011C01 | 1732 | SAU101447 | 5454 | SAU1c0045_orf_244p | 12683 |
| S1M10000011C05 | 1733 | SAU100432 | 5271 | SAU1c0040_orf_88p | 12450 |
| S1M10000011C05 | 1733 | SAU202756 | 5852 | SAU2c0470_orf_1p | 13027 |
| S1M10000011C06 | 1734 | SAU102350 | 5649 | SAU1c0040_orf_36p | 12433 |
| S1M10000011D01 | 1735 | SAU101293 | 5414 | SAU1c0044_orf_61p | 12631 |
| S1M10000011D02 | 1736 | SAU100414 | 5270 | SAU1c0022_orf_24p | 12148 |
| S1M10000011D04 | 1737 | SAU102280 | 5632 | SAU1c0038_orf_3p | 12378 |
| S1M10000011D06 | 1738 | SAU102942 | 5748 | SAU1c0035_orf_103p | 12296 |
| S1M10000011E02 | 1739 | SAU101966 | 5580 | SAU1c0028_orf_41p | 12186 |
| S1M10000011E03 | 1740 | SAU101632 | 5499 | SAU1c0039_orf_3p | 12407 |
| S1M10000011E04 | 1741 | SAU101572 | 5484 | SAU1c0044_orf_211p | 12586 |
| S1M10000011F01 | 1742 | SAU101365 | 5432 | SAU1c0044_orf_112p | 12556 |
| S1M10000011F03 | 1743 | SAU102350 | 5649 | SAU1c0040_orf_36p | 12433 |
| S1M10000011F04 | 1744 | SAU101155 | 5385 | SAU1c0036_orf_11p | 12310 |
| S1M10000011F06 | 1745 | SAU101481 | 5460 | SAU1c0015_orf_9p | 12130 |
| S1M10000011F06 | 1745 | SAU101482 | 5461 | SAU1c0015_orf_10p | 12123 |
| S1M10000011G01 | 1746 | SAU301465 | 5896 | SAU3c1429_orf_4p | 13121 |
| S1M10000011G03 | 1747 | SAU302626 | 5907 | SAU3c1367_orf_3p | 13105 |
| S1M10000011G04 | 1748 | SAU101271 | 5411 | SAU1c0037_orf_90p | 12366 |
| S1M10000011G05 | 1749 | SAU102350 | 5649 | SAU1c0040_orf_36p | 12433 |
| S1M10000011G06 | 1750 | SAU102298 | 5641 | SAU1c0045_orf_42p | 12705 |
| S1M10000011H01 | 1751 | SAU201558 | 5823 | SAU2c0434_orf_5p | 12954 |
| S1M10000011H03 | 1752 | SAU100432 | 5271 | SAU1c0040_orf_88p | 12450 |
| S1M10000011H03 | 1752 | SAU202756 | 5852 | SAU2c0470_orf_1p | 13027 |
| S1M10000011H04 | 1753 | SAU200934 | 5799 | SAU2c0375_orf_9p | 12842 |
| S1M10000012A02 | 1754 | SAU102533 | 5695 | #N/A | #N/A |
| S1M10000012A02 | 1754 | SAU102534 | 5696 | #N/A | #N/A |
| S1M10000012A06 | 1755 | SAU100157 | 5237 | SAU1c0040_orf_81p | 12444 |
| S1M10000012A08 | 1756 | SAU101630 | 5498 | SAU1c0039_orf_4p | 12410 |
| S1M10000012A08 | 1756 | SAU300156 | 5867 | SAU3c0609_orf_2p | 13036 |
| S1M10000012A09 | 1757 | SAU102356 | 5652 | SAU1c0040_orf_41p | 12436 |
| S1M10000012A10 | 1758 | SAU101266 | 5408 | SAU1c0042_orf_117p | 12490 |
| S1M10000012A11 | 1759 | SAU100390 | 5267 | #N/A | #N/A |
| S1M10000012A11 | 1759 | SAU200028 | 5771 | SAU2c0145_orf_1p | 12721 |
| S1M10000012B01 | 1760 | SAU100751 | 5321 | SAU1c0036_orf_59p | 12335 |
| S1M10000012B05 | 1761 | SAU101573 | 5485 | SAU1c0044_orf_212p | 12587 |
| S1M10000012B06 | 1762 | SAU102350 | 5649 | SAU1c0040_orf_36p | 12433 |
| S1M10000012B07 | 1763 | SAU101814 | 5551 | SAU1c0032_orf_32p | 12237 |
| S1M10000012B07 | 1763 | SAU101815 | 5552 | SAU1c0032_orf_33p | 12238 |
| S1M10000012B11 | 1764 | SAU102551 | 5698 | SAU1c0045_orf_206p | 12672 |
| S1M10000012C01 | 1765 | SAU101652 | 5503 | SAU1c0042_orf_123p | 12492 |
| S1M10000012C03 | 1766 | SAU100776 | 5327 | SAU1c0041_orf_72p | 12482 |
| S1M10000012C04 | 1767 | SAU100776 | 5327 | SAU1c0041_orf_72p | 12482 |
| S1M10000012C05 | 1768 | SAU201558 | 5823 | SAU2c0434_orf_5p | 12954 |
| S1M10000012C06 | 1769 | SAU101570 | 5482 | SAU1c0044_orf_209p | 12584 |
| S1M10000012C06 | 1769 | SAU101571 | 5483 | SAU1c0044_orf_210p | 12585 |
| S1M10000012C11 | 1770 | SAU100547 | 5290 | SAU1c0032_orf_3p | 12240 |
| S1M10000012C11 | 1770 | SAU102881 | 5740 | SAU1c0032_orf_4p | 12242 |
| S1M10000012C12 | 1771 | SAU101781 | 5528 | SAU1c0037_orf_43p | 12353 |
| S1M10000012D04 | 1772 | SAU201952 | 5839 | SAU2c0457_orf_10p | 13020 |
| S1M10000012D06 | 1773 | SAU101271 | 5411 | SAU1c0037_orf_90p | 12366 |
| S1M10000012D07 | 1774 | SAU200928 | 5798 | SAU2c0365_orf_5p | 12815 |
| S1M10000012D08 | 1775 | SAU101652 | 5503 | SAU1c0042_orf_123p | 12492 |
| S1M10000012D09 | 1776 | SAU101752 | 5522 | SAU1c0040_orf_85p | 12447 |
| S1M10000012D12 | 1777 | SAU102620 | 5718 | SAU1c0041_orf_62p | 12479 |
| S1M10000012D12 | 1777 | SAU102621 | 5719 | SAU1c0041_orf_63p | 12480 |
| S1M10000012D12 | 1777 | SAU202006 | 5842 | SAU2c0456_orf_20p | 13018 |
| S1M10000012E01 | 1778 | SAU100733 | 5314 | SAU1c0044_orf_254p | 12602 |
| S1M10000012E01 | 1778 | SAU100734 | 5315 | SAU1c0044_orf_255p | 12603 |
| S1M10000012E02 | 1779 | SAU102485 | 5686 | SAU1c0039_orf_95p | 12421 |
| S1M10000012E04 | 1780 | SAU201486 | 5817 | SAU2c0457_orf_34p | 13023 |
| S1M10000012E07 | 1781 | SAU100390 | 5267 | #N/A | #N/A |
| S1M10000012E07 | 1781 | SAU200028 | 5771 | SAU2c0145_orf_1p | 12721 |
| S1M10000012E08 | 1782 | SAU101189 | 5392 | SAU1c0033_orf_25p | 12264 |
| S1M10000012E12 | 1783 | SAU201810 | 5836 | SAU2c0308_orf_2p | 12769 |
| S1M10000012E12 | 1783 | SAU202174 | 5845 | SAU2c0412_orf_3p | 12895 |
| S1M10000012E12 | 1783 | SAU301148 | 5888 | #N/A | #N/A |
| S1M10000012F04 | 1784 | SAU101793 | 5534 | SAU1c0032_orf_14p | 12218 |
| S1M10000012F07 | 1785 | SAU102284 | 5635 | SAU1c0038_orf_5p | 12389 |
| S1M10000012F07 | 1785 | SAU201469 | 5816 | SAU2c0438_orf_6p | 12967 |
| S1M10000012F08 | 1786 | SAU101189 | 5392 | SAU1c0033_orf_25p | 12264 |
| S1M10000012F09 | 1787 | SAU201403 | 5815 | SAU2c0423_orf_3p | 12913 |
| S1M10000012F10 | 1788 | SAU101752 | 5522 | SAU1c0040_orf_85p | 12447 |
| S1M10000012F11 | 1789 | SAU101781 | 5528 | SAU1c0037_orf_43p | 12353 |
| S1M10000012F12 | 1790 | SAU201810 | 5836 | SAU2c0308_orf_2p | 12769 |
| S1M10000012F12 | 1790 | SAU202174 | 5845 | SAU2c0412_orf_3p | 12895 |
| S1M10000012F12 | 1790 | SAU301148 | 5888 | #N/A | #N/A |
| S1M10000012G01 | 1791 | SAU102117 | 5603 | SAU1c0027_orf_6p | 12181 |
| S1M10000012G02 | 1792 | SAU301758 | 5900 | SAU3c1508_orf_5p | 13156 |
| S1M10000012G03 | 1793 | SAU201301 | 5809 | SAU2c0416_orf_17p | 12899 |
| S1M10000012G06 | 1794 | SAU101571 | 5483 | SAU1c0044_orf_210p | 12585 |
| S1M10000012G07 | 1795 | SAU101572 | 5484 | SAU1c0044_orf_211p | 12586 |
| S1M10000012G07 | 1795 | SAU101573 | 5485 | SAU1c0044_orf_212p | 12587 |
| S1M10000012G08 | 1796 | SAU102593 | 5704 | SAU1c0041_orf_39p | 12463 |
| S1M10000012G10 | 1797 | SAU100887 | 5350 | SAU1c0018_orf_15p | 12138 |
| S1M10000012H05 | 1798 | SAU100157 | 5237 | SAU1c0040_orf_81p | 12444 |
| S1M10000012H08 | 1799 | SAU202186 | 5847 | SAU2c0222_orf_1p | 12731 |
| S1M10000012H09 | 1800 | SAU100227 | 5244 | SAU1c0043_orf_188p | 12525 |
| S1M10000012H10 | 1801 | SAU100432 | 5271 | SAU1c0040_orf_88p | 12450 |
| S1M10000012H10 | 1801 | SAU100433 | 5272 | SAU1c0040_orf_87p | 12449 |
| S1M10000012H10 | 1801 | SAU101751 | 5521 | SAU1c0040_orf_86p | 12448 |
| S1M10000012H11 | 1802 | SAU301118 | 5886 | SAU3c1305_orf_3p | 13086 |
| S1M10000013A02 | 1803 | SAU102674 | 5730 | SAU1c0024_orf_12p | 12156 |
| S1M10000013A03 | 1804 | SAU101006 | 5367 | SAU1c0028_orf_59p | 12190 |
| S1M10000013A05 | 1805 | SAU102450 | 5675 | SAU1c0045_orf_21p | 12675 |
| S1M10000013A07 | 1806 | SAU102602 | 5708 | SAU1c0032_orf_5p | 12249 |
| S1M10000013A08 | 1807 | SAU101143 | 5383 | SAU1c0042_orf_159p | 12502 |
| S1M10000013A09 | 1808 | SAU101567 | 5481 | SAU1c0022_orf_10p | 12144 |
| S1M10000013A09 | 1808 | SAU200030 | 5772 | SAU2c0282_orf_3p | 12745 |
| S1M10000013A10 | 1809 | SAU201403 | 5815 | SAU2c0423_orf_3p | 12913 |
| S1M10000013A11 | 1810 | SAU101573 | 5485 | SAU1c0044_orf_212p | 12587 |
| S1M10000013A12 | 1811 | SAU100690 | 5309 | #N/A | #N/A |
| S1M10000013B02 | 1812 | SAU100433 | 5272 | SAU1c0040_orf_87p | 12449 |
| S1M10000013B03 | 1813 | SAU201236 | 5808 | SAU2c0409_orf_10p | 12891 |
| S1M10000013B04 | 1814 | SAU200928 | 5798 | SAU2c0365_orf_5p | 12815 |
| S1M10000013B05 | 1815 | SAU100300 | 5253 | SAU1c0040_orf_90p | 12451 |
| S1M10000013B06 | 1816 | SAU100118 | 5229 | SAU1c0015_orf_13p | 12125 |
| S1M10000013B07 | 1817 | SAU202174 | 5845 | SAU2c0412_orf_3p | 12895 |
| S1M10000013B07 | 1817 | SAU301148 | 5888 | #N/A | #N/A |
| S1M10000013B09 | 1818 | SAU200006 | 5770 | SAU2c0157_orf_1p | 12723 |
| S1M10000013B11 | 1819 | SAU103042 | 5758 | #N/A | #N/A |
| S1M10000013C03 | 1820 | SAU101781 | 5528 | SAU1c0037_orf_43p | 12353 |
| S1M10000013C05 | 1821 | SAU101038 | 5372 | SAU1c0043_orf_180p | 12521 |
| S1M10000013C07 | 1822 | SAU100300 | 5253 | SAU1c0040_orf_90p | 12451 |
| S1M10000013C08 | 1823 | SAU101571 | 5483 | SAU1c0044_orf_210p | 12585 |
| S1M10000013C09 | 1824 | SAU102059 | 5597 | SAU1c0034_orf_51p | 12286 |
| S1M10000013C10 | 1825 | SAU100736 | 5316 | SAU1c0038_orf_64p | 12391 |
| S1M10000013C11 | 1826 | SAU102059 | 5597 | SAU1c0034_orf_51p | 12286 |
| S1M10000013C12 | 1827 | SAU103038 | 5757 | #N/A | #N/A |
| S1M10000013D08 | 1828 | SAU101798 | 5538 | SAU1c0032_orf_18p | 12222 |
| S1M10000013D09 | 1829 | SAU102669 | 5728 | SAU1c0024_orf_7p | 12160 |
| S1M10000013D09 | 1829 | SAU302956 | 5915 | SAU3c1513_orf_9p | 13161 |
| S1M10000013D11 | 1830 | SAU102433 | 5668 | SAU1c0045_orf_37p | 12701 |
| S1M10000013E01 | 1831 | SAU102674 | 5730 | SAU1c0024_orf_12p | 12156 |
| S1M10000013E02 | 1832 | SAU101184 | 5391 | SAU1c0035_orf_80p | 12305 |
| S1M10000013E04 | 1833 | SAU101802 | 5542 | SAU1c0032_orf_22p | 12227 |
| S1M10000013E06 | 1834 | SAU101833 | 5555 | SAU1c0038_orf_34p | 12373 |
| S1M10000013E08 | 1835 | SAU100831 | 5335 | SAU1c0038_orf_93p | 12403 |
| S1M10000013E09 | 1836 | SAU101571 | 5483 | SAU1c0044_orf_210p | 12585 |
| S1M10000013E10 | 1837 | SAU101801 | 5541 | #N/A | #N/A |
| S1M10000013F02 | 1838 | SAU101570 | 5482 | SAU1c0044_orf_209p | 12584 |
| S1M10000013F03 | 1839 | SAU101907 | 5574 | SAU1c0040_orf_79p | 12442 |
| S1M10000013F06 | 1840 | SAU103038 | 5757 | #N/A | #N/A |
| S1M10000013F07 | 1841 | SAU101545 | 5474 | SAU1c0037_orf_132p | 12348 |
| S1M10000013F08 | 1842 | SAU100961 | 5360 | SAU1c0044_orf_83p | 12638 |
| S1M10000013F09 | 1843 | SAU101398 | 5442 | SAU1c0036_orf_33p | 12324 |
| S1M10000013F12 | 1844 | SAU102437 | 5670 | SAU1c0045_orf_33p | 12695 |
| S1M10000013G01 | 1845 | SAU100521 | 5283 | SAU1c0044_orf_250p | 12600 |
| S1M10000013G04 | 1846 | SAU101592 | 5490 | SAU1c0039_orf_37p | 12406 |
| S1M10000013G05 | 1847 | SAU102241 | 5617 | SAU1c0043_orf_25p | 12539 |
| S1M10000013G05 | 1847 | SAU102242 | 5618 | SAU1c0043_orf_26p | 12540 |
| S1M10000013G06 | 1848 | SAU102380 | 5654 | SAU1c0033_orf_29p | 12265 |
| S1M10000013G07 | 1849 | SAU101573 | 5485 | SAU1c0044_orf_212p | 12587 |
| S1M10000013G10 | 1850 | SAU201539 | 5821 | SAU2c0431_orf_15p | 12943 |
| S1M10000013G11 | 1851 | SAU101890 | 5570 | SAU1c0034_orf_29p | 12280 |
| S1M10000013G12 | 1852 | SAU100843 | 5339 | SAU1c0036_orf_40p | 12328 |
| S1M10000013H03 | 1853 | SAU100690 | 5309 | #N/A | #N/A |
| S1M10000013H04 | 1854 | SAU102450 | 5675 | SAU1c0045_orf_21p | 12675 |
| S1M10000013H05 | 1855 | SAU200914 | 5796 | SAU2c0373_orf_2p | 12837 |
| S1M10000013H07 | 1856 | SAU100414 | 5270 | SAU1c0022_orf_24p | 12148 |
| S1M10000013H09 | 1857 | SAU100444 | 5275 | SAU1c0038_orf_67p | 12392 |
| S1M10000013H09 | 1857 | SAU200721 | 5791 | SAU2c0339_orf_5p | 12797 |
| S1M10000013H10 | 1858 | SAU102059 | 5597 | SAU1c0034_orf_51p | 12286 |
| S1M10000013H11 | 1859 | SAU100690 | 5309 | #N/A | #N/A |
| S1M10000014A02 | 1860 | SAU200564 | 5784 | SAU2c0324_orf_6p | 12780 |
| S1M10000014A03 | 1861 | SAU101310 | 5418 | SAU1c0044_orf_125p | 12562 |
| S1M10000014A05 | 1862 | SAU101991 | 5582 | SAU1c0040_orf_94p | 12454 |
| S1M10000014A07 | 1863 | SAU101526 | 5470 | SAU1c0027_orf_32p | 12179 |
| S1M10000014A08 | 1864 | SAU103038 | 5757 | #N/A | #N/A |
| S1M10000014A11 | 1865 | SAU100866 | 5344 | SAU1c0044_orf_100p | 12553 |
| S1M10000014A12 | 1866 | SAU201571 | 5824 | SAU2c0447_orf_17p | 12997 |
| S1M10000014B01 | 1867 | SAU100547 | 5290 | SAU1c0032_orf_3p | 12240 |
| S1M10000014B02 | 1868 | SAU100432 | 5271 | SAU1c0040_orf_88p | 12450 |
| S1M10000014B02 | 1868 | SAU100433 | 5272 | SAU1c0040_orf_87p | 12449 |
| S1M10000014B03 | 1869 | SAU100414 | 5270 | SAU1c0022_orf_24p | 12148 |
| S1M10000014B04 | 1870 | SAU100778 | 5328 | SAU1c0043_orf_140p | 12514 |
| S1M10000014B05 | 1871 | SA1310476 | 5682 | SAU1c0026_orf_33p | 12175 |
| S1M10000014B06 | 1872 | SAU101199 | 5395 | SAU1c0035_orf_62p | 12302 |
| S1M10000014B07 | 1873 | SAU101756 | 5524 | SAU1c0040_orf_82p | 12445 |
| S1M10000014B08 | 1874 | SAU101752 | 5522 | SAU1c0040_orf_85p | 12447 |
| S1M10000014B10 | 1875 | SAU200006 | 5770 | SAU2c0157_orf_1p | 12723 |
| S1M10000014B11 | 1876 | SAU102534 | 5696 | #N/A | #N/A |
| S1M10000014B12 | 1877 | SAU102534 | 5696 | #N/A | #N/A |
| S1M10000014C01 | 1878 | SAU101575 | 5487 | SAU1c0044_orf_214p | 12589 |
| S1M10000014c05 | 1879 | SAU102602 | 5708 | SAU1c0032_orf_5p | 12249 |
| S1M10000014C06 | 1880 | SAU100305 | 5256 | SAU1c0038_orf_77p | 12397 |
| S1M10000014C07 | 1881 | SAU101801 | 5541 | #N/A | #N/A |
| S1M10000014C09 | 1882 | SAU100547 | 5290 | SAU1c0032_orf_3p | 12240 |
| S1M10000014C09 | 1882 | SAU102881 | 5740 | SAU1c0032_orf_4p | 12242 |
| S1M10000014C10 | 1883 | SAU302901 | 5912 | SAU3c1497_orf_8p | 13146 |
| S1M10000014C11 | 1884 | SAU100514 | 5281 | SAU1c0044_orf_57p | 12626 |
| S1M10000014C12 | 1885 | SAU101814 | 5551 | SAU1c0032_orf_32pf | 12237 |
| S1M10000014C12 | 1885 | SAU101815 | 5552 | SAU1c0032_orf_33p | 12238 |
| S1M10000014D03 | 1886 | SAU100885 | 5348 | SAU1c0038_orf_38p | 12376 |
| S1M10000014D06 | 1887 | SAU100305 | 5256 | SAU1c0038_orf_77p | 12397 |
| S1M10000014D08 | 1888 | SAU101752 | 5522 | SAU1c0040_orf_85p | 12447 |
| S1M10000014D09 | 1889 | SAU100808 | 5332 | SAU1c0037_orf_12p | 12345 |
| S1M10000014D10 | 1890 | SAU102292 | 5638 | SAU1c0038_orf_10p | 12368 |
| S1M10000014E01 | 1891 | SAU101793 | 5534 | SAU1c0032_orf_14p | 12218 |
| S1M10000014E01 | 1891 | SAU101794 | 5535 | #N/A | #N/A |
| S1M10000014E04 | 1892 | SAU100964 | 5363 | SAU1c0044_orf_86p | 12641 |
| S1M10000014E05 | 1893 | SAU101565 | 5480 | SAU1c0022_orf_8p | 12151 |
| S1M10000014E07 | 1894 | SAU100658 | 5303 | SAU1c0038_orf_59p | 12388 |
| S1M10000014E07 | 1894 | SAU100659 | 5304 | SAU1c0038_orf_60p | 12390 |
| S1M10000014E08 | 1895 | SAU202176 | 5846 | SAU2c0412_orf_3p | 12895 |
| S1M10000014E09 | 1896 | SAU102059 | 5597 | SAU1c0034_orf_51p | 12286 |
| S1M10000014E09 | 1896 | SAU300269 | 5869 | #N/A | #N/A |
| S1M10000014E10 | 1897 | SAU102453 | 5677 | SAU1c0045_orf_19p | 12669 |
| S1M10000014E12 | 1898 | SAU102284 | 5635 | SAU1c0038_orf_5p | 12389 |
| S1M10000014E12 | 1898 | SAU201469 | 5816 | SAU2c0438_orf_6p | 12967 |
| S1M10000014F02 | 1899 | SAU100128 | 5231 | #N/A | #N/A |
| S1M10000014F02 | 1899 | SAU101549 | 5476 | SAU1c0043_orf_64p | 12549 |
| S1M10000014F02 | 1899 | SAU101576 | 5488 | SAU1c0044_orf_105p | 12554 |
| S1M10000014F03 | 1900 | SAU102200 | 5611 | SAU1c0045_orf_168p | 12665 |
| S1M10000014F03 | 1900 | SAU102201 | 5612 | SAU1c0045_orf_169p | 12666 |
| S1M10000014F04 | 1901 | SAU102449 | 5674 | SAU1c0045_orf_22p | 12677 |
| S1M10000014F05 | 1902 | SAU200914 | 5796 | SAU2c0373_orf_2p | 12837 |
| S1M10000014F08 | 1903 | SAU102433 | 5668 | SAU1c0045_orf_37p | 12701 |
| S1M10000014F09 | 1904 | SAU102059 | 5597 | SAU1c0034_orf_51p | 12286 |
| S1M10000014F09 | 1904 | SAU300269 | 5869 | #N/A | #N/A |
| S1M10000014F10 | 1905 | SAU100887 | 5350 | SAU1c0018_orf_15p | 12138 |
| S1M10000014G02 | 1906 | SAU102054 | 5596 | SAU1c0039_orf_74p | 12417 |
| S1M10000014G04 | 1907 | SAU101242 | 5404 | SAU1c0044_orf_18p | 12578 |
| S1M10000014G06 | 1908 | SAU100275 | 5252 | SAU1c0036_orf_15p | 12314 |
| S1M10000014G07 | 1909 | SAU201620 | 5827 | #N/A | #N/A |
| S1M10000014G08 | 1910 | SAU100157 | 5237 | SAU1c0040_orf_81p | 12444 |
| S1M10000014G12 | 1911 | SAU102602 | 5708 | SAU1c0032_orf_5p | 12249 |
| S1M10000014H02 | 1912 | SAU100242 | 5246 | SAU1c0036_orf_5p | 12336 |
| S1M10000014H03 | 1913 | SAU102264 | 5628 | SAU1c0032_orf_60p | 12250 |
| S1M10000014H04 | 1914 | SAU100275 | 5252 | SAU1c0036_orf_15p | 12314 |
| S1M10000014H05 | 1915 | SAU102116 | 5602 | SAU1c0027_orf_5p | 12180 |
| S1M10000014H06 | 1916 | SAU100275 | 5252 | SAU1c0036_orf_15p | 12314 |
| S1M10000014H07 | 1917 | SAU103038 | 5757 | #N/A | #N/A |
| S1M10000014H08 | 1918 | SAU100157 | 5237 | SAU1c0040_orf_81p | 12444 |
| S1M10000014H11 | 1919 | SAU102534 | 5696 | #N/A | #N/A |
| S1M10000015A02 | 1920 | SAU100865 | 5343 | SAU1c0044_orf_99p | 12648 |
| S1M10000015A03 | 1921 | SAU102388 | 5655 | SAU1c0033_orf_35p | 12267 |
| S1M10000015A05 | 1922 | SAU101815 | 5552 | SAU1c0032_orf_33p | 12238 |
| S1M10000015A06 | 1923 | SAU101857 | 5560 | SAU1c0044_orf_156p | 12569 |
| S1M10000015A09 | 1924 | SAU100414 | 5270 | SAU1c0022_orf_24p | 12148 |
| S1M10000015A10 | 1925 | SAU103038 | 5757 | #N/A | #N/A |
| S1M10000015A11 | 1926 | SAU101791 | 5532 | SAU1c0032_orf_12p | 12216 |
| S1M10000015A12 | 1927 | SAU100158 | 5238 | SAU1c0040_orf_80p | 12443 |
| S1M10000015B02 | 1928 | SAU102340 | 5647 | SAU1c0045_orf_149p | 12660 |
| S1M10000015B05 | 1929 | SAU103038 | 5757 | #N/A | #N/A |
| S1M10000015B08 | 1930 | SAU101791 | 5532 | SAU1c0032_orf_12p | 12216 |
| S1M10000015B08 | 1930 | SAU101792 | 5533 | SAU1c0032_orf_13p | 12217 |
| S1M10000015B09 | 1931 | SAU102585 | 5703 | SAU1c0044_orf_289p | 12611 |
| S1M10000015B09 | 1931 | SAU201773 | 5834 | SAU2c0446_orf_4p | 12996 |
| S1M10000015B09 | 1931 | SAU302685 | 5908 | SAU3c1403_orf_1p | 13113 |
| S1M10000015B10 | 1932 | SAU102308 | 5642 | SAU1c0045_orf_50p | 12706 |
| S1M10000015C01 | 1933 | SAU100158 | 5238 | SAU1c0040_orf_80p | 12443 |
| S1M10000015C02 | 1934 | SAU102340 | 5647 | SAU1c0045_orf_149p | 12660 |
| S1M10000015C03 | 1935 | SAU102390 | 5657 | SAU1c0033_orf_38p | 12269 |
| S1M10000015C03 | 1935 | SAU201333 | 5810 | SAU2c0418_orf_8p | 12905 |
| S1M10000015C05 | 1936 | SAU100690 | 5309 | #N/A | #N/A |
| S1M10000015C06 | 1937 | SAU101815 | 5552 | SAU1c0032_orf_33p | 12238 |
| S1M10000015C08 | 1938 | SAU100133 | 5233 | SAU1c0044_orf_170p | 12574 |
| S1M10000015C08 | 1938 | SAU100323 | 5261 | SAU1c0044_orf_171p | 12575 |
| S1M10000015C10 | 1939 | SAU100414 | 5270 | SAU1c0022_orf_24p | 12148 |
| S1M10000015C12 | 1940 | SAU100305 | 5256 | SAU1c0038_orf_77p | 12397 |
| S1M10000015D02 | 1941 | SAU100794 | 5330 | SAU1c0028_orf_53p | 12189 |
| S1M10000015D03 | 1942 | SAU102032 | 5591 | SAU1c0029_orf_47p | 12198 |
| S1M10000015D04 | 1943 | SAU100131 | 5232 | SAU1c0043_orf_156p | 12517 |
| S1M10000015D05 | 1944 | SAU100793 | 5329 | SAU1c0028_orf_52p | 12188 |
| S1M10000015D06 | 1945 | SAU100736 | 5316 | SAU1c0038_orf_64p | 12391 |
| S1M10000015D12 | 1946 | SAU101814 | 5551 | SAU1c0032_orf_32p | 12237 |
| S1M10000015E02 | 1947 | SAU102390 | 5657 | SAU1c0033_orf_38p | 12269 |
| S1M10000015E02 | 1947 | SAU201333 | 5810 | SAU2c0418_orf_8p | 12905 |
| S1M10000015E03 | 1948 | SAU200468 | 5781 | SAU2c0429_orf_19p | 12937 |
| S1M10000015E06 | 1949 | SAU101320 | 5420 | SAU1c0015_orf_16p | 12128 |
| S1M10000015E07 | 1950 | SAU101545 | 5474 | SAU1c0037_orf_132p | 12348 |
| S1M10000015E09 | 1951 | SAU102433 | 5668 | SAU1c0045_orf_37p | 12701 |
| S1M10000015E10 | 1952 | SAU100114 | 5228 | SAU1c0043_orf_225p | 12535 |
| S1M10000015E11 | 1953 | SAU102286 | 5636 | SAU1c0038_orf_6p | 12393 |
| S1M10000015E11 | 1953 | SAU102287 | 5637 | SAU1c0038_orf_7p | 12398 |
| S1M10000015E12 | 1954 | SAU102352 | 5650 | SAU1c0040_orf_38p | 12434 |
| S1M10000015F01 | 1955 | SAU100123 | 5230 | SAU1c0043_orf_189p | 12526 |
| S1M10000015F01 | 1955 | SAU102001 | 5586 | SAU1c0040_orf_102p | 12424 |
| S1M10000015F01 | 1955 | SAU103159 | 5762 | SAU1c0045_orf_204p | 12670 |
| S1M10000015F01 | 1955 | SAU201827 | 5837 | SAU2c0449_orf_21p | 13002 |
| S1M10000015F02 | 1956 | SAU101561 | 5479 | SAU1c0022_orf_4p | 12149 |
| S1M10000015F03 | 1957 | SAU201403 | 5815 | SAU2c0423_orf_3p | 12913 |
| S1M10000015F04 | 1958 | SAU201403 | 5815 | SAU2c0423_orf_3p | 12913 |
| S1M10000015F06 | 1959 | SAU201385 | 5814 | #N/A | #N/A |
| S1M10000015F07 | 1960 | SAU101752 | 5522 | SAU1c0040_orf_85p | 12447 |
| S1M10000015F08 | 1961 | SAU102102 | 5600 | SAU1c0045_orf_340p | 12696 |
| S1M10000015F09 | 1962 | SAU101800 | 5540 | SAU1c0032_orf_20p | 12225 |
| S1M10000015F09 | 1962 | SAU101801 | 5541 | #N/A | #N/A |
| S1M10000015F10 | 1963 | SAU100114 | 5228 | SAU1c0043_orf_225p | 12535 |
| S1M10000015G01 | 1964 | SAU102481 | 5685 | SAU1c0039_orf_99p | 12422 |
| S1M10000015G02 | 1965 | SAU200058 | 5773 | SAU2c0134_orf_1p | 12719 |
| S1M10000015G02 | 1965 | SAU200059 | 5774 | SAU2c0134_orf_3p | 12720 |
| S1M10000015G03 | 1966 | SAU101070 | 5376 | SAU1c0034_orf_60p | 12291 |
| S1M10000015G04 | 1967 | SAU101242 | 5404 | SAU1c0044_orf_18p | 12578 |
| S1M10000015G05 | 1968 | SAU101573 | 5485 | SAU1c0044_orf_212p | 12587 |
| S1M10000015G06 | 1969 | SAU101156 | 5386 | SAU1c0036_orf_12p | 12311 |
| S1M10000015G07 | 1970 | SAU100158 | 5238 | SAU1c0040_orf_80p | 12443 |
| S1M10000015G08 | 1971 | SAU101814 | 5551 | SAU1c0032_orf_32p | 12237 |
| S1M10000015G09 | 1972 | SAU102143 | 5607 | SAU1c0041_orf_14p | 12458 |
| S1M10000015G09 | 1972 | SAU102144 | 5608 | SAU1c0041_orf_15p | 12459 |
| S1M10000015G10 | 1973 | SAU101752 | 5522 | SAU1c0040_orf_85p | 12447 |
| S1M10000015G11 | 1974 | SAU100275 | 5252 | SAU1c0036_orf_15p | 12314 |
| S1M10000015H04 | 1975 | SAU101801 | 5541 | #N/A | #N/A |
| S1M10000015H04 | 1975 | SAU101802 | 5542 | SAU1c0032_orf_22p | 12227 |
| S1M10000015H06 | 1976 | SAU201385 | 5814 | #N/A | #N/A |
| S1M10000016A03 | 1977 | SAU101803 | 5543 | SAU1c0032_orf_23p | 1228 |
| S1M10000016A03 | 1977 | SAU101804 | 5544 | #N/A | #N/A |
| S1M10000016A04 | 1978 | SAU100432 | 5271 | SAU1c0040_orf_88p | 12450 |
| S1M10000016A04 | 1978 | SAU100433 | 5272 | SAU1c0040_orf_87p | 12449 |
| S1M10000016A06 | 1979 | SAU200928 | 5798 | SAU2c0365_orf_5p | 12815 |
| S1M10000016A07 | 1980 | SAU100932 | 5356 | SAU1c0044_orf_308p | 12615 |
| S1M10000016A09 | 1981 | SAU101067 | 5375 | SAU1c0034_orf_58p | 12290 |
| S1M10000016A09 | 1981 | SAU300732 | 5877 | SAU3c1116_orf_1p | 13061 |
| S1M10000016A10 | 1982 | SAU101571 | 5483 | SAU1c0044_orf_210p | 12585 |
| S1M10000016A12 | 1983 | SAU100522 | 5284 | SAU1c0044_orf_249p | 12599 |
| S1M10000016B02 | 1984 | SAU102449 | 5674 | SAU1c0045_orf_22p | 12677 |
| S1M10000016B05 | 1985 | SAU101320 | 5420 | SAU1c0015_orf_16p | 12128 |
| S1M10000016B06 | 1986 | SAU100432 | 5271 | SAU1c0040_orf_88p | 12450 |
| S1M10000016B06 | 1986 | SAU100433 | 5272 | SAU1c0040_orf_87p | 12449 |
| S1M10000016B07 | 1987 | SAU103077 | 5759 | SAU1c0039_orf_44p | 12408 |
| S1M10000016B08 | 1988 | SAU101491 | 5464 | SAU1c0025_orf_20p | 12165 |
| S1M10000016B09 | 1989 | SAU301465 | 5896 | SAU3c1429_orf_4p | 13121 |
| S1M10000016B10 | 1990 | SAU101006 | 5367 | SAU1c0028_orf_59p | 12190 |
| S1M10000016B11 | 1991 | SAU101242 | 5404 | SAU1c0044_orf_18p | 12578 |
| S1M10000016B12 | 1992 | SAU101794 | 5535 | #N/A | #N/A |
| S1M10000016B12 | 1992 | SAU101795 | 5536 | SAU1c0032_orf_15p | 12219 |
| S1M10000016C01 | 1993 | SAU100845 | 5340 | SAU1c0036_orf_41p | 12329 |
| S1M10000016C02 | 1994 | SAU102049 | 5595 | SAU1c0039_orf_68p | 12416 |
| S1M10000016C04 | 1995 | SAU100921 | 5355 | SAU1c0038_orf_76p | 12396 |
| S1M10000016C05 | 1996 | SAU101777 | 5527 | SAU1c0037_orf_39p | 12352 |
| S1M10000016C06 | 1997 | SAU201810 | 5836 | SAU2c0308_orf_2p | 12769 |
| S1M10000016C06 | 1997 | SAU202174 | 5845 | SAU2c0412_orf_3p | 12895 |
| S1M10000016C06 | 1997 | SAU301148 | 5888 | #N/A | #N/A |
| S1M10000016C08 | 1998 | SAU101491 | 5464 | SAU1c0025_orf_20p | 12165 |
| S1M10000016C09 | 1999 | SAU102233 | 5616 | SAU1c0043_orf_20p | 12531 |
| S1M10000016C10 | 2000 | SAU201513 | 5820 | SAU2c0432_orf_10p | 12944 |
| S1M10000016C10 | 2000 | SAU203196 | 5861 | SAU2c0432_orf_11p | 12945 |
| S1M10000016C11 | 2001 | SAU101573 | 5485 | SAU1c0044_orf_212p | 12587 |
| S1M10000016C12 | 2002 | SAU101752 | 5522 | SAU1c0040_orf_85p | 12447 |
| S1M10000016D01 | 2003 | SAU102355 | 5651 | SAU1c0040_orf_40p | 12435 |
| S1M10000016D02 | 2004 | SAU200242 | 5777 | SAU2c0250_orf_2p | 12734 |
| S1M10000016D04 | 2005 | SAU100921 | 5355 | SAU1c0038_orf_76p | 12396 |
| S1M10000016D05 | 2006 | SAU100770 | 5324 | #N/A | #N/A |
| S1M10000016D06 | 2007 | SAU100952 | 5358 | SAU1c0043_orf_182p | 12523 |
| S1M10000016D08 | 2008 | SAU101070 | 5376 | SAU1c0034_orf_60p | 12291 |
| S1M10000016D09 | 2009 | SAU101868 | 5565 | SAU1c0036_orf_23p | 12320 |
| S1M10000016D10 | 2010 | SAU201513 | 5820 | SAU2c0432_orf_10p | 12944 |
| S1M10000016D10 | 2010 | SAU203196 | 5861 | SAU2c0432_orf_11p | 12945 |
| S1M10000016D11 | 2011 | SAU101573 | 5485 | SAU1c0044_orf_212p | 12587 |
| S1M10000016E04 | 2012 | SAU101371 | 5435 | SAU1c0033_orf_7p | 12275 |
| S1M10000016E05 | 2013 | SAU101320 | 5420 | SAU1c0015_orf_16p | 12128 |
| S1M10000016E06 | 2014 | SAU102639 | 5724 | #N/A | #N/A |
| S1M10000016E07 | 2015 | SAU102636 | 5722 | SAU1c0045_orf_101p | 12650 |
| S1MT0000016E07 | 2015 | SAU102637 | 5723 | SAU1c0045_orf_102p | 12651 |
| S1M10000016E08 | 2016 | SAU200928 | 5798 | SAU2c0365_orf_5p | 12815 |
| S1M10000016E09 | 2017 | SAU102527 | 5693 | SAU1c0032_orf_9p | 12260 |
| S1M10000016E10 | 2018 | SAU102983 | 5751 | SAU1c0045_orf_224p | 12676 |
| S1M10000016E11 | 2019 | SAU102281 | 5633 | SAU1c0038_orf_4p | 12384 |
| S1M10000016E12 | 2020 | SAU201571 | 5824 | SAU2c0447_orf_17p | 12997 |
| S1M10000016F02 | 2021 | SAU102113 | 5601 | SAU1c0027_orf_2p | 12178 |
| S1M10000016F02 | 2021 | SAU301223 | 5889 | SAU3c1345_orf_3p | 13090 |
| S1M10000016F03 | 2022 | SAU101864 | 5562 | SAU1c0044_orf_163p | 12572 |
| S1M10000016F05 | 2023 | SAU201168 | 5804 | SAU2c0407_orf_8p | 12889 |
| S1M10000016F06 | 2024 | SAU102407 | 5662 | #N/A | #N/A |
| S1M10000016F08 | 2025 | SAU101491 | 5464 | SAU1c0025_orf_20p | 12165 |
| S1M10000016F09 | 2026 | SAU102527 | 5693 | SAU1c0032_orf_9p | 12260 |
| S1M10000016F11 | 2027 | SAU102113 | 5601 | SAU1c0027_orf_2p | 12178 |
| S1M10000016F11 | 2027 | SAU301223 | 5889 | SAU3c1345_orf_3p | 13090 |
| S1M10000016G01 | 2028 | SAU102434 | 5669 | SAU1c0045_orf_36p | 12700 |
| S1M10000016G03 | 2029 | SAU101300 | 5415 | SAU1c0044_orf_113p | 12557 |
| S1M10000016G03 | 2029 | SAU101365 | 5432 | SAU1c0044_orf_112p | 12556 |
| S1M10000016G04 | 2030 | SAU102450 | 5675 | SAU1c0045_orf_21p | 12675 |
| S1M10000016G05 | 2031 | SAU102292 | 5638 | SAU1c0038_orf_10p | 12368 |
| S1M10000016H03 | 2032 | SAU101571 | 5483 | SAU1c0044_orf_210p | 12585 |
| S1M10000016H04 | 2033 | SAU101545 | 5474 | SAU1c0037_orf_132p | 12348 |
| S1M10000016H08 | 2034 | SAU101067 | 5375 | SAU1c0034_orf_58p | 12290 |
| S1M10000016H08 | 2034 | SAU300732 | 5877 | SAU3c1116_orf_1p | 13061 |
| S1M10000016H10 | 2035 | SAU101756 | 5524 | SAU1c0040_orf_82p | 12445 |
| S1M10000017A02 | 2036 | SAU101866 | 5564 | SAU1c0036_orf_21p | 12319 |
| S1M10000017A03 | 2037 | SAU101545 | 5474 | SAU1c0037_orf_132p | 12348 |
| S1M10000017A03 | 2037 | SAU101546 | 5475 | SAU1c0037_orf_133p | 12349 |
| S1M10000017A04 | 2038 | SAU102292 | 5638 | SAU1c0038_orf_10p | 12368 |
| S1M10000017A08 | 2039 | SAU102117 | 5603 | SAU1c0027_orf_6p | 12181 |
| S1M10000017A11 | 2040 | SAU102437 | 5670 | SAU1c0045_orf_33p | 12695 |
| S1M10000017A12 | 2041 | SAU301357 | 5893 | SAU3c1394_orf_2p | 13111 |
| S1M10000017B02 | 2042 | SAU102242 | 5618 | SAU1c0043_orf_26p | 12540 |
| S1M10000017B05 | 2043 | SAU302513 | 5906 | SAU3c1298_orf_1p | 13085 |
| S1M10000017B07 | 2044 | SAU101806 | 5546 | SAU1c0032_orf_25p | 12230 |
| S1M10000017B08 | 2045 | SAU101546 | 5475 | SAU1c0037_orf_133p | 12349 |
| S1M10000017B09 | 2046 | SAU200928 | 5798 | SAU2c0365_orf_5p | 12815 |
| S1M10000017B10 | 2047 | SAU101754 | 5523 | SAU1c0040_orf_84p | 12446 |
| S1M10000017B11 | 2048 | SAU101754 | 5523 | SAU1c0040_orf_84p | 12446 |
| S1M10000017B12 | 2049 | SAU201375 | 5811 | SAU2c0426_orf_4p | 12926 |
| S1M10000017C01 | 2050 | SAU101224 | 5397 | SAU1c0044_orf_98p | 12647 |
| S1M10000017C03 | 2051 | SAU101910 | 5576 | SAU1c0040_orf_76p | 12440 |
| S1M10000017C05 | 2052 | SAU200657 | 5789 | #N/A | #N/A |
| S1M10000017C08 | 2053 | SAU101890 | 5570 | SAU1c0034_orf_29p | 12280 |
| S1M10000017C09 | 2054 | SAU101398 | 5442 | SAU1c0036_orf_33p | 12324 |
| S1M10000017C10 | 2055 | SAU102614 | 5716 | SAU1c0041_orf_56p | 12476 |
| S1M10000017C10 | 2055 | SAU102615 | 5717 | SAU1c0041_orf_57p | 12477 |
| S1M10000017C11 | 2056 | SAU101799 | 5539 | SAU1c0032_orf_19p | 12223 |
| S1M10000017C11 | 2056 | SAU101800 | 5540 | SAU1c0032_orf_20p | 12225 |
| S1M10000017C12 | 2057 | SAU101782 | 5529 | SAU1c0037_orf_44p | 12354 |
| S1M10000017C12 | 2057 | SAU200994 | 5802 | SAU2c0428_orf_4p | 12935 |
| S1M10000017D03 | 2058 | SAU101752 | 5522 | SAU1c0040_orf_85p | 12447 |
| S1M10000017D09 | 2059 | SAU101799 | 5539 | SAU1c0032_orf_19p | 12223 |
| S1M10000017D09 | 2059 | SAU101800 | 5540 | SAU1c0032_orf_20p | 12225 |
| S1M10000017D10 | 2060 | SAU100633 | 5301 | SAU1c0043_orf_147p | 12515 |
| S1M10000017E04 | 2061 | SAU101801 | 5541 | #N/A | #N/A |
| S1M10000017E05 | 2062 | SAU102334 | 5645 | SAU1c0045_orf_144p | 12658 |
| S1M10000017E08 | 2063 | SAU101198 | 5394 | SAU1c0035_orf_61p | 12301 |
| S1M10000017E11 | 2064 | SAU102883 | 5741 | SAU1c0045_orf_38p | 12702 |
| S1M10000017F01 | 2065 | SAU100157 | 5237 | SAU1c0040_orf_81p | 12444 |
| S1M10000017F04 | 2066 | SAU100140 | 5235 | SAU1c0032_orf_7p | 12258 |
| S1M10000017F04 | 2066 | SAU100141 | 5236 | SAU1c0032_orf_8p | 12259 |
| S1M10000017F05 | 2067 | SAU102541 | 5697 | SAU1c0045_orf_195p | 12668 |
| S1M10000017F06 | 2068 | SAU102356 | 5652 | SAU1c0040_orf_41p | 12436 |
| S1M10000017F11 | 2069 | SAU101463 | 5458 | SAU1c0045_orf_232p | 12679 |
| S1M10000017G02 | 2070 | SAU102433 | 5668 | SAU1c0045_orf_37p | 12701 |
| S1M10000017G05 | 2071 | SAU102259 | 5624 | SAU1c0032_orf_55p | 12245 |
| S1M10000017G06 | 2072 | SAU200565 | 5785 | SAU2c0324_orf_7p | 12781 |
| S1M10000018A03 | 2073 | SAU100139 | 5234 | SAU1c0032_orf_6p | 12255 |
| S1M10000018A03 | 2073 | SAU102602 | 5708 | SAU1c0032_orf_5p | 12249 |
| S1M10000018A04 | 2074 | SAU102142 | 5606 | SAU1c0041_orf_13p | 12457 |
| S1M10000018A05 | 2075 | SAU100886 | 5349 | SAU1c0018_orf_16p | 12139 |
| S1M10000018A05 | 2075 | SAU100887 | 5350 | SAU1c0018_orf_15p | 12138 |
| S1M10000018A06 | 2076 | SAU100970 | 5365 | SAU1c0043_orf_197p | 12529 |
| S1M10000018A08 | 2077 | SAU100139 | 5234 | SAU1c0032_orf_6p | 12255 |
| S1M10000018A08 | 2077 | SAU102602 | 5708 | SAU1c0032_orf_5p | 12249 |
| S1M10000018A09 | 2078 | SAU102142 | 5606 | SAU1c0041_orf_13p | 12457 |
| S1M10000018A10 | 2079 | SAU100866 | 5344 | SAU1c0044_orf_100p | 12553 |
| S1M10000018A11 | 2080 | SAU100139 | 5234 | SAU1c0032_orf_6p | 12255 |
| S1M10000018A11 | 2080 | SAU102602 | 5708 | SAU1c0032_orf_5p | 12249 |
| S1M10000018B02 | 2081 | SAU100886 | 5349 | SAU1c0018_orf_16p | 12139 |
| S1M10000018B02 | 2081 | SAU100887 | 5350 | SAU1c0018_orf_15p | 12138 |
| S1M10000018B03 | 2082 | SAU101839 | 5556 | SAU1c0042_orf_12p | 12495 |
| S1M10000018B05 | 2083 | SAU100300 | 5253 | SAU1c0040_orf_90p | 12451 |
| S1M10000018B09 | 2084 | SAU100836 | 5336 | SAU1c0031_orf_13p | 12212 |
| S1M10000018B09 | 2084 | SAU202731 | 5850 | #N/A | #N/A |
| S1M10000018B10 | 2085 | SAU100401 | 5268 | SAU1c0044_orf_174p | 12576 |
| S1M10000018B10 | 2085 | SAU300335 | 5870 | #N/A | #N/A |
| S1M10000018B11 | 2086 | SAU100658 | 5303 | SAU1c0038_orf_59p | 12388 |
| S1M10000018C01 | 2087 | SAU101752 | 5522 | SAU1c0040_orf_85p | 12447 |
| S1M10000018C02 | 2088 | SAU102447 | 5672 | SAU1c0045_orf_24p | 12685 |
| S1M10000018C03 | 2089 | SAU100778 | 5328 | SAU1c0043_orf_140p | 12514 |
| S1M10000018C04 | 2090 | SAU100141 | 5236 | SAU1c0032_orf_8p | 12259 |
| S1M10000018C05 | 2091 | SAU103038 | 5757 | #N/A | #N/A |
| S1M10000018C06 | 2092 | SAU100684 | 5306 | SAU1c0044_orf_68p | 12632 |
| S1M10000018C08 | 2093 | SAU102256 | 5622 | SAU1c0032_orf_52p | 12243 |
| S1M10000018C08 | 2093 | SAU102257 | 5623 | SAU1c0032_orf_53p | 12244 |
| S1M10000018C09 | 2094 | SAU101065 | 5374 | SAU1c0034_orf_56p | 12289 |
| S1M10000018C09 | 2094 | SAU102068 | 5599 | SAU1c0034_orf_55p | 12288 |
| S1M10000018C10 | 2095 | SAU100112 | 5227 | SAU1c0044_orf_70p | 12634 |
| S1M10000018C11 | 2096 | SAU102663 | 5727 | SAU1c0024_orf_2p | 12158 |
| S1M10000018C12 | 2097 | SAU101948 | 5579 | SAU1c0045_orf_69p | 12709 |
| S1M10000018D01 | 2098 | SAU101452 | 5455 | SAU1c0045_orf_247p | 12684 |
| S1M10000018D02 | 2099 | SAU102284 | 5635 | SAU1c0038_orf_5p | 12389 |
| S1M10000018D02 | 2099 | SAU201469 | 5816 | SAU2c0438_orf_6p | 12967 |
| S1M10000018D03 | 2100 | SAU101793 | 5534 | SAU1c0032_orf_14p | 12218 |
| S1M10000018D04 | 2101 | SAU101798 | 5538 | SAU1c0032_orf_18p | 12222 |
| S1M10000018D09 | 2102 | SAU101067 | 5375 | SAU1c0034_orf_58p | 12290 |
| S1M10000018D10 | 2103 | SAU301898 | 5904 | SAU3c1079_orf_1p | 13057 |
| S1M10000018D11 | 2104 | SAU101752 | 5522 | SAU1c0040_orf_85p | 12447 |
| S1M10000018D12 | 2105 | SAU100866 | 5344 | SAU1c0044_orf_100p | 12553 |
| S1M10000018E01 | 2106 | SAU101092 | 5381 | SAU1c0028_orf_9p | 12192 |
| S1M10000018E02 | 2107 | SAU100265 | 5249 | SAU1c0014_orf_11p | 12122 |
| S1M10000018E03 | 2108 | SAU102420 | 5665 | SAU1c0030_orf_20p | 12206 |
| S1M10000018E04 | 2109 | SAU102035 | 5592 | SAU1c0029_orf_50P | 12199 |
| S1M10000018E05 | 2110 | SAU100596 | 5295 | SAU1c0043_orf_63p | 12548 |
| S1M10000018E08 | 2111 | SAU100793 | 5329 | SAU1c0028_orf_52p | 12188 |
| S1M10000018E09 | 2112 | SAU301898 | 5904 | SAU3c1079_orf_1p | 13057 |
| S1M10000018E11 | 2113 | SAU101799 | 5539 | SAU1c0032_orf_19p | 12223 |
| S1M10000018E11 | 2113 | SAU101800 | 5540 | SAU1c0032_orf_20p | 12225 |
| S1M10000018E12 | 2114 | SAU200914 | 5796 | SAU2c0373_orf_2p | 12837 |
| S1M10000018F03 | 2115 | SAU100887 | 5350 | SAU1c0018_orf_15p | 12138 |
| S1M10000018F04 | 2116 | SAU102396 | 5660 | SAU1c0033_orf_43p | 12272 |
| S1M10000018F04 | 2116 | SAU301118 | 5886 | SAU3c1305_orf_3p | 13086 |
| S1M10000018F07 | 2117 | SAU102629 | 5720 | SAU1c0041_orf_71p | 12481 |
| S1M10000018F09 | 2118 | SAU101810 | 5549 | SAU1c0032_orf_28p | 12233 |
| S1M10000018F09 | 2118 | SAU300110 | 5865 | SAU3c0533_orf_2p | 13031 |
| S1M10000018F10 | 2119 | SAU100432 | 5271 | SAU1c0040_orf_88p | 12450 |
| S1M10000018F10 | 2119 | SAU100433 | 5272 | SAU1c0040_orf_87p | 12449 |
| S1M10000018F12 | 2120 | SAU201469 | 5816 | SAU2c0438_orf_6p | 12967 |
| S1M10000018G03 | 2121 | SAU101808 | 5548 | SAU1c0032_orf_27p | 12232 |
| S1M10000018G05 | 2122 | SAU101999 | 5585 | SAU1c0040_orf_101p | 12423 |
| S1M10000018G07 | 2123 | SAU101727 | 5516 | SAU1c0016_orf_6p | 12133 |
| S1M10000018G08 | 2124 | SAU102200 | 5611 | SAU1c0045_orf_168p | 12665 |
| S1M10000018G08 | 2124 | SAU102201 | 5612 | SAU1c0045_orf_169p | 12666 |
| S1M10000018G09 | 2125 | SAU102200 | 5611 | SAU1c0045_orf_168p | 12665 |
| S1M10000018G09 | 2125 | SAU102201 | 5612 | SAU1c0045_orf_169p | 12666 |
| S1M10000018G10 | 2126 | SAU100141 | 5236 | SAU1c0032_orf_8p | 12259 |
| S1M10000018G10 | 2126 | SAU102527 | 5693 | SAU1c0032_orf_9p | 12260 |
| S1M10000018G12 | 2127 | SAU200928 | 5798 | SAU2c0365_orf_5p | 12815 |
| S1M10000018H01 | 2128 | SAU101663 | 5506 | SAU1c0033_orf_14p | 12261 |
| S1M10000018H02 | 2129 | SAU101652 | 5503 | SAU1c0042_orf_123p | 12492 |
| S1M10000018H02 | 2129 | SAU101653 | 5504 | SAU1c0042_orf_124p | 12493 |
| S1M10000018H07 | 2130 | SAU102437 | 5670 | SAU1c0045_orf_33p | 12695 |
| S1M10000018H09 | 2131 | SAU101622 | 5496 | SAU1c0040_orf_27p | 12430 |
| S1M10000018H10 | 2132 | SAU100157 | 5237 | SAU1c0040_orf_81p | 12444 |
| S1M10000019A02 | 2133 | SAU103077 | 5759 | SAU1c0039_orf_44p | 12408 |
| S1M10000019A03 | 2134 | SAU102352 | 5650 | SAU1c0400_orf_38p | 12434 |
| S1M10000019A05 | 2135 | SAU201469 | 5816 | SAU2c0438_orf_6p | 12967 |
| S1M10000019A06 | 2136 | SAU101311 | 5419 | SAU1c0044_orf_126p | 12563 |
| S1M10000019A07 | 2137 | SAU101727 | 5516 | SAU1c0016_orf_6p | 12133 |
| S1M10000019A07 | 2137 | SAU101728 | 5517 | SAU1c0016_orf_5p | 12132 |
| S1M10000019A09 | 2138 | SAU102117 | 5603 | SAU1c0027_orf_6p | 12181 |
| S1M10000019A11 | 2139 | SAU102292 | 5638 | SAU1c0038_orf_10p | 12368 |
| S1M10000019A12 | 2140 | SAU102693 | 5731 | SAU1c0044_orf_58p | 12627 |
| S1M10000019A12 | 2140 | SAU102694 | 5732 | SAU1c0044_orf_59p | 12628 |
| S1M10000019B03 | 2141 | SAU101156 | 5386 | SAU1c0036_orf_12p | 12311 |
| S1M10000019B04 | 2142 | SAU100899 | 5351 | SAU1c0034_orf_11p | 12277 |
| S1M10000019B04 | 2142 | SAU100901 | 5352 | SAU1c0034_orf_13p | 12278 |
| S1M10000019B07 | 2143 | SAU100300 | 5253 | SAU1c0040_orf_90p | 12451 |
| S1M10000019B08 | 2144 | SAU102422 | 5666 | SAU1c0030_orf_22p | 12207 |
| S1M10000019B08 | 2144 | SAU102423 | 5667 | SAU1c0030_orf_23p | 12208 |
| S1M10000019B09 | 2145 | SAU100182 | 5241 | SAU1c0037_orf_82p | 12362 |
| S1M10000019B09 | 2145 | SAU100251 | 5248 | SAU1c0037_orf_83p | 12363 |
| S1M10000019B10 | 2146 | SAU101570 | 5482 | SAU1c0044_orf_209p | 12584 |
| S1M10000019B11 | 2147 | SAU100879 | 5345 | SAU1c0041_orf_82p | 12483 |
| S1M10000019B12 | 2148 | SAU101793 | 5534 | SAU1c0032_orf_14p | 12218 |
| S1M10000019C01 | 2149 | SAU100414 | 5270 | SAU1c0022_orf_24p | 12148 |
| S1M10000019C04 | 2150 | SAU103175 | 5764 | SAU1c0045_orf_269p | 12687 |
| S1M10000019C04 | 2150 | SAU301472 | 5897 | SAU3c1431_orf_4p | 13124 |
| S1M10000019C05 | 2151 | SAU101756 | 5524 | SAU1c0040_orf_82p | 12445 |
| S1M10000019C06 | 2152 | SAU101790 | 5531 | SAU1c0032_orf_11p | 12215 |
| S1M10000019C06 | 2152 | SAU101791 | 5532 | SAU1c0032_orf_12p | 12216 |
| S1M10000019C07 | 2153 | SAU101400 | 5444 | SAU1c0036_orf_35p | 12326 |
| S1M10000019C08 | 2154 | SAU202126 | 5844 | SAU2c0045_orf_1p | 12714 |
| S1M10000019C11 | 2155 | SAU100301 | 5254 | SAU1c0040_orf_91p | 12452 |
| S1M10000019C12 | 2156 | SAU102117 | 5603 | SAU1c0027_orf_6p | 12181 |
| S1M10000019D01 | 2157 | SAU102270 | 5631 | SAU1c0032_orf_65p | 12253 |
| S1M10000019D02 | 2158 | SAU101145 | 5384 | SAU1c0035_orf_43p | 12299 |
| S1M10000019D04 | 2159 | SAU102292 | 5638 | SAU1c0038_orf_10p | 12368 |
| S1M10000019D05 | 2160 | SAU101400 | 5444 | SAU1c0036_orf_35p | 12326 |
| S1M10000019D06 | 2161 | SAU102526 | 5692 | SAU1c0045_orf_299p | 12691 |
| S1M10000019D07 | 2162 | SAU301898 | 5904 | SAU3c1079_orf_1p | 13057 |
| S1M10000019D09 | 2163 | SAU102639 | 5724 | #N/A | #N/A |
| S1M10000019D12 | 2164 | SAU101805 | 5545 | SAU1c0032_orf_24p | 12229 |
| S1M10000019E01 | 2165 | SAU100961 | 5360 | SAU1c0044_orf_83p | 12638 |
| S1M10000019E01 | 2165 | SAU100962 | 5361 | SAU1c0044_orf_84p | 12639 |
| S1M10000019E02 | 2166 | SAU101624 | 5497 | SAU1c0040_orf_25p | 12429 |
| S1M10000019E07 | 2167 | SAU102352 | 5650 | SAU1c0040_orf_38p | 12434 |
| S1M10000019F01 | 2168 | SAU102241 | 5617 | SAU1c0043_orf_25p | 12539 |
| S1M10000019F05 | 2169 | SAU101612 | 5493 | SAU1c0044_orf_7p | 12637 |
| S1M10000019F05 | 2169 | SAU202945 | 5857 | SAU2c0394_orf_7p | 12868 |
| S1M10000019F06 | 2170 | SAU101864 | 5562 | SAU1c0044_orf_163p | 12572 |
| S1M10000019F08 | 2171 | SAU101571 | 5483 | SAU1c0044_orf_210p | 12585 |
| S1M10000019F09 | 2172 | SAU100414 | 5270 | SAU1c0022_orf_24p | 12148 |
| S1M10000019F11 | 2173 | SAU101242 | 5404 | SAU1c0044_orf_18p | 12578 |
| S1M10000019G04 | 2174 | SAU101793 | 5534 | SAU1c0032_orf_14p | 12218 |
| S1M10000019G07 | 2175 | SAU100522 | 5284 | SAU1c0044_orf_249p | 12599 |
| S1M10000019G09 | 2176 | SAU100300 | 5253 | SAU1c0040_orf_90p | 12451 |
| S1M10000019G10 | 2177 | SAU101235 | 5400 | SAU1c0044_orf_11p | 12561 |
| S1M10000019G10 | 2177 | SAU101236 | 5401 | SAU1c0044_orf_12p | 12564 |
| S1M10000019G11 | 2178 | SAU101802 | 5542 | SAU1c0032_orf_22p | 12227 |
| S1M10000019H05 | 2179 | SAU101802 | 5542 | SAU1c0032_orf_22p | 12227 |
| S1M10000019H05 | 2179 | SAU101803 | 5543 | SAU1c0032_orf_23p | 1228 |
| S1M10000019H08 | 2180 | SAU102449 | 5674 | SAU1c0045_orf_22p | 12677 |
| S1M10000020A05 | 2181 | SAU101868 | 5565 | SAU1c0036_orf_23p | 12320 |
| S1M10000020A06 | 2182 | SAU101801 | 5541 | #N/A | #N/A |
| S1M10000020A07 | 2183 | SAU101567 | 5481 | SAU1c0022_orf_10p | 12144 |
| S1M10000020A07 | 2183 | SAU200030 | 5772 | SAU2c0282_orf_3p | 12745 |
| S1M10000020A11 | 2184 | SAU102437 | 5670 | SAU1c0045_orf_33p | 12695 |
| S1M10000020A12 | 2185 | SAU101907 | 5574 | SAU1c0040_orf_79p | 12442 |
| 51M10000020B02 | 2186 | SAU100475 | 5276 | SAU1c0036_orf_61p | 12337 |
| S1M10000020B03 | 2187 | SAU100059 | 5224 | SAU1c0045_orf_10p | 12652 |
| S1M10000020B05 | 2188 | SAU301133 | 5887 | SAU3c1311_orf_3p | 13087 |
| S1M10000020B06 | 2189 | SAU100747 | 5320 | SAU1c0044_orf_235p | 12597 |
| S1M10000020B07 | 2190 | SAU102433 | 5668 | SAU1c0045_orf_37p | 12701 |
| S1M10000020B09 | 2191 | SAU101371 | 5435 | SAU1c0033_orf_7p | 12275 |
| S1M10000020B12 | 2192 | SAU102143 | 5607 | SAU1c0041_orf_14p | 12458 |
| S1M10000020C09 | 2193 | SAU101545 | 5474 | SAU1c0037_orf_132p | 12348 |
| S1M10000020C10 | 2194 | SAU101799 | 5539 | SAU1c0032_orf_19p | 12223 |
| S1M10000020C10 | 2194 | SAU101800 | 5540 | SAU1c0032_orf_20p | 12225 |
| S1M10000020C11 | 2195 | SAU101452 | 5455 | SAU1c0045_orf_247p | 12684 |
| S1M10000020D03 | 2196 | SAU101752 | 5522 | SAU1c0040_orf_85p | 12447 |
| S1M10000020D04 | 2197 | SAU102481 | 5685 | SAU1c0039_orf_99p | 12422 |
| S1M10000020D06 | 2198 | SAU102578 | 5701 | SAU1c0039_orf_61p | 12411 |
| S1M10000020D07 | 2199 | SAU100198 | 5243 | SAU1c0009_orf_1p | 12120 |
| S1M10000020D08 | 2200 | SAU100547 | 5290 | SAU1c0032_orf_3p | 12240 |
| S1M10000020D09 | 2201 | SAU102939 | 5747 | #N/A | #N/A |
| S1M10000020D12 | 2202 | SAU200006 | 5770 | SAU2c0157_orf_1p | 12723 |
| S1M10000020E01 | 2203 | SAU200006 | 5770 | SAU2c0157_orf_1p | 12723 |
| S1M10000020E03 | 2204 | SAU100140 | 5235 | SAU1c0032_orf_7p | 12258 |
| S1M10000020E04 | 2205 | SAU101805 | 5545 | SAU1c0032_orf_24p | 12229 |
| S1M10000020E06 | 2206 | SAU102162 | 5609 | SAU1c0041_orf_27p | 12462 |
| S1M10000020E08 | 2207 | SAU101756 | 5524 | SAU1c0040_orf_82p | 12445 |
| S1M10000020E11 | 2208 | SAU101876 | 5567 | SAU1c0025_orf_9p | 12169 |
| S1M10000020E12 | 2209 | SAU200657 | 5789 | #N/A | #N/A |
| S1M10000020F01 | 2210 | SAU101592 | 5490 | SAU1c0039_orf_37p | 12406 |
| S1M10000020F05 | 2211 | SAU100547 | 5290 | SAU1c0032_orf_3p | 12240 |
| S1M10000020F06 | 2212 | SAU101652 | 5503 | SAU1c0042_orf_123p | 12492 |
| S1M10000020F06 | 2212 | SAU101653 | 5504 | SAU1c0042_orf_124p | 12493 |
| S1M10000020F07 | 2213 | SAU200731 | 5793 | SAU2c0352_orf_2p | 12808 |
| S1M10000020F09 | 2214 | SAU100114 | 5228 | SAU1c0043_orf_225p | 12535 |
| S1M10000020F11 | 2215 | SAU101663 | 5506 | SAU1c0033_orf_14p | 12261 |
| S1M10000020F11 | 2215 | SAU101664 | 5507 | SAU1c0033_orf_15p | 12262 |
| S1M10000020F12 | 2216 | SAU100745 | 5319 | SAU1c0044_orf_233p | 12596 |
| S1M10000020G01 | 2217 | SAU102905 | 5742 | SAU1c0033_orf_45p | 12273 |
| S1M10000020G05 | 2218 | SAU100114 | 5228 | SAU1c0043_orf_225p | 12535 |
| S1M10000020G07 | 2219 | SAU100114 | 5228 | SAU1c0043_orf_225p | 12535 |
| S1M10000020G08 | 2220 | SAU101652 | 5503 | SAU1c0042_orf_123p | 12492 |
| S1M10000020G09 | 2221 | SAU101652 | 5503 | SAU1c0042_orf_123p | 12492 |
| S1M10000020G10 | 2222 | SAU101807 | 5547 | SAU1c0032_orf_26p | 12231 |
| S1M10000020G10 | 2222 | SAU101808 | 5548 | SAU1c0032_orf_27p | 12232 |
| S1M10000020G11 | 2223 | SAU101592 | 5490 | SAU1c0039_orf_37p | 12406 |
| S1M10000020G12 | 2224 | SAU100865 | 5343 | SAU1c0044_orf_99p | 12648 |
| S1M10000020H01 | 2225 | SAU202039 | 5843 | SAU2c0452_orf_20p | 13009 |
| S1M10000020H02 | 2226 | SAU101754 | 5523 | SAU1c0040_orf_84p | 12446 |
| S1M10000020H04 | 2227 | SAU101791 | 5532 | SAU1c0032_orf_12p | 12216 |
| S1M10000020H06 | 2228 | SAU101541 | 5472 | SAU1c0037_orf_128p | 12344 |
| S1M10000020H08 | 2229 | SAU201558 | 5823 | SAU2c0434_orf_5p | 12954 |
| S1M10000020H10 | 2230 | SAU101754 | 5523 | SAU1c0040_orf_84p | 12446 |
| S1M10000020H11 | 2231 | SAU100053 | 5222 | SAU1c0020_orf_1p | 12143 |
| S1M10000021A04 | 2232 | SAU200752 | 5795 | SAU2c0354_orf_5p | 12809 |
| S1M10000021A04 | 2232 | SAU300975 | 5880 | SAU3c1240_orf_3p | 13075 |
| S1M10000021A05 | 2233 | SAU101408 | 5445 | SAU1c0035_orf_93p | 12308 |
| S1M10000021A06 | 2234 | SAU200928 | 5798 | SAU2c0365_orf_5p | 12815 |
| S1M10000021A07 | 2235 | SAU100496 | 5279 | SAU1c0041_orf_83p | 12484 |
| S1M10000021A07 | 2235 | SAU301004 | 5882 | SAU3c1255_orf_1p | 13079 |
| S1M10000021A08 | 2236 | SAU101183 | 5390 | SAU1c0035_orf_79p | 12304 |
| S1M10000021A09 | 2237 | SAU102933 | 5744 | SAU1c0039_orf_62p | 12412 |
| S1M10000021A09 | 2237 | SAU201184 | 5805 | SAU2c0351_orf_19p | 12807 |
| S1M10000021A10 | 2238 | SAU101545 | 5474 | SAU1c0037_orf_132p | 12348 |
| S1M10000021B05 | 2239 | SAU100139 | 5234 | SAU1c0032_orf_6p | 12255 |
| S1M10000021B05 | 2239 | SAU102602 | 5708 | SAU1c0032_orf_5p | 12249 |
| S1M10000021B06 | 2240 | SAU101752 | 5522 | SAU1c0040_orf_85p | 12447 |
| S1M1000001307 | 2241 | SAU101632 | 5499 | SAU1c0039_orf_3p | 12407 |
| S1M10000021B10 | 2242 | SAU101772 | 5526 | SAU1c0037_orf_34p | 12351 |
| S1M10000021C04 | 2243 | SAU200928 | 5798 | SAU2c0365_orf_5p | 12815 |
| S1M10000021C05 | 2244 | SAU101271 | 5411 | SAU1c0037_orf_90p | 12366 |
| S1M10000021C07 | 2245 | SAU202968 | 5858 | SAU2c0407_orf_2p | 12886 |
| S1M10000021C08 | 2246 | SAU102575 | 5700 | SAU1c0044_orf_283p | 12609 |
| S1M10000021C10 | 2247 | SAU101320 | 5420 | SAU1c0015_orf_16p | 12128 |
| S1M10000021C11 | 2248 | SAU200006 | 5770 | SAU2c0157_orf_1p | 12723 |
| S1M10000021C12 | 2249 | SAU101726 | 5515 | SAU1c0016_orf_7p | 12134 |
| S1M10000021D01 | 2250 | SAU102503 | 5691 | SAU1c0045_orf_274p | 12690 |
| S1M10000021D03 | 2251 | SAU101271 | 5411 | SAU1c0037_orf_90p | 12366 |
| S1M10000021D03 | 2251 | SAU101286 | 5413 | SAU1c0034_orf_67p | 12292 |
| S1M10000021D04 | 2252 | SAU100858 | 5341 | SAU1c0038_orf_86p | 12401 |
| S1M10000021D04 | 2252 | SAU100859 | 5342 | SAU1c0038_orf_87p | 12402 |
| S1M10000021D06 | 2253 | SAU100865 | 5343 | SAU1c0044_orf_99p | 12648 |
| S1M10000021D09 | 2254 | SAU101868 | 5565 | SAU1c0036_orf_23p | 12320 |
| S1M10000021D10 | 2255 | SAU100714 | 5312 | SAU1c0044_orf_74p | 12635 |
| S1M10000021E01 | 2256 | SAU101655 | 5505 | SAU1c0042_orf_125p | 12494 |
| S1M10000021E02 | 2257 | SAU102200 | 5611 | SAU1c0045_orf_168p | 12665 |
| S1M10000021E02 | 2257 | SAU102201 | 5612 | SAU1c0045_orf_169p | 12666 |
| S1M10000021E03 | 2258 | SAU101857 | 5560 | SAU1c0044_orf_156p | 12569 |
| S1M10000021E05 | 2259 | SAU101777 | 5527 | SAU1c0037_orf_39p | 12352 |
| S1M10000021E06 | 2260 | SAU102663 | 5727 | SAU1c0024_orf_2p | 12158 |
| S1M10000021E09 | 2261 | SAU200006 | 5770 | SAU2c0157_orf_1p | 12723 |
| S1M10000021E12 | 2262 | SAU102292 | 5638 | SAU1c0038_orf_10p | 12368 |
| S1M10000021F02 | 2263 | SAU102059 | 5597 | SAU1c0034_orf_51p | 12286 |
| S1M10000021F04 | 2264 | SAU100139 | 5234 | SAU1c0032_orf_6p | 12255 |
| S1M10000021F04 | 2264 | SAU102602 | 5708 | SAU1c0032_orf_5p | 12249 |
| S1M10000021F05 | 2265 | SAU102059 | 5597 | SAU1c0034_orf_51p | 12286 |
| S1M10000021F06 | 2266 | SAU101235 | 5400 | SAU1c0044_orf_11p | 12561 |
| S1M10000021F07 | 2267 | SAU101383 | 5438 | SAU1c0022_orf_20p | 12147 |
| S1M10000021F09 | 2268 | SAU102059 | 5597 | SAU1c0034_orf_51p | 12286 |
| S1M10000021F09 | 2268 | SAU301465 | 5896 | SAU3c1429_orf_4p | 13121 |
| S1M10000021F11 | 2269 | SAU101371 | 5435 | SAU1c0033_orf_7p | 12275 |
| S1M10000021G01 | 2270 | SAU200468 | 5781 | SAU2c0429_orf_19p | 12937 |
| S1M10000021G03 | 2271 | SAU301357 | 5893 | SAU3c1394_orf_2p | 13111 |
| S1M10000021G08 | 2272 | SAU100714 | 5312 | SAU1c0044_orf_74p | 12635 |
| S1M10000021H04 | 2273 | SAU100139 | 5234 | SAU1c0032_orf_6p | 12255 |
| S1M10000021H04 | 2273 | SAU102602 | 5708 | SAU1c0032_orf_5p | 12249 |
| S1M10000021H05 | 2274 | SAU300131 | 5866 | SAU3c0560_orf_2p | 13034 |
| S1M10000021H07 | 2275 | SAU101806 | 5546 | SAU1c0032_orf_25p | 12230 |
| S1M10000021H08 | 2276 | SAU102059 | 5597 | SAU1c0034_orf_51p | 12286 |
| S1M10000021H11 | 2277 | SAU101543 | 5473 | SAU1c0037_orf_130p | 12346 |
| S1M10000022A02 | 2278 | SAU100865 | 5343 | SAU1c0044_orf_99p | 12648 |
| S1M10000022A02 | 2278 | SAU301230 | 5890 | SAU3c1347_orf_6p | 13092 |
| S1M10000022A03 | 2279 | SAU201197 | 5806 | SAU2c0429_orf_2p | 12938 |
| S1M10000022A05 | 2280 | SAU101807 | 5547 | SAU1c0032_orf_26p | 12231 |
| S1M10000022A08 | 2281 | SAU101365 | 5432 | SAU1c0044_orf_112p | 12556 |
| S1M10000022A09 | 2282 | SAU102939 | 5747 | #N/A | #N/A |
| S1M10000022A12 | 2283 | SAU101868 | 5565 | SAU1c0036_orf_23p | 12320 |
| S1M10000022B02 | 2284 | SAU100865 | 5343 | SAU1c0044_orf_99p | 12648 |
| S1M10000022B02 | 2284 | SAU301230 | 5890 | SAU3c1347_orf_6p | 13092 |
| S1M10000022B03 | 2285 | SAU200468 | 5781 | SAU2c0429_orf_19p | 12937 |
| S1M10000022B05 | 2286 | SAU100920 | 5354 | SAU1c0038_orf_75p | 12395 |
| S1M10000022B06 | 2287 | SAU100714 | 5312 | SAU1c0044_orf_74p | 12635 |
| S1M10000022B08 | 2288 | SAU102292 | 5638 | SAU1c0038_orf_10p | 12368 |
| S1M10000022B09 | 2289 | SAU102939 | 5747 | #N/A | #N/A |
| S1M10000022B10 | 2290 | SAU101546 | 5475 | SAU1c0037_orf_133p | 12349 |
| S1M10000022B11 | 2291 | SAU101726 | 5515 | SAU1c0016_orf_7p | 12134 |
| S1M10000022B12 | 2292 | SAU101868 | 5565 | SAU1c0036_orf_23p | 12320 |
| S1M10000022C02 | 2293 | SAU102059 | 5597 | SAU1c0034_orf_51p | 12286 |
| S1M10000022C03 | 2294 | SAU101791 | 5532 | SAU1c0032_orf_12p | 12216 |
| S1M10000022C04 | 2295 | SAU100714 | 5312 | SAU1c0044_orf_74p | 12635 |
| S1M10000022C06 | 2296 | SAU100246 | 5247 | SAU1c0042_orf_130p | 12496 |
| S1M10000022C06 | 2296 | SAU300998 | 5881 | SAU3c1253_orf_3p | 13077 |
| S1M10000022C07 | 2297 | SAU101546 | 5475 | SAU1c0037_orf_133p | 12349 |
| S1M10000022C08 | 2298 | SAU100528 | 5286 | SAU1c0042_orf_87p | 12507 |
| S1M10000022C08 | 2298 | SAU103115 | 5760 | SAU1c0042_orf_88p | 12508 |
| S1M10000022C11 | 2299 | SAU102059 | 5597 | SAU1c0034_orf_51p | 12286 |
| S1M10000022D03 | 2300 | SAU101805 | 5545 | SAU1c0032_orf_24p | 12229 |
| S1M10000022D05 | 2301 | SAU101777 | 5527 | SAU1c0037_orf_39p | 12352 |
| S1M10000022D06 | 2302 | SAU100921 | 5355 | SAU1c0038_orf_76p | 12396 |
| S1M10000022D07 | 2303 | SAU101543 | 5473 | SAU1c0037_orf_130p | 12346 |
| S1M10000022D08 | 2304 | SAU101189 | 5392 | SAU1c0033_orf_25p | 12264 |
| S1M10000022D09 | 2305 | SAU101726 | 5515 | SAU1c0016_orf_7p | 12134 |
| S1M10000022D11 | 2306 | SAU101447 | 5454 | SAU1c0045_orf_244p | 12683 |
| S1M10000022E01 | 2307 | SAU200601 | 5787 | #N/A | #N/A |
| S1M10000022E03 | 2308 | SAU200468 | 5781 | SAU2c0429_orf_19p | 12937 |
| S1M10000022E05 | 2309 | SAU301465 | 5896 | SAU3c1429_orf_4p | 13121 |
| S1M10000022E09 | 2310 | SAU101235 | 5400 | SAU1c0044_orf_11p | 12561 |
| S1M10000022E09 | 2310 | SAU101236 | 5401 | SAU1c0044_orf_12p | 12564 |
| S1M10000022F04 | 2311 | SAU101592 | 5490 | SAU1c0039_orf_37p | 12406 |
| S1M10000022F06 | 2312 | SAU101868 | 5565 | SAU1c0036_orf_23p | 12320 |
| S1M10000022F07 | 2313 | SAU102117 | 5603 | SAU1c0027_orf_6p | 12181 |
| S1M10000022F08 | 2314 | SAU100414 | 5270 | SAU1c0022_orf_24p | 12148 |
| S1M10000022F11 | 2315 | SAU101592 | 5490 | SAU1c0039_orf_37p | 12406 |
| S1M10000022G03 | 2316 | SAU301465 | 5896 | SAU3c1429_orf_4p | 13121 |
| S1M10000022G04 | 2317 | SAU101777 | 5527 | SAU1c0037_orf_39p | 12352 |
| S1M10000022G07 | 2318 | SAU100414 | 5270 | SAU1c0022_orf_24p | 12148 |
| S1M10000022G08 | 2319 | SAU100557 | 5291 | SAU1c0044_orf_132p | 12565 |
| S1M10000022G12 | 2320 | SAU101546 | 5475 | SAU1c0037_orf_133p | 12349 |
| S1M10000022H03 | 2321 | SAU101006 | 5367 | SAU1c0028_orf_59p | 12190 |
| S1M10000022H05 | 2322 | SAU101814 | 5551 | SAU1c0032_orf_32p | 12237 |
| S1M10000022H06 | 2323 | SAU200928 | 5798 | SAU2c0365_orf_5p | 12815 |
| S1M10000022H07 | 2324 | SAU100866 | 5344 | SAU1c0044_orf_100p | 12553 |
| S1M10000022H08 | 2325 | SAU100887 | 5350 | SAU1c0018_orf_15p | 12138 |
| S1M10000022H11 | 2326 | SAU101610 | 5492 | SAU1c0044_orf_5p | 12629 |
| S1M10000023A05 | 2327 | SAU301465 | 5896 | SAU3c1429_orf_4p | 13121 |
| S1M10000023A09 | 2328 | SAU101340 | 5423 | SAU1c0038_orf_82p | 12400 |
| S1M10000023A11 | 2329 | SAU100547 | 5290 | SAU1c0032_orf_3p | 12240 |
| S1M10000023A12 | 2330 | SAU101651 | 5502 | SAU1c0042_orf_122p | 12491 |
| S1M10000023A12 | 2330 | SAU101652 | 5503 | SAU1c0042_orf_123p | 12492 |
| S1M10000023B01 | 2331 | SAU100886 | 5349 | SAU1c0018_orf_16p | 12139 |
| S1M10000023B03 | 2332 | SAU101652 | 5503 | SAU1c0042_orf_123p | 12492 |
| S1M10000023B03 | 2332 | SAU101653 | 5504 | SAU1c0042_orf_124p | 12493 |
| S1M10000023B07 | 2333 | SAU101857 | 5560 | SAU1c0044_orf_156p | 12569 |
| S1M10000023B08 | 2334 | SAU100140 | 5235 | SAU1c0032_orf_7p | 12258 |
| S1M10000023B08 | 2334 | SAU100141 | 5236 | SAU1c0032_orf_8p | 12259 |
| S1M10000023B09 | 2335 | SAU101340 | 5423 | SAU1c0038_orf_82p | 12400 |
| S1M10000023B10 | 2336 | SAU102578 | 5701 | SAU1c0039_orf_61p | 12411 |
| S1M10000023B11 | 2337 | SAU102613 | 5715 | SAU1c0041_orf_55p | 12475 |
| S1M10000023B12 | 2338 | SAU202174 | 5845 | SAU2c0412_orf_3p | 12895 |
| S1M10000023B12 | 2338 | SAU301148 | 5888 | #N/A | #N/A |
| S1M10000023C02 | 2339 | SAU100140 | 5235 | SAU1c0032_orf_7p | 12258 |
| S1M10000023C02 | 2339 | SAU100141 | 5236 | SAU1c0032_orf_8p | 12259 |
| S1M10000023C10 | 2340 | SAU102554 | 5699 | SAU1c0045_orf_209p | 12673 |
| S1M10000023C11 | 2341 | SAU102352 | 5650 | SAU1c0040_orf_38p | 12434 |
| S1M10000023C12 | 2342 | SAU100077 | 5226 | SAU1c0043_orf_178p | 12520 |
| S1M10000023D01 | 2343 | SAU100964 | 5363 | SAU1c0044_orf_86p | 12641 |
| S1M10000023D03 | 2344 | SAU101996 | 5584 | SAU1c0040_orf_99p | 12456 |
| S1M10000023D04 | 2345 | SAU102602 | 5708 | SAU1c0032_orf_5p | 12249 |
| S1M10000023D07 | 2346 | SAU101543 | 5473 | SAU1c0037_orf_130p | 12346 |
| S1M10000023D08 | 2347 | SAU100887 | 5350 | SAU1c0018_orf_15p | 12138 |
| S1M10000023D09 | 2348 | SAU100547 | 5290 | SAU1c0032_orf_3p | 12240 |
| S1M10000023D10 | 2349 | SAU100963 | 5362 | SAU1c0044_orf_85p | 12640 |
| S1M10000023D12 | 2350 | SAU102292 | 5638 | SAU1c0038_orf_10p | 12368 |
| S1M10000023E01 | 2351 | SAU101752 | 5522 | SAU1c0040_orf_85p | 12447 |
| S1M10000023E04 | 2352 | SAU102059 | 5597 | SAU1c0034_orf_51p | 12286 |
| S1M10000023E07 | 2353 | SAU101543 | 5473 | SAU1c0037_orf_130p | 12346 |
| S1M10000023E10 | 2354 | SAU203293 | 5862 | SAU2c0441_orf_21p | 12979 |
| S1M10000023E11 | 2355 | SAU102292 | 5638 | SAU1c0038_orf_10p | 12368 |
| S1M10000023F04 | 2356 | SAU101736 | 5518 | SAU1c0043_orf_166p | 12519 |
| S1M10000023F04 | 2356 | SAU101737 | 5519 | SAU1c0043_orf_165p | 12518 |
| S1M10000023F07 | 2357 | SAU100546 | 5289 | SAU1c0032_orf_2p | 12235 |
| S1M10000023F08 | 2358 | SAU102883 | 5741 | SAU1c0045_orf_38p | 12702 |
| S1M10000023F10 | 2359 | SAU102352 | 5650 | SAU1c0040_orf_38p | 12434 |
| S1M10000023F11 | 2360 | SAU100617 | 5300 | SAU1c0035_orf_102p | 12295 |
| S1M10000023F12 | 2361 | SAU102352 | 5650 | SAU1c0040_orf_38p | 12434 |
| S1M10000023G02 | 2362 | SAU301465 | 5896 | SAU3c1429_orf_4p | 13121 |
| S1M10000023G03 | 2363 | SAU101996 | 5584 | SAU1c0040_orf_99p | 12456 |
| S1M10000023G06 | 2364 | SAU100887 | 5350 | SAU1c0018_orf_15p | 12138 |
| S1M10000023G07 | 2365 | SAU301054 | 5884 | #N/A | #N/A |
| S1M10000023G08 | 2366 | SAU100964 | 5363 | SAU1c0044_orf_86p | 12641 |
| S1M10000023G09 | 2367 | SAU101968 | 5581 | SAU1c0028_orf_43p | 12187 |
| S1M10000023G11 | 2368 | SAU102613 | 5715 | SAU1c0041_orf_55p | 12475 |
| S1M10000023H02 | 2369 | SAU101996 | 5584 | SAU1c0040_orf_99p | 12456 |
| S1M10000023H06 | 2370 | SAU100158 | 5238 | SAU1c0040_orf_80p | 12443 |
| S1M10000023H07 | 2371 | SAU100300 | 5253 | SAU1c0040_orf_90p | 12451 |
| S1M10000023H09 | 2372 | SAU101340 | 5423 | SAU1c0038_orf_82p | 12400 |
| S1M10000023H10 | 2373 | SAU101365 | 5432 | SAU1c0044_orf_112p | 12556 |
| S1M10000024A02 | 2374 | SAU101798 | 5538 | SAU1c0032_orf_18p | 12222 |
| S1M10000024A04 | 2375 | SAU201571 | 5824 | SAU2c0447_orf_17p | 12997 |
| S1M10000024A07 | 2376 | SAU100414 | 5270 | SAU1c0022_orf_24p | 12148 |
| S1M10000024A08 | 2377 | SAU101231 | 5399 | SAU1c0035_orf_6p | 12303 |
| S1M10000024A11 | 2378 | SAU103226 | 5768 | SAU1c0045_orf_95p | 12713 |
| S1M10000024B05 | 2379 | SAU102418 | 5664 | SAU1c0030_orf_18p | 12205 |
| S1M10000024B06 | 2380 | SAU100158 | 5238 | SAU1c0040_orf_80p | 12443 |
| S1M10000024B08 | 2381 | SAU100601 | 5296 | SAU1c0044_orf_313p | 12616 |
| S1M10000024B09 | 2382 | SAU200468 | 5781 | SAU2c0429_orf_19p | 12937 |
| S1M10000024B10 | 2383 | SAU101265 | 5407 | #N/A | #N/A |
| S1M10000024C02 | 2384 | SAU101197 | 5393 | SAU1c0035_orf_60p | 12300 |
| S1M10000024C04 | 2385 | SAU101862 | 5561 | SAU1c0044_orf_161p | 12571 |
| S1M10000024C07 | 2386 | SAU101039 | 5373 | SAU1c0043_orf_181p | 12522 |
| S1M10000024D02 | 2387 | SAU100414 | 5270 | SAU1c0022_orf_24p | 12148 |
| S1M10000024D03 | 2388 | SAU100714 | 5312 | SAU1c0044_orf_74p | 12635 |
| S1M10000024D10 | 2389 | SAU100140 | 5235 | SAU1c0032_orf_7p | 12258 |
| S1M10000024D10 | 2389 | SAU100141 | 5236 | SAU1c0032_orf_8p | 12259 |
| S1M10000024D11 | 2390 | SAU101198 | 5394 | SAU1c0035_orf_61p | 12301 |
| S1M10000024E03 | 2391 | SAU201571 | 5824 | SAU2c0447_orf_17p | 12997 |
| S1M10000024E05 | 2392 | SAU101800 | 5540 | SAU1c0032_orf_20p | 12225 |
| S1M10000024E05 | 2392 | SAU101801 | 5541 | #N/A | #N/A |
| S1M10000024E06 | 2393 | SAU102418 | 5664 | SAU1c0030_orf_18p | 12205 |
| S1M10000024E07 | 2394 | SAU101039 | 5373 | SAU1c0043_orf_181p | 12522 |
| S1M10000024E08 | 2395 | SAU100414 | 5270 | SAU1c0022_orf_24p | 12148 |
| S1M10000024F02 | 2396 | SAU101447 | 5454 | SAU1c0045_orf_244p | 12683 |
| S1M10000024F03 | 2397 | SAU102992 | 5752 | SAU1c0044_orf_60p | 12630 |
| S1M10000024F05 | 2398 | SAU201197 | 5806 | SAU2c0429_orf_2p | 12938 |
| S1M10000024F08 | 2399 | SAU101726 | 5515 | SAU1c0016_orf_7p | 12134 |
| S1M10000024F10 | 2400 | SAU200468 | 5781 | SAU2c0429_orf_19p | 12937 |
| S1M10000024G05 | 2401 | SAU101800 | 5540 | SAU1c0032_orf_20p | 12225 |
| S1M10000024G05 | 2401 | SAU101801 | 5541 | #N/A | #N/A |
| S1M10000024G06 | 2402 | SAU102418 | 5664 | SAU1c0030_orf_18p | 12205 |
| S1M10000024G07 | 2403 | SAU102334 | 5645 | SAU1c0045_orf_144p | 12658 |
| S1M10000024G08 | 2404 | SAU101632 | 5499 | SAU1c0039_orf_3p | 12407 |
| S1M10000024G10 | 2405 | SAU202176 | 5846 | SAU2c0412_orf_3p | 12895 |
| S1M10000024G12 | 2406 | SAU100141 | 5236 | SAU1c0032_orf_8p | 12259 |
| S1M10000024H02 | 2407 | SAU201571 | 5824 | SAU2c0447_orf_17p | 12997 |
| S1M10000024H04 | 2408 | SAU100770 | 5324 | #N/A | #N/A |
| S1M10000024H07 | 2409 | SAU200725 | 5792 | SAU2c0428_orf_20p | 12933 |
| S1M10000024H08 | 2410 | SAU102002 | 5587 | SAU1c0040_orf_103p | 12425 |
| S1M10000024H08 | 2410 | SAU102003 | 5588 | SAU1c0040_orf_104p | 12426 |
| S1M10000025A03 | 2411 | SAU101247 | 5405 | SAU1c0043_orf_136p | 12512 |
| S1M10000025A08 | 2412 | SAU102766 | 5735 | #N/A | #N/A |
| S1M10000025A08 | 2412 | SAU201236 | 5808 | SAU2c0409_orf_10p | 12891 |
| S1M10000025A08 | 2412 | SAU300338 | 5871 | #N/A | #N/A |
| S1M10000025A09 | 2413 | SAU102292 | 5638 | SAU1c0038_orf_10p | 12368 |
| S1M10000025A10 | 2414 | SAU101455 | 5456 | SAU1c0045_orf_250p | 12686 |
| S1M10000025A10 | 2414 | SAU200916 | 5797 | SAU2c0373_orf_4p | 12838 |
| S1M10000025A10 | 2414 | SAU301620 | 5899 | SAU3c1478_orf_2p | 13140 |
| S1M10000025B01 | 2415 | SAU101655 | 5505 | SAU1c0042_orf_125p | 12494 |
| S1M10000025B02 | 2416 | SAU101808 | 5548 | SAU1c0032_orf_27p | 12232 |
| S1M10000025B03 | 2417 | SAU101385 | 5439 | SAU1c0038_orf_50p | 12385 |
| S1M10000025B05 | 2418 | SAU101455 | 5456 | SAU1c0045_orf_250p | 12686 |
| S1M10000025B05 | 2418 | SAU200916 | 5797 | SAU2c0373_orf_4p | 12838 |
| S1M10000025B05 | 2418 | SAU301620 | 5899 | SAU3c1478_orf_2p | 13140 |
| S1M10000025B06 | 2419 | SAU101545 | 5474 | SAU1c0037_orf_132p | 12348 |
| S1M10000025B09 | 2420 | SAU200928 | 5798 | SAU2c0365_orf_5p | 12815 |
| S1M10000025B12 | 2421 | SAU101791 | 5532 | SAU1c0032_orf_12p | 12216 |
| S1M10000025C01 | 2422 | SAU102292 | 5638 | SAU1c0038_orf_10p | 12368 |
| S1M10000025C03 | 2423 | SAU100139 | 5234 | SAU1c0032_orf_6p | 12255 |
| S1M10000025C05 | 2424 | SAU100139 | 5234 | SAU1c0032_orf_6p | 12255 |
| S1M10000025C09 | 2425 | SAU100793 | 5329 | SAU1c0028_orf_52p | 12188 |
| S1M10000025C09 | 2425 | SAU301433 | 5895 | SAU3c1420_orf_2p | 13118 |
| S1M10000025C10 | 2426 | SAU200928 | 5798 | SAU2c0365_orf_5p | 12815 |
| S1M10000025C11 | 2427 | SAU102117 | 5603 | SAU1c0027_orf_6p | 12181 |
| S1M10000025D01 | 2428 | SAU102117 | 5603 | SAU1c0027_orf_6p | 12181 |
| S1M10000025D03 | 2429 | SAU101771 | 5525 | SAU1c0037_orf_33p | 12350 |
| S1M10000025D03 | 2429 | SAU101772 | 5526 | SAU1c0037_orf_34p | 12351 |
| S1M10000025D04 | 2430 | SAU100970 | 5365 | SAU1c0043_orf_197p | 12529 |
| S1M10000025D06 | 2431 | SAU101543 | 5473 | SAU1c0037_orf_130p | 12346 |
| S1M10000025D08 | 2432 | SAU102598 | 5705 | SAU1c0041_orf_43p | 12464 |
| S1M10000025D08 | 2432 | SAU102599 | 5706 | SAU1c0041_orf_45p | 12466 |
| S1M10000025D08 | 2432 | SAU103191 | 5765 | SAU1c0041_orf_44p | 12465 |
| S1M10000025D09 | 2433 | SAU100522 | 5284 | SAU1c0044_orf_249p | 12599 |
| S1M10000025D10 | 2434 | SAU102200 | 5611 | SAU1c0045_orf_168p | 12665 |
| S1M10000025D10 | 2434 | SAU102201 | 5612 | SAU1c0045_orf_169p | 12666 |
| S1M10000025E01 | 2435 | SAU102117 | 5603 | SAU1c0027_orf_6p | 12181 |
| S1M10000025E04 | 2436 | SAU100389 | 5266 | SAU1c0034_orf_14p | 12279 |
| S1M10000025E09 | 2437 | SAU102117 | 5603 | SAU1c0027_orf_6p | 12181 |
| S1M10000025E11 | 2438 | SAU102437 | 5670 | SAU1c0045_orf_33p | 12695 |
| S1M10000025F03 | 2439 | SAU102297 | 5640 | SAU1c0045_orf_41p | 12704 |
| S1M10000025E05 | 2440 | SAU102200 | 5611 | SAU1c0045_orf_168p | 12665 |
| S1M10000025F05 | 2440 | SAU102201 | 5612 | SAU1c0045_orf_169p | 12666 |
| S1M10000025F08 | 2441 | SAU200685 | 5790 | SAU2c0344_orf_9p | 12801 |
| S1M10000025F09 | 2442 | SAU101907 | 5574 | SAU1c0040_orf_79p | 12442 |
| S1M10000025F10 | 2443 | SAU101571 | 5483 | SAU1c0044_orf_210p | 12585 |
| S1M10000025F12 | 2444 | SAU102200 | 5611 | SAU1c0045_orf_168p | 12665 |
| S1M10000025F12 | 2444 | SAU102201 | 5612 | SAU1c0045_orf_169p | 12666 |
| S1M10000025G04 | 2445 | SAU300617 | 5874 | SAU3c1046_orf_2p | 13056 |
| S1M10000025G06 | 2446 | SAU300617 | 5874 | SAU3c1046_orf_2p | 13056 |
| S1M10000025G10 | 2447 | SAU101869 | 5566 | SAU1c0036_orf_24p | 12321 |
| S1M10000025H05 | 2448 | SAU101907 | 5574 | SAU1c0040_orf_79p | 12442 |
| S1M10000025H06 | 2449 | SAU101907 | 5574 | SAU1c0040_orf_79p | 12442 |
| S1M10000025H07 | 2450 | SAU200752 | 5795 | SAU2c0354_orf_5p | 12809 |
| S1M10000025H07 | 2450 | SAU300975 | 5880 | SAU3c1240_orf_3p | 13075 |
| S1M10000025H10 | 2451 | SAU100590 | 5293 | SAU1c0013_orf_5p | 12121 |
| S1M10000025H10 | 2451 | SAU301268 | 5891 | SAU3c1364_orf_2p | 13102 |
| S1M10000026A02 | 2452 | SAU101907 | 5574 | SAU1c0040_orf_79p | 12442 |
| S1M10000026A04 | 2453 | SAU102340 | 5647 | SAU1c0045_orf_149p | 12660 |
| S1M10000026A05 | 2454 | SAU200934 | 5799 | SAU2c0375_orf_9p | 12842 |
| S1M10000026A06 | 2455 | SAU102059 | 5597 | SAU1c0034_orf_51p | 12286 |
| S1M10000026A07 | 2456 | SAU100970 | 5365 | SAU1c0043_orf_197p | 12529 |
| S1M10000026A08 | 2457 | SAU100266 | 5250 | SAU1c0032_orf_75p | 12256 |
| S1M10000026A09 | 2458 | SAU102452 | 5676 | SAU1c0045_orf_20p | 12674 |
| S1M10000026A09 | 2458 | SAU102453 | 5677 | SAU1c0045_orf_19p | 12669 |
| S1M10000026A10 | 2459 | SAU100970 | 5365 | SAU1c0043_orf_197p | 12529 |
| S1M10000026A11 | 2460 | SAU102259 | 5624 | SAU1c0032_orf_55p | 12245 |
| S1M10000026A11 | 2460 | SAU102260 | 5625 | SAU1c0032_orf_56p | 12246 |
| S1M10000026A11 | 2460 | SAU102261 | 5626 | SAU1c0032_orf_57p | 12247 |
| S1M10000026A11 | 2460 | SAU300868 | 5879 | #N/A | #N/A |
| S1M10000026B02 | 2461 | SAU101907 | 5574 | SAU1c0040_orf_79p | 12442 |
| S1M10000026B03 | 2462 | SAU100158 | 5238 | SAU1c0040_orf_80p | 12443 |
| S1M10000026B05 | 2463 | SAU101546 | 5475 | SAU1c0037_orf_133p | 12349 |
| S1M10000026B06 | 2464 | SAU101570 | 5482 | SAU1c0044_orf_209p | 12584 |
| S1M10000026B07 | 2465 | SAU101341 | 5424 | SAU1c0044_orf_38p | 12618 |
| S1M10000026B07 | 2465 | SAU301275 | 5892 | SAU3c1365_orf_2p | 13103 |
| S1M10000026B10 | 2466 | SAU101592 | 5490 | SAU1c0039_orf_37p | 12406 |
| S1M10000026B11 | 2467 | SAU101999 | 5585 | SAU1c0040_orf_101p | 12423 |
| S1M10000026B12 | 2468 | SAU100970 | 5365 | SAU1c0043_orf_197p | 12529 |
| S1M10000026C01 | 2469 | SAU100266 | 5250 | SAU1c0032_orf_75p | 12256 |
| S1M10000026C06 | 2470 | SAU101772 | 5526 | SAU1c0037_orf_34p | 12351 |
| S1M10000026C07 | 2471 | SAU101842 | 5557 | SAU1c0042_orf_9p | 12510 |
| S1M10000026C08 | 2472 | SAU100139 | 5234 | SAU1c0032_orf_6p | 12255 |
| S1M10000026C11 | 2473 | SAU200657 | 5789 | #N/A | #N/A |
| S1M10000026C12 | 2474 | SAU101726 | 5515 | SAU1c0016_orf_7p | 12134 |
| S1M10000026D04 | 2475 | SAU100658 | 5303 | SAU1c0038_orf_59p | 12388 |
| S1M10000026D05 | 2476 | SAU101491 | 5464 | SAU1c0025_orf_20p | 12165 |
| S1M10000026D06 | 2477 | SAU100139 | 5234 | SAU1c0032_orf_6p | 12255 |
| S1M10000026D07 | 2478 | SAU101815 | 5552 | SAU1c0032_orf_33p | 12238 |
| S1M10000026D08 | 2479 | SAU100690 | 5309 | #N/A | #N/A |
| S1M10000026D10 | 2480 | SAU203296 | 5863 | SAU2c0442_orf_18p | 12983 |
| S1M10000026D12 | 2481 | SAU100546 | 5289 | SAU1c0032_orf_2p | 12235 |
| S1M10000026E01 | 2482 | SAU101543 | 5473 | SAU1c0037_orf_130p | 12346 |
| S1M10000026E07 | 2483 | SAU102939 | 5747 | #N/A | #N/A |
| S1M10000026E09 | 2484 | SAU102001 | 5586 | SAU1c0040_orf_102p | 12424 |
| S1M10000026E09 | 2484 | SAU102002 | 5587 | SAU1c0040_orf_103p | 12425 |
| S1M10000026E10 | 2485 | SAU101869 | 5566 | SAU1c0036_orf_24p | 12321 |
| S1M10000026E11 | 2486 | SAU101791 | 5532 | SAU1c0032_orf_12p | 12216 |
| S1M10000026E12 | 2487 | SAU100964 | 5363 | SAU1c0044_orf_86p | 12641 |
| S1M10000026F01 | 2488 | SAU101784 | 5530 | SAU1c0037_orf_46p | 12355 |
| S1M10000026F03 | 2489 | SAU102200 | 5611 | SAU1c0045_orf_168p | 12665 |
| S1M10000026F03 | 2489 | SAU102201 | 5612 | SAU1c0045_orf_169p | 12666 |
| S1M10000026F04 | 2490 | SAU201571 | 5824 | SAU2c0447_orf_17p | 12997 |
| S1M10000026F05 | 2491 | SAU100139 | 5234 | SAU1c0032_orf_6p | 12255 |
| S1M10000026F06 | 2492 | SAU100414 | 5270 | SAU1c0022_orf_24p | 12148 |
| S1M10000026F07 | 2493 | SAU101869 | 5566 | SAU1c0036_orf_24p | 12321 |
| S1M10000026F08 | 2494 | SAU101756 | 5524 | SAU1c0040_orf_82p | 12445 |
| S1M10000026F09 | 2495 | SAU102939 | 5747 | #N/A | #N/A |
| S1M10000026F10 | 2496 | SAU101869 | 5566 | SAU1c0036_orf_24p | 12321 |
| S1M10000026E11 | 2497 | SAU102939 | 5747 | #N/A | #N/A |
| S1M10000026F12 | 2498 | SAU100414 | 5270 | SAU1c0022_orf_24p | 12148 |
| S1M10000026G01 | 2499 | SAU101869 | 5566 | SAU1c0036_orf_24p | 12321 |
| S1M10000026G03 | 2500 | SAU100547 | 5290 | SAU1c0032_orf_3p | 12240 |
| S1M10000026G04 | 2501 | SAU100690 | 5309 | #N/A | #N/A |
| S1M10000026G05 | 2502 | SAU101756 | 5524 | SAU1c0040_orf_82p | 12445 |
| S1M10000026G06 | 2503 | SAU101784 | 5530 | SAU1c0037_orf_46p | 12355 |
| S1M10000026G07 | 2504 | SAU100886 | 5349 | SAU1c0018_orf_16p | 12139 |
| S1M10000026G09 | 2505 | SAU100542 | 5288 | SAU1c0043_orf_210p | 12532 |
| S1M10000026G10 | 2506 | SAU100613 | 5299 | SAU1c0015_orf_14p | 12126 |
| S1M10000026G10 | 2506 | SAU102812 | 5736 | SAU1c0015_orf_15p | 12127 |
| S1M10000026G12 | 2507 | SAU101551 | 5477 | SAU1c0043_orf_67p | 12550 |
| S1M10000026H01 | 2508 | SAU101652 | 5503 | SAU1c0042_orf_123p | 12492 |
| S1M10000026H02 | 2509 | SAU102355 | 5651 | SAU1c0040_orf_40p | 12435 |
| S1M10000026H03 | 2510 | SAU101801 | 5541 | #N/A | #N/A |
| S1M10000026H04 | 2511 | SAU201810 | 5836 | SAU2c0308_orf_2p | 12769 |
| S1M10000026H04 | 2511 | SAU202174 | 5845 | SAU2c0412_orf_3p | 12895 |
| S1M10000026H04 | 2511 | SAU301148 | 5888 | #N/A | #N/A |
| S1M10000026H05 | 2512 | SAU101907 | 5574 | SAU1c0040_orf_79p | 12442 |
| S1M10000026H07 | 2513 | SAU101806 | 5546 | SAU1c0032_orf_25p | 12230 |
| S1M10000026H07 | 2513 | SAU101807 | 5547 | SAU1c0032_orf_26p | 12231 |
| S1M10000026H09 | 2514 | SAU202174 | 5845 | SAU2c0412_orf_3p | 12895 |
| S1M10000026H09 | 2514 | SAU301148 | 5888 | #N/A | #N/A |
| S1M10000026H10 | 2515 | SAU102479 | 5683 | SAU1c0039_orf_101p | 12405 |
| S1M10000027A04 | 2516 | SAU101756 | 5524 | SAU1c0040_orf_82p | 12445 |
| S1M10000027A05 | 2517 | SAU101805 | 5545 | SAU1c0032_orf_24p | 12229 |
| S1M10000027A08 | 2518 | SAU101772 | 5526 | SAU1c0037_orf_34p | 12351 |
| S1M10000027A11 | 2519 | SAU101551 | 5477 | SAU1c0043_orf_67p | 12550 |
| S1M10000027B04 | 2520 | SAU102939 | 5747 | #N/A | #N/A |
| S1M10000027B06 | 2521 | SAU100275 | 5252 | SAU1c0036_orf_15p | 12314 |
| S1M10000027B07 | 2522 | SAU100158 | 5238 | SAU1c0040_orf_80p | 12443 |
| S1M10000027B08 | 2523 | SAU101807 | 5547 | SAU1c0032_orf_26p | 12231 |
| S1M10000027B09 | 2524 | SAU102059 | 5597 | SAU1c0034_orf_51p | 12286 |
| S1M10000027B11 | 2525 | SAU101265 | 5407 | #N/A | #N/A |
| S1M10000027C02 | 2526 | SAU101327 | 5421 | SAU1c0044_orf_296p | 12612 |
| S1M10000027C04 | 2527 | SAU201236 | 5808 | SAU2c0409_orf_10p | 12891 |
| S1M10000027C05 | 2528 | SAU102117 | 5603 | SAU1c0027_orf_6p | 12181 |
| S1M10000027C06 | 2529 | SAU100114 | 5228 | SAU1c0043_orf_225p | 12535 |
| S1M10000027C08 | 2530 | SAU101807 | 5547 | SAU1c0032_orf_26p | 12231 |
| S1M10000027C09 | 2531 | SAU101545 | 5474 | SAU1c0037_orf_132p | 12348 |
| S1M10000027D02 | 2532 | SAU101652 | 5503 | SAU1c0042_orf_123p | 12492 |
| S1M10000027D02 | 2532 | SAU101653 | 5504 | SAU1c0042_orf_124p | 12493 |
| S1M10000027D03 | 2533 | SAU100300 | 5253 | SAU1c0040_orf_90p | 12451 |
| S1M10000027D05 | 2534 | SAU101554 | 5478 | SAU1c0043_orf_70p | 12551 |
| S1M10000027D06 | 2535 | SAU202708 | 5849 | SAU2c0385_orf_1p | 12855 |
| S1M10000027D08 | 2536 | SAU100714 | 5312 | SAU1c0044_orf_74p | 12635 |
| S1M10000027D09 | 2537 | SAU203524 | 5864 | SAU2c0435_orf_1p | 12957 |
| S1M10000027D10 | 2538 | SAU102283 | 5634 | SAU1c0006_orf_1p | 12119 |
| S1M10000027D11 | 2539 | SAU101996 | 5584 | SAU1c0040_orf_99p | 12456 |
| S1M10000027E05 | 2540 | SAU200916 | 5797 | SAU2c0373_orf_4p | 12838 |
| S1M10000027E05 | 2540 | SAU301620 | 5899 | SAU3c1478_orf_2p | 13140 |
| S1M10000027E06 | 2541 | SAU100690 | 5309 | #N/A | #N/A |
| S1M10000027E07 | 2542 | SAU100547 | 5290 | SAU1c0032_orf_3p | 12240 |
| S1M10000027E08 | 2543 | SAU201571 | 5824 | SAU2c0447_orf_17p | 12997 |
| S1M10000027E09 | 2544 | SAU101807 | 5547 | SAU1c0032_orf_26p | 12231 |
| S1M10000027E11 | 2545 | SAU101551 | 5477 | SAU1c0043_orf_67p | 12550 |
| S1M10000027F01 | 2546 | SAU103038 | 5757 | #N/A | 4N/A |
| S1M10000027F02 | 2547 | SAU101491 | 5464 | SAU1c0025_orf_20p | 12165 |
| S1M10000027F05 | 2548 | SAU100882 | 5347 | SAU1c0038_orf_35p | 12374 |
| S1M10000027F06 | 2549 | SAU100690 | 5309 | #N/A | #N/A |
| S1M10000027F08 | 2550 | SAU200006 | 5770 | SAU2c0157_orf_1p | 12723 |
| S1M10000027F09 | 2551 | SAU100858 | 5341 | SAU1c0038_orf_86p | 12401 |
| S1M10000027G03 | 2552 | SAU101756 | 5524 | SAU1c0040_orf_82p | 12445 |
| S1M10000027G04 | 2553 | SAU101777 | 5527 | SAU1c0037_orf_39p | 12352 |
| S1M10000027G05 | 2554 | SAU102526 | 5692 | SAU1c0045_orf_299p | 12691 |
| S1M10000027G06 | 2555 | SAU202708 | 5849 | SAU2c0385_orf_1p | 12855 |
| S1M10000027G07 | 2556 | SAU102265 | 5629 | SAU1c0032_orf_61p | 12251 |
| S1M10000027G09 | 2557 | SAU101807 | 5547 | SAU1c0032_orf_26p | 12231 |
| S1M10000027G11 | 2558 | SAU102533 | 5695 | #N/A | #N/A |
| S1M10000027G11 | 2558 | SAU102534 | 5696 | #N/A | #N/A |
| S1M10000027H02 | 2559 | SAU102059 | 5597 | SAU1c0034_orf_51p | 12286 |
| S1M10000027H04 | 2560 | SAU101777 | 5527 | SAU1c0037_orf_39p | 12352 |
| S1M10000027H05 | 2561 | SAU102526 | 5692 | SAU1c0045_orf_299p | 12691 |
| S1M10000027H06 | 2562 | SAU100690 | 5309 | #N/A | #N/A |
| S1M10000027H07 | 2563 | SAU100542 | 5288 | SAU1c0043_orf_210p | 12532 |
| S1M10000027H08 | 2564 | SAU201571 | 5824 | SAU2c0447_orf_17p | 12997 |
| S1M10000027H09 | 2565 | SAU101382 | 5437 | SAU1c0022_orf_19p | 12146 |
| S1M10000027H10 | 2566 | SAU100158 | 5238 | SAU1c0040_orf_80p | 12443 |
| S1M10000027H11 | 2567 | SAU102533 | 5695 | #N/A | #N/A |
| S1M10000027H11 | 2567 | SAU102534 | 5696 | #N/A | #N/A |
| S1M10000028A02 | 2568 | SAU101085 | 5378 | SAU1c0034_orf_42p | 1284 |
| S1M10000028A02 | 2568 | SAU101086 | 5379 | SAU1c0034_orf_43p | 1285 |
| S1M10000028A04 | 2569 | SAU101028 | 5370 | SAU1c0043_orf_7p | 12552 |
| S1M10000028A06 | 2570 | SAU100478 | 5277 | SAU1c0044_orf_265p | 12605 |
| S1M10000028A06 | 2570 | SAU100996 | 5366 | SAU1c0044_orf_266p | 12606 |
| S1M10000028A08 | 2571 | SAU102054 | 5596 | SAU1c0039_orf_74p | 12417 |
| S1M10000028B01 | 2572 | SAU101085 | 5378 | SAU1c0034_orf_42p | 12284 |
| S1M10000028B01 | 2572 | SAU101086 | 5379 | SAU1c0034_orf_43p | 12285 |
| S1M10000028B02 | 2573 | SAU102059 | 5597 | SAU1c0034_orf_51p | 12286 |
| S1M10000028B02 | 2573 | SAU301465 | 5896 | SAU3c1429_orf_4p | 13121 |
| S1M10000028B03 | 2574 | SAU100887 | 5350 | SAU1c0018_orf_15p | 12138 |
| S1M10000028B04 | 2575 | SAU102764 | 5734 | SAU1c0044_orf_56p | 12625 |
| S1M10000028B05 | 2576 | SAU101869 | 5566 | SAU1c0036_orf_24p | 12321 |
| S1M10000028B06 | 2577 | SAU201558 | 5823 | SAU2c0434_orf_5p | 12954 |
| S1M10000028B08 | 2578 | SAU100158 | 5238 | SAU1c0040_orf_80p | 12443 |
| S1M10000028B09 | 2579 | SAU100158 | 5238 | SAU1c0040_orf_80p | 12443 |
| S1M10000028C02 | 2580 | SAU203296 | 5863 | SAU2c0442_orf_18p | 12983 |
| S1M10000028C04 | 2581 | SAU101381 | 5436 | SAU1c0022_orf_18p | 12145 |
| S1M10000028C05 | 2582 | SAU100313 | 5259 | SAU1c0045_orf_153p | 12661 |
| S1M10000028C05 | 2582 | SAU100359 | 5264 | SAU1c0032_orf_35p | 12239 |
| S1M10000028C05 | 2582 | SAU200297 | 5778 | SAU2c0274_orf_2p | 12739 |
| S1M10000028C06 | 2583 | SAU103226 | 5768 | SAU1c0045_orf_95p | 12713 |
| S1M10000028C08 | 2584 | SAU101752 | 5522 | SAU1c0040_orf_85p | 12447 |
| S1M10000028D03 | 2585 | SAU301898 | 5904 | SAU3c1079_orf_1p | 13057 |
| S1M10000028D04 | 2586 | SAU101381 | 5436 | SAU1c0022_orf_18p | 12145 |
| S1M10000028D06 | 2587 | SAU200006 | 5770 | SAU2c0157_orf_1p | 12723 |
| S1M10000028D07 | 2588 | SAU101271 | 5411 | SAU1c0037_orf_90p | 12366 |
| S1M10000028D08 | 2589 | SAU100858 | 5341 | SAU1c0038_orf_86p | 12401 |
| S1M10000028D09 | 2590 | SAU100158 | 5238 | SAU1c0040_orf_80p | 12443 |
| S1M10000028E01 | 2591 | SAU100062 | 5225 | SAU1c0035_orf_98p | 12309 |
| S1M10000028E01 | 2591 | SAU100231 | 5245 | #N/A | #N/A |
| S1M10000028E03 | 2592 | SAU100770 | 5324 | #N/A | #N/A |
| S1M10000028E08 | 2593 | SAU101865 | 5563 | SAU1c0036_orf_20p | 12318 |
| S1M10000028F01 | 2594 | SAU101085 | 5378 | SAU1c0034_orf_42p | 12284 |
| S1M10000028F01 | 2594 | SAU101086 | 5379 | SAU1c0034_orf_43p | 12285 |
| S1M10000028F03 | 2595 | SAU100414 | 5270 | SAU1c0022_orf_24p | 12148 |
| S1M10000028F04 | 2596 | SAU100301 | 5254 | SAU1c0040_orf_91p | 12452 |
| S1M10000028F04 | 2596 | SAU100302 | 5255 | SAU1c0040_orf_92p | 12453 |
| S1M10000028F05 | 2597 | SAU100301 | 5254 | SAU1c0040_orf_91p | 12452 |
| S1M10000028F05 | 2597 | SAU100302 | 5255 | SAU1c0040_orf_92p | 12453 |
| S1M10000028F06 | 2598 | SAU100432 | 5271 | SAU1c0040_orf_88p | 12450 |
| S1M10000028F06 | 2598 | SAU202756 | 5852 | SAU2c0470_orf_1p | 13027 |
| S1M10000028F07 | 2599 | SAU101006 | 5367 | SAU1c0028_orf_59p | 12190 |
| S1M10000028G01 | 2600 | SAU102554 | 5699 | SAU1c0045_orf_209p | 12673 |
| S1M10000028G02 | 2601 | SAU201236 | 5808 | SAU2c0409_orf_10p | 12891 |
| S1M10000028G02 | 2601 | SAU300338 | 5871 | #N/A | #N/A |
| S1M10000028G03 | 2602 | SAU101231 | 5399 | SAU1c0035_orf_6p | 12303 |
| S1M10000028G04 | 2603 | SAU200916 | 5797 | SAU2c0373_orf_4p | 12838 |
| S1M10000028G04 | 2603 | SAU301620 | 5899 | SAU3c1478_orf_2p | 13140 |
| S1M10000028G05 | 2604 | SAU100690 | 5309 | #N/A | #N/A |
| S1M10000028G06 | 2605 | SAU101865 | 5563 | SAU1c0036_orf_20p | 12318 |
| S1M10000028G08 | 2606 | SAU101341 | 5424 | SAU1c0044_orf_38p | 12618 |
| S1M10000028G08 | 2606 | SAU301275 | 5892 | SAU3c1365_orf_2p | 13103 |
| S1M10000028H03 | 2607 | SAU101815 | 5552 | SAU1c0032_orf_33p | 12238 |
| S1M10000028H04 | 2608 | SAU103038 | 5757 | #N/A | #N/A |
| S1M10000028H05 | 2609 | SAU101869 | 5566 | SAU1c0036_orf_24p | 12321 |
| S1M10000029A02 | 2610 | SAU100887 | 5350 | SAU1c0018_orf_15p | 12138 |
| S1M10000029A04 | 2611 | SAU100489 | 5278 | SAU1c0044_orf_133p | 12566 |
| S1M10000029A04 | 2611 | SAU100557 | 5291 | SAU1c0044_orf_132p | 12565 |
| S1M10000029A09 | 2612 | SAU101495 | 5467 | SAU1c0037_orf_65p | 12360 |
| S1M10000029A10 | 2613 | SAU100414 | 5270 | SAU1c0022_orf_24p | 12148 |
| S1M10000029A11 | 2614 | SAU101868 | 5565 | SAU1c0036_orf_23p | 12320 |
| S1M10000029A12 | 2615 | SAU100865 | 5343 | SAU1c0044_orf_99p | 12648 |
| S1M10000029B02 | 2616 | SAU200928 | 5798 | SAU2c0365_orf_5p | 12815 |
| S1M10000029B03 | 2617 | SAU201225 | 5807 | SAU2c0412_orf_5p | 12896 |
| S1M10000029B04 | 2618 | SAU201621 | 5828 | SAU2c0437_orf_4p | 12966 |
| S1M10000029B05 | 2619 | SAU100355 | 5263 | SAU1c0023_orf_6p | 12155 |
| S1M10000029B06 | 2620 | SAU201571 | 5824 | SAU2c0447_orf_17p | 12997 |
| S1M10000029B08 | 2621 | SAU101360 | 5431 | SAU1c0044_orf_109p | 12555 |
| S1M10000029B10 | 2622 | SAU101891 | 5571 | SAU1c0034_orf_30p | 12281 |
| S1M10000029C02 | 2623 | SAU101271 | 5411 | SAU1c0037_orf_90p | 12366 |
| S1M10000029C03 | 2624 | SAU100690 | 5309 | #N/A | #N/A |
| S1M10000029C05 | 2625 | SAU200928 | 5798 | SAU2c0365_orf_5p | 12815 |
| S1M10000029C07 | 2626 | SAU102222 | 5613 | SAU1c0043_orf_12p | 12511 |
| S1M10000029C09 | 2627 | SAU101495 | 5467 | SAU1c0037_orf_65p | 12360 |
| S1M10000029C10 | 2628 | SAU101995 | 5583 | SAU1c0040_orf_98p | 12455 |
| S1M10000029C12 | 2629 | SAU100859 | 5342 | SAU1c0038_orf_87p | 12402 |
| S1M10000029D02 | 2630 | SAU101400 | 5444 | SAU1c0036_orf_35p | 12326 |
| S1M10000029D05 | 2631 | SAU100887 | 5350 | SAU1c0018_orf_15p | 12138 |
| S1M10000029D09 | 2632 | SAU101495 | 5467 | SAU1c0037_orf_65p | 12360 |
| S1M10000029D10 | 2633 | SAU101891 | 5571 | SAU1c0034_orf_30p | 12281 |
| S1M10000029D12 | 2634 | SAU100056 | 5223 | SAU1c0044_orf_176p | 12577 |
| S1M10000029E02 | 2635 | SAU101400 | 5444 | SAU1c0036_orf_35p | 12326 |
| S1M10000029E05 | 2636 | SAU100522 | 5284 | SAU1c0044_orf_249p | 12599 |
| S1M10000029E10 | 2637 | SAU101271 | 5411 | SAU1c0037_orf_90p | 12366 |
| S1M10000029E11 | 2638 | SAU101271 | 5411 | SAU1c0037_orf_90p | 12366 |
| S1M10000029F01 | 2639 | SAU101803 | 5543 | SAU1c0032_orf_23p | 1228 |
| S1M10000029F01 | 2639 | SAU101804 | 5544 | #N/A | #N/A |
| S1M10000029F02 | 2640 | SAU101271 | 5411 | SAU1c0037_orf_90p | 12366 |
| S1M10000029F02 | 2640 | SAU101286 | 5413 | SAU1c0034_orf_67p | 12292 |
| S1M10000029F04 | 2641 | SAU102639 | 5724 | #N/A | #N/A |
| S1M10000029F09 | 2642 | SAU100793 | 5329 | SAU1c0028_orf_52p | 12188 |
| S1M10000029F09 | 2642 | SAU301433 | 5895 | SAU3c1420_orf_2p | 13118 |
| S1M10000029F10 | 2643 | SAU102621 | 5719 | SAU1c0041_orf_63p | 12480 |
| S1M10000029F11 | 2644 | SAU102883 | 5741 | SAU1c0045_orf_38p | 12702 |
| S1M10000029F12 | 2645 | SAU102603 | 5709 | SAU1c0041_orf_48p | 12469 |
| S1M10000029F12 | 2645 | SAU102609 | 5713 | SAU1c0041_orf_52p | 12473 |
| S1M10000029G01 | 2646 | SAU101752 | 5522 | SAU1c0040_orf_85p | 12447 |
| S1M10000029002 | 2647 | SAU101622 | 5496 | SAU1c0040_orf_27p | 12430 |
| S1M10000029G03 | 2648 | SAU201571 | 5824 | SAU2c0447_orf_17p | 12997 |
| S1M10000029G05 | 2649 | SAU101156 | 5386 | SAU1c0036_orf_12p | 12311 |
| S1M10000029G07 | 2650 | SAU101622 | 5496 | SAU1c0040_orf_27p | 12430 |
| S1M10000029G08 | 2651 | SAU101365 | 5432 | SAU1c0044_orf_112p | 12556 |
| S1M10000029G12 | 2652 | SAU101270 | 5410 | SAU1c0037_orf_89p | 12365 |
| S1M10000029H01 | 2653 | SAU100414 | 5270 | SAU1c0022_orf_24p | 12148 |
| S1M10000029H05 | 2654 | SAU102613 | 5715 | SAU1c0041_orf_55p | 12475 |
| S1M10000029H06 | 2655 | SAU200928 | 5798 | SAU2c0365_orf_5p | 12815 |
| S1M10000029H08 | 2656 | SAU101271 | 5411 | SAU1c0037_orf_90p | 12366 |
| S1M10000029H09 | 2657 | SAU101365 | 5432 | SAU1c0044_orf_112p | 12556 |
| S1M10000029H10 | 2658 | SAU101271 | 5411 | SAU1c0037_orf_90p | 12366 |
| S1M10000030A02 | 2659 | SAU101543 | 5473 | SAU1c0037_orf_130p | 12346 |
| S1M10000030A05 | 2660 | SAU101491 | 5464 | SAU1c0025_orf_20p | 12165 |
| S1M10000030A09 | 2661 | SAU101242 | 5404 | SAU1c0044_orf_18p | 12578 |
| S1M10000030A10 | 2662 | SAU101092 | 5381 | SAU1c0028_orf_9p | 12192 |
| S1M10000030A10 | 2662 | SAU202882 | 5855 | SAU2c0381_orf_3p | 12848 |
| S1M10000030A11 | 2663 | SAU100414 | 5270 | SAU1c0022_orf_24p | 12148 |
| S1M10000030B02 | 2664 | SAU101573 | 5485 | SAU1c0044_orf_212p | 12587 |
| S1M10000030B05 | 2665 | SAU100275 | 5252 | SAU1c0036_orf_15p | 12314 |
| S1M10000030B07 | 2666 | SAU101180 | 5389 | SAU1c0045_orf_126p | 12656 |
| S1M10000030B09 | 2667 | SAU301898 | 5904 | SAU3c1079_orf_1p | 13057 |
| S1M10000030C02 | 2668 | SAU102531 | 5694 | SAU1c0045_orf_186p | 12667 |
| S1M10000030C03 | 2669 | SAU102629 | 5720 | SAU1c0041_orf_71p | 12481 |
| S1M10000030C04 | 2670 | SAU101999 | 5585 | SAU1c0040_orf_101p | 12423 |
| S1M10000030C05 | 2671 | SAU101999 | 5585 | SAU1c0040_orf_101p | 12423 |
| S1M10000030C08 | 2672 | SAU101175 | 5388 | SAU1c0031_orf_1p | 12213 |
| S1M10000030C09 | 2673 | SAU101752 | 5522 | SAU1c0040_orf_85p | 12447 |
| S1M10000030C10 | 2674 | SAU301592 | 5898 | SAU3c1467_orf_2p | 13137 |
| S1M10000030C12 | 2675 | SAU100961 | 5360 | SAU1c0044_orf_83p | 12638 |
| S1M10000030C12 | 2675 | SAU100962 | 5361 | SAU1c0044_orf_84p | 12639 |
| S1M10000030D01 | 2676 | SAU101495 | 5467 | SAU1c0037_orf_65p | 12360 |
| S1M10000030D02 | 2677 | SAU101573 | 5485 | SAU1c0044_orf_212p | 12587 |
| S1M10000030D03 | 2678 | SAU100731 | 5313 | SAU1c0044_orf_252p | 12601 |
| S1M10000030D05 | 2679 | SAU102222 | 5613 | SAU1c0043_orf_12p | 12511 |
| S1M10000030D06 | 2680 | SAU102392 | 5658 | SAU1c0033_orf_40p | 12270 |
| S1M10000030D06 | 2680 | SAU201541 | 5822 | SAU2c0431_orf_14p | 12942 |
| S1M10000030D07 | 2681 | SAU102392 | 5658 | SAU1c0033_orf_40p | 12270 |
| S1M10000030D07 | 2681 | SAU201541 | 5822 | SAU2c0431_orf_14p | 12942 |
| S1M10000029F09 | 2642 | SAU100793 | 5329 | SAU1c0028_orf_52p | 12188 |
| S1M10000029F09 | 2642 | SAU301433 | 5895 | SAU3c1420_orf_2p | 13118 |
| S1M10000029F10 | 2643 | SAU102621 | 5719 | SAU1c0041_orf_63p | 12480 |
| S1M10000029F11 | 2644 | SAU102883 | 5741 | SAU1c0045_orf_38p | 12702 |
| S1M10000029F12 | 2645 | SAU102603 | 5709 | SAU1c0041_orf_48p | 12469 |
| S1M10000029F12 | 2645 | SAU102609 | 5713 | SAU1c0041_orf_52p | 12473 |
| S1M10000029G01 | 2646 | SAU101752 | 5522 | SAU1c0040_orf_85p | 12447 |
| S1M10000029G02 | 2647 | SAU101622 | 5496 | SAU1c0040_orf_27p | 12430 |
| S1M10000029G03 | 2648 | SAU201571 | 5824 | SAU2c0447_orf_17p | 12997 |
| S1M10000029G05 | 2649 | SAU101156 | 5386 | SAU1c0036_orf_12p | 12311 |
| S1M10000029G07 | 2650 | SAU101622 | 5496 | SAU1c0040_orf_27p | 12430 |
| S1M10000029G08 | 2651 | SAU101365 | 5432 | SAU1c0044_orf_112p | 12556 |
| S1M10000029G12 | 2652 | SAU101270 | 5410 | SAU1c0037_orf_89p | 12365 |
| S1M10000029H01 | 2653 | SAU100414 | 5270 | SAU1c0022_orf_24p | 12148 |
| S1M10000029H05 | 2654 | SAU102613 | 5715 | SAU1c0041_orf_55p | 12475 |
| S1M10000029H06 | 2655 | SAU200928 | 5798 | SAU2c0365_orf_5p | 12815 |
| S1M10000029H08 | 2656 | SAU101271 | 5411 | SAU1c0037_orf_90p | 12366 |
| S1M10000029H09 | 2657 | SAU101365 | 5432 | SAU1c0044_orf_112p | 12556 |
| S1M10000029H10 | 2658 | SAU101271 | 5411 | SAU1c0037_orf_90p | 12366 |
| S1M10000030A02 | 2659 | SAU101543 | 5473 | SAU1c0037_orf_130p | 12346 |
| S1M10000030A05 | 2660 | SAU101491 | 5464 | SAU1c0025_orf_20p | 12165 |
| S1M10000030A09 | 2661 | SAU101242 | 5404 | SAU1c0044_orf_18p | 12578 |
| S1M10000030A10 | 2662 | SAU101092 | 5381 | SAU1c0028_orf_9p | 12192 |
| S1M10000030A10 | 2662 | SAU202882 | 5855 | SAU2c0381_orf_3p | 12848 |
| S1M10000030A11 | 2663 | SAU100414 | 5270 | SAU1c0022_orf_24p | 12148 |
| S1M10000030B02 | 2664 | SAU101573 | 5485 | SAU1c0044_orf_212p | 12587 |
| S1M10000030B05 | 2665 | SAU100275 | 5252 | SAU1c0036_orf_15p | 12314 |
| S1M10000030B07 | 2666 | SAU101180 | 5389 | SAU1c0045_orf_126p | 12656 |
| S1M10000030B09 | 2667 | SAU301898 | 5904 | SAU3c1079_orf_1p | 13057 |
| S1M10000030C02 | 2668 | SAU102531 | 5694 | SAU1c0045_orf_186p | 12667 |
| S1M10000030C03 | 2669 | SAU102629 | 5720 | SAU1c0041_orf_71p | 12481 |
| S1M10000030C04 | 2670 | SAU101999 | 5585 | SAU1c0040_orf_101p | 12423 |
| S1M10000030C05 | 2671 | SAU101999 | 5585 | SAU1c0040_orf_101p | 12423 |
| S1M10000030C08 | 2672 | SAU101175 | 5388 | SAU1c0031_orf_1p | 12213 |
| S1M10000030C09 | 2673 | SAU101752 | 5522 | SAU1c0040_orf_85p | 12447 |
| S1M10000030C10 | 2674 | SAU301592 | 5898 | SAU3c1467_orf_2p | 13137 |
| S1M10000030C12 | 2675 | SAU100961 | 5360 | SAU1c0044_orf_83p | 12638 |
| S1M10000030C12 | 2675 | SAU100962 | 5361 | SAU1c0044_orf_84p | 12639 |
| S1M10000030D01 | 2676 | SAU101495 | 5467 | SAU1c0037_orf_65p | 12360 |
| S1M10000030D02 | 2677 | SAU101573 | 5485 | SAU1c0044_orf_212p | 12587 |
| S1M10000030D03 | 2678 | SAU100731 | 5313 | SAU1c0044_orf_252p | 12601 |
| S1M10000030D05 | 2679 | SAU102222 | 5613 | SAU1c0043_orf_12p | 12511 |
| S1M10000030D06 | 2680 | SAU102392 | 5658 | SAU1c0033_orf_40p | 12270 |
| S1M10000030D06 | 2680 | SAU201541 | 5822 | SAU2c0431_orf_14p | 12942 |
| S1M10000030D07 | 2681 | SAU102392 | 5658 | SAU1c0033_orf_40p | 12270 |
| S1M10000030D07 | 2681 | SAU201541 | 5822 | SAU2c0431_orf_14p | 12942 |
| S1M10000030D09 | 2682 | SAU101271 | 5411 | SAU1c0037_orf_90p | 12366 |
| S1M10000030D10 | 2683 | SAU100313 | 5259 | SAU1c0045_orf_153p | 12661 |
| S1M10000030D10 | 2683 | SAU100359 | 5264 | SAU1c0032_orf_35p | 12239 |
| S1M10000030D11 | 2684 | SAU100414 | 5270 | SAU1c0022_orf_24p | 12148 |
| S1M10000030E02 | 2685 | SAU100731 | 5313 | SAU1c0044_orf_252p | 12601 |
| S1M10000030E06 | 2686 | SAU102909 | 5743 | SAU1c0036_orf_16p | 12315 |
| S1M10000030E07 | 2687 | SAU102939 | 5747 | #N/A | #N/A |
| S1M10000030E11 | 2688 | SAU101790 | 5531 | SAU1c0032_orf_11p | 12215 |
| S1M10000030E12 | 2689 | SAU100300 | 5253 | SAU1c0040_orf_90p | 12451 |
| S1M10000030F01 | 2690 | SAU100731 | 5313 | SAU1c0044_orf_252p | 12601 |
| S1M10000030F07 | 2691 | SAU102939 | 5747 | #N/A | #N/A |
| S1M10000030F08 | 2692 | SAU101800 | 5540 | SAU1c0032_orf_20p | 12225 |
| S1M10000030F08 | 2692 | SAU101801 | 5541 | #N/A | #N/A |
| S1M10000030F09 | 2693 | SAU101266 | 5408 | SAU1c0042_orf_117p | 12490 |
| S1M10000030F10 | 2694 | SAU102453 | 5677 | SAU1c0045_orf_19p | 12669 |
| S1M10000030G03 | 2695 | SAU101752 | 5522 | SAU1c0040_orf_85p | 12447 |
| S1M10000030G05 | 2696 | SAU102246 | 5619 | SAU1c0043_orf_30p | 12542 |
| S1M10000030G05 | 2696 | SAU102247 | 5620 | SAU1c0043_orf_31p | 12543 |
| S1M10000030G07 | 2697 | SAU102602 | 5708 | SAU1c0032_orf_5p | 12249 |
| S1M10000030G08 | 2698 | SAU100546 | 5289 | SAU1c0032_orf_2p | 12235 |
| S1M10000030G09 | 2699 | SAU101752 | 5522 | SAU1c0040_orf_85p | 12447 |
| S1M10000030G10 | 2700 | SAU102453 | 5677 | SAU1c0045_orf_19p | 12669 |
| S1M10000030G11 | 2701 | SAU101529 | 5471 | SAU1c0043_orf_39p | 12544 |
| S1M10000030G12 | 2702 | SAU201197 | 5806 | SAU2c0429_orf_2p | 12938 |
| S1M10000030H01 | 2703 | SAU200928 | 5798 | SAU2c0365_orf_5p | 12815 |
| S1M10000030H02 | 2704 | SAU200392 | 5780 | SAU2c0298_orf_3p | 12755 |
| S1M10000030H03 | 2705 | SAU102162 | 5609 | SAU1c0041_orf_27p | 12462 |
| S1M10000030H05 | 2706 | SAU102380 | 5654 | SAU1c0033_orf_29p | 12265 |
| S1M10000030H07 | 2707 | SAU100123 | 5230 | SAU1c0043_orf_189p | 12526 |
| S1M10000030H07 | 2707 | SAU102001 | 5586 | SAU1c0040_orf_102p | 12424 |
| S1M10000030H07 | 2707 | SAU103159 | 5762 | SAU1c0045_orf_204p | 12670 |
| S1M10000030H07 | 2707 | SAU201827 | 5837 | SAU2c0449_orf_21p | 13002 |
| S1M10000030H09 | 2708 | SAU100964 | 5363 | SAU1c0044_orf_86p | 12641 |
| S1M10000031A03 | 2709 | SAU100546 | 5289 | SAU1c0032_orf_2p | 12235 |
| S1M10000031A08 | 2710 | SAU101641 | 5501 | SAU1c0029_orf_12p | 12193 |
| S1M10000031A10 | 2711 | SAU102242 | 5618 | SAU1c0043_orf_26p | 12540 |
| S1M10000031B01 | 2712 | SAU101791 | 5532 | SAU1c0032_orf_12p | 12216 |
| S1M10000031B02 | 2713 | SAU102602 | 5708 | SAU1c0032_orf_5p | 12249 |
| S1M10000031B04 | 2714 | SAU200928 | 5798 | SAU2c0365_orf_5p | 12815 |
| S1M10000031B11 | 2715 | SAU101262 | 5406 | SAU1c0042_orf_113p | 12488 |
| S1M10000031B12 | 2716 | SAU101360 | 5431 | SAU1c0044_orf_109p | 12555 |
| S1M10000031C04 | 2717 | SAU100062 | 5225 | SAU1c0035_orf_98p | 12309 |
| S1M10000031C04 | 2717 | SAU100231 | 5245 | #N/A | #N/A |
| S1M10000031C07 | 2718 | SAU102059 | 5597 | SAU1c0034_orf_51p | 12286 |
| S1M10000031C09 | 2719 | SAU102117 | 5603 | SAU1c0027_orf_6p | 12181 |
| S1M10000031C11 | 2720 | SAU102935 | 5745 | #N/A | #N/A |
| S1M10000031D06 | 2721 | SAU201197 | 5806 | SAU2c0429_orf_2p | 12938 |
| S1M10000031D07 | 2722 | SAU101543 | 5473 | SAU1c0037_orf_130p | 12346 |
| S1M10000031D08 | 2723 | SAU101891 | 5571 | SAU1c0034_orf_30p | 12281 |
| S1M10000031D09 | 2724 | SAU102453 | 5677 | SAU1c0045_orf_19p | 12669 |
| S1M10000031E02 | 2725 | SAU101350 | 5429 | SAU1c0042_orf_109p | 12487 |
| S1M10000031E03 | 2726 | SAU101267 | 5409 | SAU1c0037_orf_86p | 12364 |
| S1M10000031E03 | 2726 | SAU300719 | 5876 | SAU3c1108_orf_3p | 13059 |
| S1M10000031E04 | 2727 | SAU101752 | 5522 | SAU1c0040_orf_85p | 12447 |
| S1M10000031E07 | 2728 | SAU102449 | 5674 | SAU1c0045_orf_22p | 12677 |
| S1M10000031E08 | 2729 | SAU100158 | 5238 | SAU1c0040_orf_80p | 12443 |
| S1M10000031E10 | 2730 | SAU102433 | 5668 | SAU1c0045_orf_37p | 12701 |
| S1M10000031E12 | 2731 | SAU101400 | 5444 | SAU1c0036_orf_35p | 12326 |
| S1M10000031F02 | 2732 | SAU101800 | 5540 | SAU1c0032_orf_20p | 12225 |
| S1M10000031F02 | 2732 | SAU101801 | 5541 | #N/A | 4N/A |
| S1M10000031F03 | 2733 | SAU101791 | 5532 | SAU1c0032_orf_12p | 12216 |
| S1M10000031F04 | 2734 | SAU101571 | 5483 | SAU1c0044_orf_210p | 12585 |
| S1M10000031F04 | 2734 | SAU101572 | 5484 | SAU1c0044_orf_211p | 12586 |
| S1M10000031F05 | 2735 | SAU101907 | 5574 | SAU1c0040_orf_79p | 12442 |
| S1M10000031F08 | 2736 | SAU101869 | 5566 | SAU1c0036_orf_24p | 12321 |
| S1M10000031F10 | 2737 | SAU102593 | 5704 | SAU1c0041_orf_39p | 12463 |
| S1M10000031F11 | 2738 | SAU102469 | 5679 | SAU1c0026_orf_25p | 12172 |
| S1M10000031F12 | 2739 | SAU102593 | 5704 | SAU1c0041_orf_39p | 12463 |
| S1M10000031002 | 2740 | SAU101797 | 5537 | SAU1c0032_orf_17p | 12221 |
| S1M10000031003 | 2741 | SAU101679 | 5509 | SAU1c0044_orf_222p | 12593 |
| S1M10000031G04 | 2742 | SAU103198 | 5766 | #N/A | #N/A |
| S1M10000031006 | 2743 | SAU101907 | 5574 | SAU1c0040_orf_79p | 12442 |
| S1M10000031G09 | 2744 | SAU201571 | 5824 | SAU2c0447_orf_17p | 12997 |
| S1M10000031G10 | 2745 | SAU100077 | 5226 | SAU1c0043_orf_178p | 12520 |
| S1M10000031G11 | 2746 | SAU100118 | 5229 | SAU1c0015_orf_13p | 12125 |
| S1M10000031H01 | 2747 | SAU103144 | 5761 | SAU1c0045_orf_15p | 12663 |
| S1M10000031H02 | 2748 | SAU100886 | 5349 | SAU1c0018_orf_16p | 12139 |
| S1M10000031H06 | 2749 | SAU100690 | 5309 | #N/A | #N/A |
| S1M10000031H09 | 2750 | SAU201743 | 5831 | #N/A | #N/A |
| S1M10000031H11 | 2751 | SAU100077 | 5226 | SAU1c0043_orf_178p | 12520 |
| S1M10000032A03 | 2752 | SAU202039 | 5843 | SAU2c0452_orf_20p | 13009 |
| S1M10000032A05 | 2753 | SAU100275 | 5252 | SAU1c0036_orf_15p | 12314 |
| S1M10000032A06 | 2754 | SAU100610 | 5298 | SAU1c0034_orf_71p | 12294 |
| S1M10000032A07 | 2755 | SAU102059 | 5597 | SAU1c0034_orf_51p | 12286 |
| S1M10000032A08 | 2756 | SAU102142 | 5606 | SAU1c0041_orf_13p | 12457 |
| S1M10000032A08 | 2756 | SAU102143 | 5607 | SAU1c0041_orf_14p | 12458 |
| S1M10000032A10 | 2757 | SAU101777 | 5527 | SAU1c0037_orf_39p | 12352 |
| S1M10000032B01 | 2758 | SAU301898 | 5904 | SAU3c1079_orf_1p | 13057 |
| S1M10000032B05 | 2759 | SAU102607 | 5712 | SAU1c0041_orf_51p | 12472 |
| S1M10000032B05 | 2759 | SAU102944 | 5749 | SAU1c0041_orf_47p | 12468 |
| S1M10000032B07 | 2760 | SAU100157 | 5237 | SAU1c0040_orf_81p | 12444 |
| S1M10000032B08 | 2761 | SAU100175 | 5240 | SAU1c0044_orf_204p | 12582 |
| S1M10000032B11 | 2762 | SAU100944 | 5357 | SAU1c0042_orf_5p | 12505 |
| S1M10000032B12 | 2763 | SAU102117 | 5603 | SAU1c0027_orf_6p | 12181 |
| S1M10000032C01 | 2764 | SAU101907 | 5574 | SAU1c0040_orf_79p | 12442 |
| S1M10000032C03 | 2765 | SAU102241 | 5617 | SAU1c0043_orf_25p | 12539 |
| S1M10000032C04 | 2766 | SAU102241 | 5617 | SAU1c0043_orf_25p | 12539 |
| S1M10000032C05 | 2767 | SAU101632 | 5499 | SAU1c0039_orf_3p | 12407 |
| S1M10000032C09 | 2768 | SAU101907 | 5574 | SAU1c0040_orf_79p | 12442 |
| S1M10000032C10 | 2769 | SAU201615 | 5826 | SAU2c0440_orf_10p | 12972 |
| S1M10000032C11 | 2770 | SAU102863 | 5737 | #N/A | #N/A |
| S1M10000032C12 | 2771 | SAU102863 | 5737 | #N/A | #N/A |
| S1M10000032D03 | 2772 | SAU100613 | 5299 | SAU1c0015_orf_14p | 12126 |
| S1M10000032D06 | 2773 | SAU101652 | 5503 | SAU1c0042_orf_123p | 12492 |
| S1M10000032D07 | 2774 | SAU200468 | 5781 | SAU2c0429_orf_19p | 12937 |
| S1M10000032D09 | 2775 | SAU100128 | 5231 | #N/A | #N/A |
| S1M10000032D09 | 2775 | SAU101549 | 5476 | SAU1c0043_orf_64p | 12549 |
| S1M10000032D09 | 2775 | SAU101576 | 5488 | SAU1c0044_orf_105p | 12554 |
| S1M10000032D11 | 2776 | SAU100128 | 5231 | #N/A | #N/A |
| S1M10000032D11 | 2776 | SAU101549 | 5476 | SAU1c0043_orf_64p | 12549 |
| S1M10000032D11 | 2776 | SAU101576 | 5488 | SAU1c0044_orf_105p | 12554 |
| S1M10000032E02 | 2777 | SAU101784 | 5530 | SAU1c0037_orf_46p | 12355 |
| S1M10000032E03 | 2778 | SAU101791 | 5532 | SAU1c0032_orf_12p | 12216 |
| S1M10000032E04 | 2779 | SAU201197 | 5806 | SAU2c0429_orf_2p | 12938 |
| S1M10000032E06 | 2780 | SAU101543 | 5473 | SAU1c0037_orf_130p | 12346 |
| S1M10000032E08 | 2781 | SAU102281 | 5633 | SAU1c0038_orf_4p | 12384 |
| S1M10000032E09 | 2782 | SAU100521 | 5283 | SAU1c0044_orf_250p | 12600 |
| S1M10000032E10 | 2783 | SAU101868 | 5565 | SAU1c0036_orf_23p | 12320 |
| S1M10000032E11 | 2784 | SAU101592 | 5490 | SAU1c0039_orf_37p | 12406 |
| S1M10000032E12 | 2785 | SAU101999 | 5585 | SAU1c0040_orf_101p | 12423 |
| S1M10000032F01 | 2786 | SAU102001 | 5586 | SAU1c0040_orf_102p | 12424 |
| S1M10000032F01 | 2786 | SAU102002 | 5587 | SAU1c0040_orf_103p | 12425 |
| S1M10000032F04 | 2787 | SAU101271 | 5411 | SAU1c0037_orf_90p | 12366 |
| S1M10000032F05 | 2788 | SAU101339 | 5422 | SAU1c0038_orf_81p | 12399 |
| S1M10000032F10 | 2789 | SAU102585 | 5703 | SAU1c0044_orf_289p | 12611 |
| S1M10000032F10 | 2789 | SAU201773 | 5834 | SAU2c0446_orf_4p | 12996 |
| S1M10000032F11 | 2790 | SAU101189 | 5392 | SAU1c0033_orf_25p | 12264 |
| S1M10000032F12 | 2791 | SAU100964 | 5363 | SAU1c0044_orf_86p | 12641 |
| S1M10000032G02 | 2792 | SAU100710 | 5311 | SAU1c0043_orf_54p | 12546 |
| S1M10000032G02 | 2792 | SAU200628 | 5788 | SAU2c0334_orf_4p | 12790 |
| S1M10000032G03 | 2793 | SAU100813 | 5334 | SAU1c0036_orf_29p | 12322 |
| S1M10000032G04 | 2794 | SAU101904 | 5573 | SAU1c0044_orf_36p | 12617 |
| S1M10000032G06 | 2795 | SAU101509 | 5469 | SAU1c0039_orf_81p | 12418 |
| S1M10000032G08 | 2796 | SAU101752 | 5522 | SAU1c0040_orf_85p | 12447 |
| S1M10000032G10 | 2797 | SAU101907 | 5574 | SAU1c0040_orf_79p | 12442 |
| S1M10000032G12 | 2798 | SAU101084 | 5377 | SAU1c0034_orf_41p | 12283 |
| S1M10000032H01 | 2799 | SAU101445 | 5452 | SAU1c0038_orf_47p | 12382 |
| S1M10000032H01 | 2799 | SAU101446 | 5453 | SAU1c0038_orf_48p | 12383 |
| S1M10000032H04 | 2800 | SAU101868 | 5565 | SAU1c0036_orf_23p | 12320 |
| S1M10000032H07 | 2801 | SAU101797 | 5537 | SAU1c0032_orf_17p | 12221 |
| S1M10000032H07 | 2801 | SAU101798 | 5538 | SAU1c0032_orf_18p | 12222 |
| S1M10000032H09 | 2802 | SAU101907 | 5574 | SAU1c0040_orf_79p | 12442 |
| S1M10000032H11 | 2803 | SAU202174 | 5845 | SAU2c0412_orf_3p | 12895 |
| S1M10000032H11 | 2803 | SAU301148 | 5888 | #N/A | #N/A |
| S1M100000323A0 | 2804 | SAU201775 | 5835 | SAU2c0446_orf_4p | 12996 |
| S1M100000323A0 | 2804 | SAU301080 | 5885 | SAU3c1287_orf_1p | 13083 |
| S1M10000033A07 | 2805 | SAU200949 | 5800 | SAU2c0380_orf_11p | 12846 |
| S1M10000033A08 | 2806 | SAU101231 | 5399 | SAU1c0035_orf_6p | 12303 |
| S1M10000033A10 | 2807 | SAU202039 | 5843 | SAU2c0452_orf_20p | 13009 |
| S1M10000033B02 | 2808 | SAU101808 | 5548 | SAU1c0032_orf_27p | 12232 |
| S1M10000033B07 | 2809 | SAU102044 | 5593 | SAU1c0039_orf_65p | 12414 |
| S1M10000033B08 | 2810 | SAU101868 | 5565 | SAU1c0036_orf_23p | 12320 |
| S1M10000033B11 | 2811 | SAU100793 | 5329 | SAU1c0028_orf_52p | 12188 |
| S1M10000033B11 | 2811 | SAU301433 | 5895 | SAU3c1420_orf_2p | 13118 |
| S1M10000033B12 | 2812 | SAU101104 | 5382 | SAU1c0029_orf_20p | 12195 |
| S1M10000033B12 | 2812 | SAU103010 | 5753 | SAU1c0029_orf_19p | 12194 |
| S1M10000033C04 | 2813 | SAU102933 | 5744 | SAU1c0039_orf_62p | 12412 |
| S1M10000033D02 | 2814 | SAU102333 | 5644 | SAU1c0045_orf_143p | 12657 |
| S1M10000033D03 | 2815 | SAU101752 | 5522 | SAU1c0040_orf_85p | 12447 |
| S1M10000033D04 | 2816 | SAU100745 | 5319 | SAU1c0044_orf_233p | 12596 |
| S1M10000033D05 | 2817 | 5AV100301 | 5254 | SAU1c0040_orf_91p | 12452 |
| S1M10000033D06 | 2818 | SAU102113 | 5601 | SAU1c0027_orf_2p | 12178 |
| S1M10000033D10 | 2819 | SAU100813 | 5334 | SAU1c0036_orf_29p | 12322 |
| S1M10000033D12 | 2820 | SAU101360 | 5431 | SAU1c0044_orf_109p | 12555 |
| S1M10000033E04 | 2821 | SAU102318 | 5643 | SAU1c0045_orf_60p | 12707 |
| S1M10000033E10 | 2822 | SAU100162 | 5239 | SAU1c0044_orf_206p | 12583 |
| S1M10000033E12 | 2823 | SAU100770 | 5324 | #N/A | #N/A |
| S1M10000033F02 | 2824 | SAU101724 | 5514 | SAU1c0016_orf_9p | 12136 |
| S1M10000033F03 | 2825 | SAU101784 | 5530 | SAU1c0037_orf_46p | 12355 |
| S1M10000033F06 | 2826 | SAU102449 | 5674 | SAU1c0045_orf_22p | 12677 |
| S1M10000033F07 | 2827 | SAU102044 | 5593 | SAU1c0039_orf_65p | 12414 |
| S1M10000033F09 | 2828 | SAU100414 | 5270 | SAU1c0022_orf_24p | 12148 |
| S1M10000033F11 | 2829 | SAU100689 | 5308 | SAU1c0036_orf_2p | 12323 |
| S1M10000033G05 | 2830 | SAU101904 | 5573 | SAU1c0044_orf_36p | 12617 |
| S1M10000033G07 | 2831 | SAU101824 | 5554 | SAU1c0038_orf_26p | 12371 |
| S1M10000033G09 | 2832 | SAU102380 | 5654 | SAU1c0033_orf_29p | 12265 |
| S1M10000033G10 | 2833 | SAU100793 | 5329 | SAU1c0028_orf_52p | 12188 |
| S1M10000033G10 | 2833 | SAU301433 | 5895 | SAU3c1420_orf_2p | 13118 |
| S1M10000033G11 | 2834 | SAU101968 | 5581 | SAU1c0028_orf_43p | 12187 |
| S1M10000033G12 | 2835 | SAU100300 | 5253 | SAU1c0040_orf_90p | 12451 |
| S1M10000033H01 | 2836 | SAU301465 | 5896 | SAU3c1429_orf_4p | 13121 |
| S1M10000033H02 | 2837 | SAU101907 | 5574 | SAU1c0040_orf_79p | 12442 |
| S1M10000033H03 | 2838 | SAU101833 | 5555 | SAU1c0038_orf_34p | 12373 |
| S1M10000033H07 | 2839 | SAU101996 | 5584 | SAU1c0040_orf_99p | 12456 |
| S1M10000033H08 | 2840 | SAU101175 | 5388 | SAU1c0031_orf_1p | 12213 |
| S1M10000033H09 | 2841 | SAU100710 | 5311 | SAU1c0043_orf_54p | 12546 |
| S1M10000033H10 | 2842 | SAU100690 | 5309 | #N/A | #N/A |
| S1M10000033H11 | 2843 | SAU102453 | 5677 | SAU1c0045_orf_19p | 12669 |
| S1M10000034A02 | 2844 | SAU101197 | 5393 | SAU1c0035_orf_60p | 12300 |
| S1M10000034A03 | 2845 | SAU102939 | 5747 | #N/A | #N/A |
| S1M10000034A04 | 2846 | SAU102578 | 5701 | SAU1c0039_orf_61p | 12411 |
| S1M10000034A05 | 2847 | SAU101242 | 5404 | SAU1c0044_orf_18p | 12578 |
| S1M10000034A08 | 2848 | SAU101020 | 5368 | SAU1c0045_orf_86p | 12710 |
| S1M10000034A09 | 2849 | SAU100773 | 5326 | SAU1c0038_orf_39p | 12377 |
| S1M10000034A11 | 2850 | SAU102389 | 5656 | SAU1c0033_orf_36p | 12268 |
| S1M10000034A12 | 2851 | SAU101632 | 5499 | SAU1c0039_orf_3p | 12407 |
| S1M10000034B03 | 2852 | SAU101907 | 5574 | SAU1c0040_orf_79p | 12442 |
| S1M10000034B05 | 2853 | SAU101630 | 5498 | SAU1c0039_orf_4p | 12410 |
| S1M10000034B06 | 2854 | SAU102607 | 5712 | SAU1c0041_orf_51p | 12472 |
| S1M10000034B06 | 2854 | SAU102944 | 5749 | SAU1c0041_orf_47p | 12468 |
| S1M10000034B07 | 2855 | SAU100077 | 5226 | SAU1c0043_orf_178p | 12520 |
| S1M10000034B08 | 2856 | SAU101341 | 5424 | SAU1c0044_orf_38p | 12618 |
| S1M10000034B09 | 2857 | SAU101909 | 5575 | SAU1c0040_orf_77p | 12441 |
| S1M10000034B10 | 2858 | SAU101882 | 5569 | SAU1c0025_orf_15p | 12163 |
| S1M10000034B12 | 2859 | SAU200593 | 5786 | SAU2c0327_orf_1p | 12784 |
| S1M10000034C02 | 2860 | SAU100557 | 5291 | SAU1c0044_orf_132p | 12565 |
| S1M10000034C06 | 2861 | SAU200157 | 5776 | #N/A | #N/A |
| S1M10000034C07 | 2862 | SAU101343 | 5425 | SAU1c0044_orf_40p | 12619 |
| S1M10000034C09 | 2863 | SAU102281 | 5633 | SAU1c0038_orf_4p | 12384 |
| S1M10000034C12 | 2864 | SAU100859 | 5342 | SAU1c0038_orf_87p | 12402 |
| S1M10000034D01 | 2865 | SAU100414 | 5270 | SAU1c0022_orf_24p | 12148 |
| S1M10000034D05 | 2866 | SAU101907 | 5574 | SAU1c0040_orf_79p | 12442 |
| S1M10000034D06 | 2867 | SAU200157 | 5776 | #N/A | #N/A |
| S1M10000034D07 | 2868 | SAU100745 | 5319 | SAU1c0044_orf_233p | 12596 |
| S1M10000034D08 | 2869 | SAU102284 | 5635 | SAU1c0038_orf_5p | 12389 |
| S1M10000034D08 | 2869 | SAU201469 | 5816 | SAU2c0438_orf_6p | 12967 |
| S1M10000034D10 | 2870 | SAU102474 | 5681 | SAU1c0026_orf_31p | 12174 |
| S1M10000034D11 | 2871 | SAU101881 | 5568 | SAU1c0025_orf_14p | 12162 |
| S1M10000034D12 | 2872 | SAU101632 | 5499 | SAU1c0039_orf_3p | 12407 |
| S1M10000034E01 | 2873 | SAU102433 | 5668 | SAU1c0045_orf_37p | 12701 |
| S1M10000034E02 | 2874 | SAU100557 | 5291 | SAU1c0044_orf_132p | 12565 |
| S1M10000034E04 | 2875 | SAU102602 | 5708 | SAU1c0032_orf_5p | 12249 |
| S1M10000034E05 | 2876 | SAU100738 | 5317 | SAU1c0044_orf_52p | 12624 |
| S1M10000034E06 | 2877 | SAU100347 | 5262 | SAU1c0036_orf_56p | 12334 |
| S1M10000034E06 | 2877 | SAU100443 | 5274 | SAU1c0036_orf_55p | 12333 |
| S1M10000034E07 | 2878 | SAU100617 | 5300 | SAU1c0035_orf_102p | 12295 |
| S1M10000034E10 | 2879 | SAU102401 | 5661 | SAU1c0030_orf_4p | 12209 |
| S1M10000034E11 | 2880 | SAU101881 | 5568 | SAU1c0025_orf_14p | 12162 |
| S1M10000034E12 | 2881 | SAU200960 | 5801 | SAU2c0377_orf_5p | 12843 |
| S1M10000034F01 | 2882 | SAU202731 | 5850 | #N/A | #N/A |
| S1M10000034F02 | 2883 | SAU201621 | 5828 | SAU2c0437_orf_4p | 12966 |
| S1M10000034F03 | 2884 | SAU201971 | 5841 | SAU2c0455_orf_17p | 13015 |
| S1M10000034F03 | 2884 | SAU301363 | 5894 | #N/A | #N/A |
| S1M10000034F04 | 2885 | SAU301620 | 5899 | SAU3c1478_orf_2p | 13140 |
| S1M10000034F05 | 2886 | SAU101630 | 5498 | SAU1c0039_orf_4p | 12410 |
| S1M10000034F07 | 2887 | SAU101175 | 5388 | SAU1c0031_orf_1p | 12213 |
| S1M10000034F08 | 2888 | SAU202736 | 5851 | SAU2c0426_orf_7p | 12927 |
| S1M10000034F09 | 2889 | SAU101869 | 5566 | SAU1c0036_orf_24p | 12321 |
| S1M10000034F10 | 2890 | SAU102350 | 5649 | SAU1c0040_orf_36p | 12433 |
| S1M10000034F12 | 2891 | SAU100522 | 5284 | SAU1c0044_orf_249p | 12599 |
| S1M10000034G02 | 2892 | SAU101543 | 5473 | SAU1c0037_orf_130p | 12346 |
| S1M10000034G03 | 2893 | SAU101198 | 5394 | SAU1c0035_orf_61p | 12301 |
| S1M10000034G06 | 2894 | SAU202174 | 5845 | SAU2c0412_orf_3p | 12895 |
| S1M10000034G07 | 2895 | SAU102380 | 5654 | SAU1c0033_orf_29p | 12265 |
| S1M10000034G08 | 2896 | SAU100158 | 5238 | SAU1c0040_orf_80p | 12443 |
| S1M10000034G09 | 2897 | SAU102294 | 5639 | SAU1c0044_orf_288p | 12610 |
| S1M10000034G09 | 2897 | SAU201775 | 5835 | SAU2c0446_orf_4p | 12996 |
| S1M10000034G11 | 2898 | SAU200558 | 5782 | SAU2c0322_orf_5p | 12777 |
| S1M10000034G12 | 2899 | SAU100557 | 5291 | SAU1c0044_orf_132p | 12565 |
| S1M10000034H01 | 2900 | SAU101293 | 5414 | SAU1c0044_orf_61p | 12631 |
| S1M10000034H02 | 2901 | SAU100414 | 5270 | SAU1c0022_orf_24p | 12148 |
| S1M10000034H03 | 2902 | SAU101571 | 5483 | SAU1c0044_orf_210p | 12585 |
| S1M10000034H06 | 2903 | SAU101570 | 5482 | SAU1c0044_orf_209p | 12584 |
| S1M10000034H07 | 2904 | SAU100077 | 5226 | SAU1c0043_orf_178p | 12520 |
| S1M10000034H08 | 2905 | SAU200740 | 5794 | SAU2c0340_orf_3p | 12798 |
| S1M10000034H09 | 2906 | SAU101791 | 5532 | SAU1c0032_orf_12p | 12216 |
| S1M10000034H10 | 2907 | SAU102422 | 5666 | SAU1c0030_orf_22p | 12207 |
| S1M10000035A03 | 2908 | SAU101360 | 5431 | SAU1c0044_orf_109p | 12555 |
| S1M10000035A08 | 2909 | SAU201403 | 5815 | SAU2c0423_orf_3p | 12913 |
| S1M10000035A09 | 2910 | SAU101350 | 5429 | SAU1c0042_orf_109p | 12487 |
| S1M10000035A09 | 2910 | SAU101351 | 5430 | SAU1c0042_orf_108p | 12486 |
| S1M10000035A10 | 2911 | SAU203296 | 5863 | SAU2c0442_orf_18p | 12983 |
| S1M10000035A11 | 2912 | SAU101756 | 5524 | SAU1c0040_orf_82p | 12445 |
| S1M10000035A12 | 2913 | SAU101455 | 5456 | SAU1c0045_orf_250p | 12686 |
| S1M10000035A12 | 2913 | SAU200916 | 5797 | SAU2c0373_orf_4p | 12838 |
| S1M10000035A12 | 2913 | SAU301620 | 5899 | SAU3c1478_orf_2p | 13140 |
| S1M10000035B01 | 2914 | SAU102584 | 5702 | SAU1c0043_orf_239p | 12537 |
| S1M10000035B03 | 2915 | SAU102246 | 5619 | SAU1c0043_orf_30p | 12542 |
| S1M10000035B04 | 2916 | SAU102246 | 5619 | SAU1c0043_orf_30p | 12542 |
| S1M10000035B08 | 2917 | SAU103232 | 5769 | SAU1c0045_orf_341p | 12697 |
| S1M10000035B11 | 2918 | SAU101756 | 5524 | SAU1c0040_orf_82p | 12445 |
| S1M10000035C01 | 2919 | SAU200928 | 5798 | SAU2c0365_orf_5p | 12815 |
| S1M10000035C02 | 2920 | SAU101039 | 5373 | SAU1c0043_orf_181p | 12522 |
| S1M10000035C04 | 2921 | SAU100214 | 5228 | SAU1c0043_orf_225p | 12535 |
| S1M10000035C06 | 2922 | SAU101497 | 5468 | SAU1c0037_orf_66p | 12361 |
| S1M10000035C11 | 2923 | SAU101752 | 5522 | SAU1c0040_orf_85p | 12447 |
| S1M10000035D01 | 2924 | SAU100414 | 5270 | SAU1c0022_orf_24p | 12148 |
| S1M10000035D04 | 2925 | SAU200928 | 5798 | SAU2c0365_orf_5p | 12815 |
| S1M10000035D06 | 2926 | SAU102117 | 5603 | SAU1c0027_orf_6p | 12181 |
| S1M10000035D09 | 2927 | SAU100970 | 5365 | SAU1c0043_orf_197p | 12529 |
| S1M10000035D12 | 2928 | SAU100608 | 5297 | SAU1c0034_orf_69p | 12293 |
| S1M10000035E02 | 2929 | SAU102883 | 5741 | SAU1c0045_orf_38p | 12702 |
| S1M10000035E03 | 2930 | SAU102447 | 5672 | SAU1c0045_orf_24p | 12685 |
| S1M10000035E04 | 2931 | SAU103025 | 5755 | SAU1c00229_orf_9p | 12202 |
| S1M10000035E08 | 2932 | SAU100690 | 5309 | #N/A | #N/A |
| S1M10000035E09 | 2933 | SAU101197 | 5393 | SAU1c0035_orf_60p | 12300 |
| S1M10000035E12 | 2934 | SAU102117 | 5603 | SAU1c0027_orf_6p | 12181 |
| S1M10000035F03 | 2935 | SAU101092 | 5381 | SAU1c0028_orf_9p | 12192 |
| S1M10000035E03 | 2935 | SAU202882 | 5855 | SAU2c0381_orf_3p | 12848 |
| S1M10000035F04 | 2936 | SAU101784 | 5530 | SAU1c0037_orf_46p | 12355 |
| S1M10000035F09 | 2937 | SAU203296 | 5863 | SAU2c0442_orf_18p | 12983 |
| S1M10000035F12 | 2938 | SAU101427 | 5447 | SAU1c0042_orf_144p | 12500 |
| S1M10000035F12 | 2938 | SAU103204 | 5767 | SAU1c0042_orf_143p | 12499 |
| S1M10000035G02 | 2939 | SAU101365 | 5432 | SAU1c0044_orf_112p | 12556 |
| S1M10000035G09 | 2940 | SAU203296 | 5863 | SAU2c0442_orf_18p | 12983 |
| S1M10000035G11 | 2941 | SAU101344 | 5426 | SAU1c0044_orf_41p | 12620 |
| S1M10000035G12 | 2942 | SAU101907 | 5574 | SAU1c0040_orf_79p | 12442 |
| S1M10000035H01 | 2943 | SAU100140 | 5235 | SAU1c0032_orf_7p | 12258 |
| S1M10000035H07 | 2944 | SAU100313 | 5259 | SAU1c0045_orf_153p | 12661 |
| S1M10000035H07 | 2944 | SAU100359 | 5264 | SAU1c0032_orf_35p | 12239 |
| S1M10000035H07 | 2944 | SAU200297 | 5778 | SAU2c0274_orf_2p | 12739 |
| S1M10000035H08 | 2945 | SAU101772 | 5526 | SAU1c0037_orf_34p | 12351 |
| S1M10000035H09 | 2946 | SAU100496 | 5279 | SAU1c0041_orf_83p | 12484 |
| S1M10000035H09 | 2946 | SAU301004 | 5882 | SAU3c1255_orf_1p | 13079 |
| S1M10000035H10 | 2947 | SAU101756 | 5524 | SAU1c0040_orf_82p | 12445 |
| S1M10000035H11 | 2948 | SAU101344 | 5426 | SAU1c0044_orf_41p | 12620 |
| S1M10000036A02 | 2949 | SAU102447 | 5672 | SAU1c0045_orf_24p | 12685 |
| S1M10000036A03 | 2950 | SAU101242 | 5404 | SAU1c0044_orf_18p | 12578 |
| S1M10000036A04 | 2951 | SAU200994 | 5802 | SAU2c0428_orf_4p | 12935 |
| S1M10000036A05 | 2952 | SAU101810 | 5549 | SAU1c0032_orf_28p | 12233 |
| S1M10000036A05 | 2952 | SAU101811 | 5550 | SAU1c0032_orf_29p | 12234 |
| S1M10000036A05 | 2952 | SAU300110 | 5865 | SAU3c0533_orf_2p | 13031 |
| S1M10000036A08 | 2953 | SAU101220 | 5396 | SAU1c0044_orf_94p | 12645 |
| S1M10000036A11 | 2954 | SAU102117 | 5603 | SAU1c0027_orf_6p | 12181 |
| S1M10000036A12 | 2955 | SAU100813 | 5334 | SAU1c0036_orf_29p | 12322 |
| S1M10000036B04 | 2956 | SAU101570 | 5482 | SAU1c0044_orf_209p | 12584 |
| S1M10000036B04 | 2956 | SAU101571 | 5483 | SAU1c0044_orf_210p | 12585 |
| S1M10000036B06 | 2957 | SAU101653 | 5504 | SAU1c0042_orf_124p | 12493 |
| S1M10000036B07 | 2958 | SAU100887 | 5350 | SAU1c0018_orf_15p | 12138 |
| S1M10000036B08 | 2959 | SAU101653 | 5504 | SAU1c0042_orf_124p | 12493 |
| S1M10000036B11 | 2960 | SAU102059 | 5597 | SAU1c0034_orf_51p | 12286 |
| S1M10000036B12 | 2961 | SAU101791 | 5532 | SAU1c0032_orf_12p | 12216 |
| S1M10000036C01 | 2962 | SAU100242 | 5246 | SAU1c0036_orf_5p | 12336 |
| S1M10000036C03 | 2963 | SAU101592 | 5490 | SAU1c0039_orf_37p | 12406 |
| S1M10000036C04 | 2964 | SAU102433 | 5668 | SAU1c0045_orf_37p | 12701 |
| S1M10000036C05 | 2965 | SAU100497 | 5280 | SAU1c0018_orf_3p | 12140 |
| S1M10000036C06 | 2966 | SAU100158 | 5238 | SAU1c0040_orf_80p | 12443 |
| S1M10000036C07 | 2967 | SAU101800 | 5540 | SAU1c0032_orf_20p | 12225 |
| S1M10000036C07 | 2967 | SAU101801 | 5541 | #N/A | #N/A |
| S1M10000036C09 | 2968 | SAU102585 | 5703 | SAU1c0044_orf_289p | 12611 |
| S1M10000036C09 | 2968 | SAU201773 | 5834 | SAU2c0446_orf_4p | 12996 |
| S1M10000036C09 | 2968 | SAU302685 | 5908 | SAU3c1403_orf_1p | 13113 |
| S1M10000036C10 | 2969 | SAU100433 | 5272 | SAU1c0040_orf_87p | 12449 |
| S1M10000036C10 | 2969 | SAU101751 | 5521 | SAU1c0040_orf_86p | 12448 |
| S1M10000036D02 | 2970 | SAU201197 | 5806 | SAU2c0429_orf_2p | 12938 |
| S1M10000036D03 | 2971 | SAU103038 | 5757 | #N/A | #N/A |
| S1M10000036D06 | 2972 | SAU103024 | 5754 | SAU1c0029_orf_6p | 12200 |
| S1M10000036D08 | 2973 | SAU101907 | 5574 | SAU1c0040_orf_79p | 12442 |
| S1M10000036D10 | 2974 | SAU102933 | 5744 | SAU1c0039_orf_62p | 12412 |
| S1M10000036D11 | 2975 | SAU101197 | 5393 | SAU1c0035_orf_60p | 12300 |
| S1M10000036D11 | 2975 | SAU101198 | 5394 | SAU1c0035_orf_61p | 12301 |
| S1M10000036D12 | 2976 | SAU102117 | 5603 | SAU1c0027_orf_6p | 12181 |
| S1M10000036E06 | 2977 | SAU100432 | 5271 | SAU1c0040_orf_88p | 12450 |
| S1M10000036E06 | 2977 | SAU202756 | 5852 | SAU2c0470_orf_1p | 13027 |
| S1M10000036E08 | 2978 | SAU101028 | 5370 | SAU1c0043_orf_7p | 12552 |
| S1M10000036E11 | 2979 | SAU101343 | 5425 | SAU1c0044_orf_40p | 12619 |
| S1M10000036F06 | 2980 | SAU101242 | 5404 | SAU1c0044_orf_18p | 12578 |
| S1M10000036F07 | 2981 | SAU200928 | 5798 | SAU2c0365_orf_5p | 12815 |
| S1M10000036F08 | 2982 | SAU200914 | 5796 | SAU2c0373_orf_2p | 12837 |
| S1M10000036F09 | 2983 | SAU100532 | 5287 | SAU1c0044_orf_198p | 12580 |
| S1M10000036F10 | 2984 | SAU101586 | 5489 | SAU1c0044_orf_242p | 12598 |
| S1M10000036F11 | 2985 | SAU201506 | 5818 | SAU2c0432_orf_18p | 12946 |
| S1M10000036G03 | 2986 | SAU101545 | 5474 | SAU1c0037_orf_132p | 12348 |
| S1M10000036G07 | 2987 | SAU102355 | 5651 | SAU1c0040_orf_40p | 12435 |
| S1M10000036G08 | 2988 | SAU102336 | 5646 | SAU1c0045_orf_146p | 12659 |
| S1M10000036G11 | 2989 | SAU101340 | 5423 | SAU1c0038_orf_82p | 12400 |
| S1M10000036H01 | 2990 | SAU101793 | 5534 | SAU1c0032_orf_14p | 12218 |
| S1M10000036H02 | 2991 | SAU102117 | 5603 | SAU1c0027_orf_6p | 12181 |
| S1M10000036H03 | 2992 | SAU102909 | 5743 | SAU1c0036_orf_16p | 12315 |
| S1M10000036H04 | 2993 | SAU102909 | 5743 | SAU1c0036_orf_16p | 12315 |
| S1M10000036H05 | 2994 | SAU101798 | 5538 | SAU1c0032_orf_18p | 12222 |
| S1M10000036H06 | 2995 | SAU102292 | 5638 | SAU1c0038_orf_10p | 12368 |
| S1M10000036H08 | 2996 | SAU102909 | 5743 | SAU1c0036_orf_16p | 12315 |
| S1M10000036H11 | 2997 | SAU101653 | 5504 | SAU1c0042_orf_124p | 12493 |
| S1M10000037A02 | 2998 | SAU101652 | 5503 | SAU1c0042_orf_123p | 12492 |
| S1M10000037A02 | 2998 | SAU101653 | 5504 | SAU1c0042_orf_124p | 12493 |
| S1M10000037A03 | 2999 | SAU100128 | 5231 | #N/A | #N/A |
| S1M10000037A03 | 2999 | SAU101549 | 5476 | SAU1c0043_orf_64p | 12549 |
| S1M10000037A03 | 2999 | SAU101576 | 5488 | SAU1c0044_orf_105p | 12554 |
| S1M10000037A06 | 3000 | SAU100964 | 5363 | SAU1c0044_orf_86p | 12641 |
| S1M10000037A08 | 3001 | SAU102669 | 5728 | SAU1c0024_orf_7p | 12160 |
| S1M10000037A09 | 3002 | SAU101455 | 5456 | SAU1c0045_orf_250p | 12686 |
| S1M10000037A09 | 3002 | SAU200916 | 5797 | SAU2c0373_orf_4p | 12838 |
| S1M10000037A11 | 3003 | SAU101436 | 5449 | SAU1c0028_orf_23p | 12183 |
| S1M10000037A12 | 3004 | SAU200914 | 5796 | SAU2c0373_orf_2p | 12837 |
| S1M10000037B03 | 3005 | SAU101999 | 5585 | SAU1c0040_orf_101p | 12423 |
| S1M10000037B04 | 3006 | SAU100767 | 5323 | SAU1c0044_orf_192p | 12579 |
| S1M10000037B05 | 3007 | SAU102578 | 5701 | SAU1c0039_orf_61p | 12411 |
| S1M10000037B06 | 3008 | SAU101806 | 5546 | SAU1c0032_orf_25p | 12230 |
| S1M10000037B06 | 3008 | SAU101807 | 5547 | SAU1c0032_orf_26p | 12231 |
| S1M10000037B07 | 3009 | SAU101915 | 5577 | SAU1c0040_orf_72p | 12439 |
| S1M10000037B08 | 3010 | SAU101592 | 5490 | SAU1c0039_orf_37p | 12406 |
| S1M10000037B10 | 3011 | SAU101346 | 5427 | SAU1c0044_orf_43p | 12621 |
| S1M10000037B11 | 3012 | SAU101399 | 5443 | SAU1c0036_orf_34p | 12325 |
| S1M10000037B12 | 3013 | SAU102117 | 5603 | SAU1c0027_orf_6p | 12181 |
| S1M10000037C05 | 3014 | SAU101482 | 5461 | SAU1c0015_orf_10p | 12123 |
| S1M10000037C06 | 3015 | SAU101653 | 5504 | SAU1c0042_orf_124p | 12493 |
| S1M10000037C07 | 3016 | SAU101641 | 5501 | SAU1c0029_orf_12p | 12193 |
| S1M10000037C08 | 3017 | SAU101752 | 5522 | SAU1c0040_orf_85p | 12447 |
| S1M10000037C09 | 3018 | SAU101818 | 5553 | SAU1c0038_orf_20p | 12369 |
| S1M10000037C10 | 3019 | SAU101752 | 5522 | SAU1c0040_orf_85p | 12447 |
| S1M10000037D04 | 3020 | SAU102283 | 5634 | SAU1c0006_orf_1p | 12119 |
| S1M10000037D05 | 3021 | SAU100114 | 5228 | SAU1c0043_orf_225p | 12535 |
| S1M10000037D06 | 3022 | SAU101996 | 5584 | SAU1c0040_orf_99p | 12456 |
| S1M10000037D09 | 3023 | SAU102246 | 5619 | SAU1c0043_orf_30p | 12542 |
| S1M10000037D12 | 3024 | SAU101999 | 5585 | SAU1c0040_orf_101p | 12423 |
| S1M10000037E02 | 3025 | SAU102447 | 5672 | SAU1c0045_orf_24p | 12685 |
| S1M10000037E02 | 3025 | SAU102448 | 5673 | SAU1c0045_orf_23p | 12681 |
| S1M10000037E03 | 3026 | SAU100813 | 5334 | SAU1c0036_orf_29p | 12322 |
| S1M10000037E06 | 3027 | SAU100921 | 5355 | SAU1c0038_orf_76p | 12396 |
| S1M10000037E08 | 3028 | SAU100139 | 5234 | SAU1c0032_orf_6p | 12255 |
| S1M10000037E08 | 3028 | SAU100140 | 5235 | SAU1c0032_orf_7p | 12258 |
| S1M10000037E09 | 3029 | SAU102049 | 5595 | SAU1c0039_orf_68p | 12416 |
| S1M10000037E10 | 3030 | SAU101444 | 5451 | SAU1c0038_orf_46p | 12381 |
| S1M10000037E11 | 3031 | SAU201571 | 5824 | SAU2c0447_orf_17p | 12997 |
| S1M10000037E12 | 3032 | SAU102602 | 5708 | SAU1c0032_orf_5p | 12249 |
| S1M10000037F02 | 3033 | SAU100776 | 5327 | SAU1c0041_orf_72p | 12482 |
| S1M10000037F03 | 3034 | SAU101339 | 5422 | SAU1c0038_orf_81p | 12399 |
| S1M10000037F04 | 3035 | SAU200468 | 5781 | SAU2c0429_orf_19p | 12937 |
| S1M10000037F05 | 3036 | SAU101807 | 5547 | SAU1c0032_orf_26p | 12231 |
| S1M10000037F06 | 3037 | SAU102585 | 5703 | SAU1c0044_orf_289p | 12611 |
| S1M10000037F06 | 3037 | SAU201773 | 5834 | SAU2c0446_orf_4p | 12996 |
| S1M10000037F07 | 3038 | SAU100793 | 5329 | SAU1c0028_orf_52p | 12188 |
| S1M10000037F07 | 3038 | SAU301433 | 5895 | SAU3c1420_orf_2p | 13118 |
| S1M10000037F08 | 3039 | SAU203001 | 5859 | SAU2c0412_orf_15p | 12894 |
| S1M10000037F08 | 3039 | SAU203007 | 5860 | SAU2c0412_orf_10p | 12893 |
| S1M10000037F09 | 3040 | SAU101592 | 5490 | SAU1c0039_orf_37p | 12406 |
| S1M10000037F10 | 3041 | SAU200468 | 5781 | SAU2c0429_orf_19p | 12937 |
| S1M10000037G01 | 3042 | SAU102502 | 5690 | SAU1c0045_orf_273p | 12689 |
| S1M10000037G01 | 3042 | SAU102503 | 5691 | SAU1c0045_orf_274p | 12690 |
| S1M10000037G02 | 3043 | SAU100658 | 5303 | SAU1c0038_orf_59p | 12388 |
| S1M10000037G03 | 3044 | SAU101344 | 5426 | SAU1c0044_orf_41p | 12620 |
| S1M10000037G06 | 3045 | SAU101752 | 5522 | SAU1c0040_orf_85p | 12447 |
| S1M10000037G07 | 3046 | SAU103038 | 5757 | #N/A | #N/A |
| S1M10000037G08 | 3047 | SAU100970 | 5365 | SAU1c0043_orf_197p | 12529 |
| S1M10000037G10 | 3048 | SAU100062 | 5225 | SAU1c0035_orf_98p | 12309 |
| S1M10000037H02 | 3049 | SAU102059 | 5597 | SAU1c0034_orf_51p | 12286 |
| S1M10000037H03 | 3050 | SAU100114 | 5228 | SAU1c0043_orf_225p | 12535 |
| S1M10000037H05 | 3051 | SAU100964 | 5363 | SAU1c0044_orf_86p | 12641 |
| S1M10000037H07 | 3052 | SAU101571 | 5483 | SAU1c0044_orf_210p | 12585 |
| S1M10000037H08 | 3053 | SAU200928 | 5798 | SAU2c0365_orf_5p | 12815 |
| S1M10000037H09 | 3054 | SAU100140 | 5235 | SAU1c0032_orf_7p | 12258 |
| S1M10000037H11 | 3055 | SAU100608 | 5297 | SAU1c0034_orf_69p | 12293 |
| S1M10000038A04 | 3056 | SAU101275 | 5412 | SAU1c0044_orf_257p | 12604 |
| S1M10000038A07 | 3057 | SAU100414 | 5270 | SAU1c0022_orf_24p | 12148 |
| S1M10000038A08 | 3058 | SAU102059 | 5597 | SAU1c0034_orf_51p | 12286 |
| S1M10000038A09 | 3059 | SAU100307 | 5257 | SAU1c0036_orf_134p | 12313 |
| S1M10000038A11 | 3060 | SAU100547 | 5290 | SAU1c0032_orf_3p | 12240 |
| S1M10000038A12 | 3061 | SAU101799 | 5539 | SAU1c0032_orf_19p | 12223 |
| S1M10000038B01 | 3062 | SAU101483 | 5462 | SAu1c0015_orf_11p | 12124 |
| S1M10000038B03 | 3063 | SAU101360 | 5431 | SAU1c0044_orf_109p | 12555 |
| S1M10000038B07 | 3064 | SAU102433 | 5668 | SAU1c0045_orf_37p | 12701 |
| S1M10000038B08 | 3065 | SAU100308 | 5258 | SAU1c0036_orf_133p | 12312 |
| S1M10000038B09 | 3066 | SAU101652 | 5503 | SAU1c0042_orf_123p | 12492 |
| S1M10000038B09 | 3066 | SAU101653 | 5504 | SAU1c0042_orf_124p | 12493 |
| S1M10000038B12 | 3067 | SAU102764 | 5734 | SAU1c0044_orf_56p | 12625 |
| S1M10000038C01 | 3068 | SAU101652 | 5503 | SAU1c0042_orf_123p | 12492 |
| S1M10000038C02 | 3069 | SAU200657 | 5789 | #N/A | #N/A |
| S1M10000038C06 | 3070 | SAU101320 | 5420 | SAU1c0015_orf_16p | 12128 |
| S1M10000038C08 | 3071 | SAU102132 | 5605 | SAU1c0027_orf_19p | 12177 |
| S1M10000038C10 | 3072 | SAU101346 | 5427 | SAU1c0044_orf_43p | 12621 |
| S1M10000038C10 | 3072 | SAU101347 | 5428 | SAU1c0044_orf_44p | 12622 |
| S1M10000038C11 | 3073 | SAU102602 | 5708 | SAU1c0032_orf_5p | 12249 |
| S1M10000038C12 | 3074 | SAU101792 | 5533 | SAU1c0032_orf_13p | 12217 |
| S1M10000038D02 | 3075 | SAU101842 | 5557 | SAU1c0042_orf_9p | 12510 |
| S1M10000038D05 | 3076 | SAU101653 | 5504 | SAU1c0042_orf_124p | 12493 |
| S1M10000038D07 | 3077 | SAU101652 | 5503 | SAU1c0042_orf_123p | 12492 |
| S1M10000038D08 | 3078 | SAU101341 | 5424 | SAU1c0044_orf_38p | 12618 |
| S1M10000038D08 | 3078 | SAU301275 | 5892 | SAU3c1365_orf_2p | 13103 |
| S1M10000038D09 | 3079 | SAU100887 | 5350 | SAU1c0018_orf_15p | 12138 |
| S1M10000038D10 | 3080 | SAU101653 | 5504 | SAU1c0042_orf_124p | 12493 |
| S1M10000038D11 | 3081 | SAU101300 | 5415 | SAU1c0044_orf_113p | 12557 |
| S1M10000038D11 | 3081 | SAU101365 | 5432 | SAU1c0044_orf_112p | 12556 |
| S1M10000038D12 | 3082 | SAU100752 | 5322 | SAU1c0043_orf_183p | 12524 |
| S1M10000038D12 | 3082 | SAU100952 | 5358 | SAU1c0043_orf_182p | 12523 |
| S1M10000038E01 | 3083 | SAU101814 | 5551 | SAU1c0032_orf_32p | 12237 |
| S1M10000038E02 | 3084 | SAU101842 | 5557 | SAU1c0042_orf_9p | 12510 |
| S1M10000038E03 | 3085 | SAU200928 | 5798 | SAU2c0365_orf_5p | 12815 |
| S1M10000038E04 | 3086 | SAU101573 | 5485 | SAU1c0044_orf_212p | 12587 |
| S1M10000038E05 | 3087 | SAU101653 | 5504 | SAU1c0042_orf_124p | 12493 |
| S1M10000038E06 | 3088 | SAU102231 | 5614 | SAU1c0043_orf_18p | 12527 |
| S1M10000038E06 | 3088 | SAU102232 | 5615 | SAU1c0043_orf_19p | 12530 |
| S1M10000038E07 | 3089 | SAU200593 | 5786 | SAU2c0327_orf_1p | 12784 |
| S1M10000038E10 | 3090 | SAU201558 | 5823 | SAU2c0434_orf_5p | 12954 |
| S1M10000038E12 | 3091 | SAU100838 | 5337 | SAU1c0031_orf_12p | 12211 |
| S1M10000038E12 | 3091 | SAU100839 | 5338 | SAU1c0031_orf_11p | 12210 |
| S1M10000038F03 | 3092 | SAU102117 | 5603 | SAU1c0027_orf_6p | 12181 |
| S1M10000038F04 | 3093 | SAU100964 | 5363 | SAU1c0044_orf_86p | 12641 |
| S1M10000038F04 | 3093 | SAU100965 | 5364 | SAU1c0044_orf_87p | 12642 |
| S1M10000038F05 | 3094 | SAU100964 | 5363 | SAU1c0044_orf_86p | 12641 |
| S1M10000038F05 | 3094 | SAU100965 | 5364 | SAU1c0044_orf_87p | 12642 |
| S1M10000038F06 | 3095 | SAU101189 | 5392 | SAU1c0033_orf_25p | 12264 |
| S1M10000038F08 | 3096 | SAU101752 | 5522 | SAU1c0040_orf_85p | 12447 |
| S1M10000038F09 | 3097 | SAU201666 | 5830 | SAU2c0442_orf_11p | 12981 |
| S1M10000038F10 | 3098 | SAU101197 | 5393 | SAU1c0035_orf_60p | 12300 |
| S1M10000038F11 | 3099 | SAU100747 | 5320 | SAU1c0044_orf_235p | 12597 |
| S1M10000038F12 | 3100 | SAU202039 | 5843 | SAU2c0452_orf_20p | 13009 |
| S1M10000038G01 | 3101 | SAU101271 | 5411 | SAU1c0037_orf_90p | 12366 |
| S1M10000038G03 | 3102 | SAU100158 | 5238 | SAU1c0040_orf_80p | 12443 |
| S1M10000038G04 | 3103 | SAU100475 | 5276 | SAU1c0036_orf_61p | 12337 |
| S1M10000038G06 | 3104 | SAU101189 | 5392 | SAU1c0033_orf_25p | 12264 |
| S1M10000038G08 | 3105 | SAU200928 | 5798 | SAU2c0365_orf_5p | 12815 |
| S1M10000038G10 | 3106 | SAU102602 | 5708 | SAU1c0032_orf_5p | 12249 |
| S1M10000038G11 | 3107 | SAU100123 | 5230 | SAU1c0043_orf_189p | 12526 |
| S1M10000038G11 | 3107 | SAU102001 | 5586 | SAU1c0040_orf_102p | 12424 |
| S1M10000038G12 | 3108 | SAU101184 | 5391 | SAU1c0035_orf_80p | 12305 |
| S1M10000038H03 | 3109 | SAU101798 | 5538 | SAU1c0032_orf_18p | 12222 |
| S1M10000038H07 | 3110 | SAU101752 | 5522 | SAU1c0040_orf_85p | 12447 |
| S1M10000038H09 | 3111 | SAU102340 | 5647 | SAU1c0045_orf_149p | 12660 |
| S1M10000038H11 | 3112 | SAU101452 | 5455 | SAU1c0045_orf_247p | 12684 |
| S1M10000039A02 | 3113 | SAU100496 | 5279 | SAU1c0041_orf_83p | 12484 |
| S1M10000039A02 | 3113 | SAU301004 | 5882 | SAU3c1255_orf_1p | 13079 |
| S1M10000039A05 | 3114 | SAU100964 | 5363 | SAU1c0044_orf_86p | 12641 |
| S1M10000039A05 | 3114 | SAU100965 | 5364 | SAU1c0044_orf_87p | 12642 |
| S1M10000039A07 | 3115 | SAU100131 | 5232 | SAU1c0043_orf_156p | 12517 |
| S1M10000039A08 | 3116 | SAU100522 | 5284 | SAU1c0044_orf_249p | 12599 |
| S1M10000039A11 | 3117 | SAU100613 | 5299 | SAU1c0015_orf_14p | 12126 |
| S1M10000039A12 | 3118 | SAU301465 | 5896 | SAU3c1429_orf_4p | 13121 |
| S1M10000039B02 | 3119 | SAU101455 | 5456 | SAU1c0045_orf_250p | 12686 |
| S1M10000039B02 | 3119 | SAU200916 | 5797 | SAU2c0373_orf_4p | 12838 |
| S1M10000039B06 | 3120 | SAU102350 | 5649 | SAU1c0040_orf_36p | 12433 |
| S1M10000039B07 | 3121 | SAU101869 | 5566 | SAU1c0036_orf_24p | 12321 |
| S1M10000039B10 | 3122 | SAU101752 | 5522 | SAU1c0040_orf_85p | 12447 |
| S1M10000039B12 | 3123 | SAU301118 | 5886 | SAU3c1305_orf_3p | 13086 |
| S1M10000039C04 | 3124 | SAU102252 | 5621 | SAU1c0032_orf_48p | 12241 |
| S1M10000039C06 | 3125 | SAU100633 | 5301 | SAU1c0043_orf_147p | 12515 |
| S1M10000039C07 | 3126 | SAU200657 | 5789 | #N/A | #N/A |
| S1M10000039C08 | 3127 | SAU200468 | 5781 | SAU2c0429_orf_19p | 12937 |
| S1M10000039C09 | 3128 | SAU100414 | 5270 | SAU1c0022_orf_24p | 12148 |
| S1M10000039C10 | 3129 | SAU101543 | 5473 | SAU1c0037_orf_130p | 12346 |
| S1M10000039C11 | 3130 | SAU200657 | 5789 | #N/A | #N/A |
| S1M10000039D02 | 3131 | SAU201403 | 5815 | SAU2c0423_orf_3p | 12913 |
| S1M10000039D09 | 3132 | SAU102294 | 5639 | SAU1c0044_orf_288p | 12610 |
| S1M10000039D09 | 3132 | SAU301080 | 5885 | SAU3c1287_orf_1p | 13083 |
| S1M10000039D10 | 3133 | SAU100323 | 5261 | SAU1c0044_orf_171p | 12575 |
| S1M10000039E01 | 3134 | SAU102264 | 5628 | SAU1c0032_orf_60p | 12250 |
| S1M10000039E08 | 3135 | SAU100412 | 5269 | SAU1c0029_orf_38p | 12197 |
| S1M10000039E09 | 3136 | SAU100056 | 5223 | SAU1c0044_orf_176p | 12577 |
| S1M10000039E10 | 3137 | SAU102394 | 5659 | SAU1c0033_orf_41p | 12271 |
| S1M10000039E10 | 3137 | SAU301118 | 5886 | SAU3c1305_orf_3p | 13086 |
| S1M10000039E11 | 3138 | SAU102473 | 5680 | SAU1c0026_orf_30p | 12173 |
| S1M10000039F02 | 3139 | SAU201571 | 5824 | SAU2c0447_orf_17p | 12997 |
| S1M10000039F03 | 3140 | SAU102527 | 5693 | SAU1c0032_orf_9p | 12260 |
| S1M10000039F05 | 3141 | SAU100118 | 5229 | SAU1c0015_orf_13p | 12125 |
| S1M10000039F07 | 3142 | SAU102531 | 5694 | SAU1c0045_orf_186p | 12667 |
| S1M10000039F08 | 3143 | SAU100158 | 5238 | SAU1c0040_orf_80p | 12443 |
| S1M10000039F09 | 3144 | SAU200157 | 5776 | #N/A | #N/A |
| S1M10000039F10 | 3145 | SAU100059 | 5224 | SAU1c0045_orf_10p | 12652 |
| S1M10000039F12 | 3146 | SAU101565 | 5480 | SAU1c0022_orf_8p | 12151 |
| S1M10000039G03 | 3147 | SAU101653 | 5504 | SAU1c0042_orf_124p | 12493 |
| S1M10000039G04 | 3148 | SAU102292 | 5638 | SAU1c0038_orf_10p | 12368 |
| S1M10000039G07 | 3149 | SAU100952 | 5358 | SAU1c0043_orf_182p | 12523 |
| S1M10000039G07 | 3149 | SAU101039 | 5373 | SAU1c0043_orf_181p | 12522 |
| S1M10000039G10 | 3150 | SAU101815 | 5552 | SAU1c0032_orf_33p | 12238 |
| S1M10000039H02 | 3151 | SAU102585 | 5703 | SAU1c0044_orf_289p | 12611 |
| S1M10000039H02 | 3151 | SAU201773 | 5834 | SAU2c0446_orf_4p | 12996 |
| S1M10000039H03 | 3152 | SAU100313 | 5259 | SAU1c0045_orf_153p | 12661 |
| S1M10000039H03 | 3152 | SAU100359 | 5264 | SAU1c0032_orf_35p | 12239 |
| S1M10000039H03 | 3152 | SAU200297 | 5778 | SAU2c0274_orf_2p | 12739 |
| S1M10000039H04 | 3153 | SAU101752 | 5522 | SAU1c0040_orf_85p | 12447 |
| S1M10000039H06 | 3154 | SAU102283 | 5634 | SAU1c0006_orf_1p | 12119 |
| S1M10000039H07 | 3155 | SAU100793 | 5329 | SAU1c0028_orf_52p | 12188 |
| S1M10000039H07 | 3155 | SAU301433 | 5895 | SAU3c1420_orf_2p | 13118 |
| S1M10000039H08 | 3156 | SAU102440 | 5671 | SAU1c0045_orf_30p | 12692 |
| S1M10000040A04 | 3157 | SAU100040 | 5221 | SAU1c0043_orf_217p | 12533 |
| S1M10000040A05 | 3158 | SAU102671 | 5729 | SAU1c0024_orf_9p | 12161 |
| S1M10000040A07 | 3159 | SAU101028 | 5370 | SAU1c0043_orf_7p | 12552 |
| S1M10000040A08 | 3160 | SAU200157 | 5776 | #N/A | #N/A |
| S1M10000040A10 | 3161 | SAU103038 | 5757 | #N/A | #N/A |
| S1M10000040A11 | 3162 | SAU101801 | 5541 | #N/A | #N/A |
| S1M10000040B01 | 3163 | SAU101461 | 5457 | SAU1c0045_orf_234p | 12680 |
| S1M10000040B03 | 3164 | SAU102102 | 5600 | SAU1c0045_orf_340p | 12696 |
| S1M10000040B07 | 3165 | SAU101432 | 5448 | SAU1c0028_orf_27p | 12184 |
| S1M10000040B11 | 3166 | SAU101198 | 5394 | SAU1c0035_orf_61p | 12301 |
| S1M10000040C03 | 3167 | SAU201971 | 5841 | SAU2c0455_orf_17p | 13015 |
| S1M10000040C03 | 3167 | SAU301363 | 5894 | #N/A | #N/A |
| S1M10000040C04 | 3168 | SAU102551 | 5698 | SAU1c0045_orf_206p | 12672 |
| S1M10000040C05 | 3169 | SAU102534 | 5696 | #N/A | #N/A |
| S1M10000040C06 | 3170 | SAU101247 | 5405 | SAU1c0043_orf_136p | 12512 |
| S1M10000040C07 | 3171 | SAU100970 | 5365 | SAU1c0043_orf_197p | 12529 |
| S1M10000040C08 | 3172 | SAU101197 | 5393 | SAU1c0035_orf_60p | 12300 |
| S1M10000040C10 | 3173 | SAU201810 | 5836 | SAU2c0308_orf_2p | 12769 |
| S1M10000040C10 | 3173 | SAU202174 | 5845 | SAU2c0412_orf_3p | 12895 |
| S1M10000040C10 | 3173 | SAU301148 | 5888 | #N/A | #N/A |
| S1M10000040C11 | 3174 | SAU101869 | 5566 | SAU1c0036_orf_24p | 12321 |
| S1M10000040D01 | 3175 | SAU101806 | 5546 | SAU1c0032_orf_25p | 12230 |
| S1M10000040D01 | 3175 | SAU101807 | 5547 | SAU1c0032_orf_26p | 12231 |
| S1M10000040D03 | 3176 | SAU102200 | 5611 | SAU1c0045_orf_168p | 12665 |
| S1M10000040D03 | 3176 | SAU102201 | 5612 | SAU1c0045_orf_169p | 12666 |
| S1M10000040D08 | 3177 | SAU100633 | 5301 | SAU1c0043_orf_147p | 12515 |
| S1M10000040D09 | 3178 | SAU101632 | 5499 | SAU1c0039_orf_3p | 12407 |
| S1M10000040D11 | 3179 | SAU101546 | 5475 | SAU1c0037_orf_133p | 12349 |
| S1M10000040E01 | 3180 | SAU100916 | 5353 | SAU1c0038_orf_71p | 12394 |
| S1M10000040E02 | 3181 | SAU101845 | 5558 | SAU1c0042_orf_7p | 12506 |
| S1M10000040E04 | 3182 | SAU101546 | 5475 | SAU1c0037_orf_133p | 12349 |
| S1M10000040E05 | 3183 | SAU101632 | 5499 | SAU1c0039_orf_3p | 12407 |
| S1M10000040E06 | 3184 | SAU101545 | 5474 | SAU1c0037_orf_132p | 12348 |
| S1M10000040E07 | 3185 | SAU101006 | 5367 | SAU1c0028_orf_59p | 12190 |
| S1M10000040E09 | 3186 | SAU102605 | 5710 | SAU1c0041_orf_49p | 12470 |
| S1M10000040E10 | 3187 | SAU100714 | 5312 | SAU1c0044_orf_74p | 12635 |
| S1M10000040E11 | 3188 | SAU101226 | 5398 | SAU1c0035_orf_2p | 12298 |
| S1M10000040E12 | 3189 | SAU102503 | 5691 | SAU1c0045_orf_274p | 12690 |
| S1M10000040E12 | 3189 | SAU201380 | 5812 | SAU2c0426_orf_11p | 12922 |
| S1M10000040F01 | 3190 | SAU101226 | 5398 | SAU1c0035_orf_2p | 12298 |
| S1M10000040F02 | 3191 | SAU101614 | 5494 | SAU1c0044_orf_9p | 12649 |
| S1M10000040F03 | 3192 | SAU101592 | 5490 | SAU1c0039_orf_37p | 12406 |
| S1M10000040F04 | 3193 | SAU100123 | 5230 | SAU1c0043_orf_189p | 12526 |
| S1M10000040F04 | 3193 | SAU102001 | 5586 | SAU1c0040_orf_102p | 12424 |
| S1M10000040F04 | 3193 | SAU103159 | 5762 | SAU1c0045_orf_204p | 12670 |
| S1M10000040F04 | 3193 | SAU201827 | 5837 | SAU2c0449_orf_21p | 13002 |
| S1M10000040F05 | 3194 | SAU102232 | 5615 | SAU1c0043_orf_19p | 12530 |
| S1M10000040F06 | 3195 | SAU100547 | 5290 | SAU1c0032_orf_3p | 12240 |
| S1M10000040F08 | 3196 | SAU300713 | 5875 | SAU3c1104_orf_1p | 13058 |
| S1M10000040F09 | 3197 | SAU101610 | 5492 | SAU1c0044_orf_5p | 12629 |
| S1M10000040F12 | 3198 | SAU101752 | 5522 | SAU1c0040_orf_85p | 12447 |
| S1M10000040G01 | 3199 | SAU200006 | 5770 | SAU2c0157_orf_1p | 12723 |
| S1M10000040G02 | 3200 | SAU200561 | 5783 | SAU2c0324_orf_3p | 12779 |
| S1M10000040G02 | 3200 | SAU301773 | 5901 | SAU3c1509_orf_2p | 13157 |
| S1M10000040G04 | 3201 | SAU100414 | 5270 | SAU1c0022_orf_24p | 12148 |
| S1M10000040G07 | 3202 | SAU101543 | 5473 | SAU1c0037_orf_130p | 12346 |
| S1M10000040G08 | 3203 | SAU101752 | 5522 | SAU1c0040_orf_85p | 12447 |
| S1M10000040G12 | 3204 | SAU101421 | 5446 | SAU1c0042_orf_138p | 12498 |
| S1M10000040H02 | 3205 | SAU100773 | 5326 | SAU1c0038_orf_39p | 12377 |
| S1M10000040H03 | 3206 | SAU100414 | 5270 | SAU1c0022_orf_24p | 12148 |
| S1M10000040H04 | 3207 | SAU200914 | 5796 | SAU2c0373_orf_2p | 12837 |
| S1M10000040H05 | 3208 | SAU101400 | 5444 | SAU1c0036_orf_35p | 12326 |
| S1M10000040H07 | 3209 | SAU100921 | 5355 | SAU1c0038_orf_76p | 12396 |
| S1M10000040H10 | 3210 | SAU202039 | 5843 | SAU2c0452_orf_20p | 13009 |
| S1M10000041A03 | 3211 | SAU102054 | 5596 | SAU1c0039_orf_74p | 12417 |
| S1M10000041B02 | 3212 | SAU101592 | 5490 | SAU1c0039_orf_37p | 12406 |
| S1M10000041B03 | 3213 | SAU101592 | 5490 | SAU1c0039_orf_37p | 12406 |
| S1M10000041B05 | 3214 | SAU101798 | 5538 | SAU1c0032_orf_18p | 12222 |
| S1M10000041B06 | 3215 | SAU301620 | 5899 | SAU3c1478_orf_2p | 13140 |
| S1M10000041B07 | 3216 | SAU101145 | 5384 | SAU1c0035_orf_43p | 12299 |
| S1M10000041B12 | 3217 | SAU102725 | 5733 | SAU1c0036_orf_68p | 12338 |
| S1M10000041C08 | 3218 | SAU102607 | 5712 | SAU1c0041_orf_51p | 12472 |
| S1M10000041C08 | 3218 | SAU102944 | 5749 | SAU1c0041_orf_47p | 12468 |
| S1M10000041C10 | 3219 | SAU101784 | 5530 | SAU1c0037_orf_46p | 12355 |
| S1M10000041C11 | 3220 | SAU101570 | 5482 | SAU1c0044_orf_209p | 12584 |
| S1M10000041D06 | 3221 | SAU101777 | 5527 | SAU1c0037_orf_39p | 12352 |
| S1M10000041D07 | 3222 | SAU102639 | 5724 | #N/A | #N/A |
| S1M10000041D08 | 3223 | SAU200030 | 5772 | SAU2c0282_orf_3p | 12745 |
| S1M10000041D10 | 3224 | SAU101573 | 5485 | SAU1c0044_orf_212p | 12587 |
| S1M10000041D12 | 3225 | SAU102658 | 5726 | SAU1c0045_orf_121p | 12654 |
| S1M10000041E03 | 3226 | SAU101573 | 5485 | SAU1c0044_orf_212p | 12587 |
| S1M10000041E06 | 3227 | SAU101996 | 5584 | SAU1c0040_orf_99p | 12456 |
| S1M10000041E09 | 3228 | SAU201236 | 5808 | SAU2c0409_orf_10p | 12891 |
| S1M10000041E12 | 3229 | SAU100952 | 5358 | SAU1c0043_orf_182p | 12523 |
| S1M10000041F03 | 3230 | SAU101571 | 5483 | SAU1c0044_orf_210p | 12585 |
| S1M10000041F03 | 3230 | SAU101572 | 5484 | SAU1c0044_orf_211p | 12586 |
| S1M10000041F11 | 3231 | SAU102117 | 5603 | SAU1c0027_orf_6p | 12181 |
| S1M10000041E12 | 3232 | SAU102480 | 5684 | SAU1c0039_orf_100p | 12404 |
| S1M10000041F12 | 3232 | SAU102481 | 5685 | SAU1c0039_orf_99p | 12422 |
| S1M10000041G01 | 3233 | SAU100532 | 5287 | SAU1c0044_orf_198p | 12580 |
| S1M10000041G06 | 3234 | SAU102345 | 5648 | SAU1c0045_orf_125p | 12655 |
| S1M10000041G08 | 3235 | SAU101546 | 5475 | SAU1c0037_orf_133p | 12349 |
| S1M10000041G10 | 3236 | SAU100866 | 5344 | SAU1c0044_orf_100p | 12553 |
| S1M10000041G11 | 3237 | SAU101802 | 5542 | SAU1c0032_orf_22p | 12227 |
| S1M10000041H01 | 3238 | SAU101198 | 5394 | SAU1c0035_orf_61p | 12301 |
| S1M10000041H04 | 3239 | SAU100497 | 5280 | SAU1c0018_orf_3p | 12140 |
| S1M10000041H05 | 3240 | SAU100242 | 5246 | SAU1c0036_orf_5p | 12336 |
| S1M10000041H07 | 3241 | SAU102486 | 5687 | SAU1c0039_orf_93p | 12420 |
| S1M10000041H07 | 3241 | SAU102487 | 5688 | SAU1c0039_orf_92p | 12419 |
| S1M10000041H08 | 3242 | SAU301133 | 5887 | SAU3c1311_orf_3p | 13087 |
| S1M10000041H09 | 3243 | SAU103169 | 5763 | SAU1c0045_orf_230p | 12678 |
| S1M10000042A04 | 3244 | SAU201236 | 5808 | SAU2c0409_orf_10p | 12891 |
| S1M10000042A05 | 3245 | SAU102433 | 5668 | SAU1c0045_orf_37p | 12701 |
| S1M10000042A06 | 3246 | SAU102578 | 5701 | SAU1c0039_orf_61p | 12411 |
| S1M10000042A07 | 3247 | SAU100633 | 5301 | SAU1c0043_orf_147p | 12515 |
| S1M10000042A09 | 3248 | SAU101495 | 5467 | SAU1c0037_orf_65p | 12360 |
| S1M10000042A11 | 3249 | SAU101815 | 5552 | SAU1c0032_orf_33p | 12238 |
| S1M10000042A12 | 3250 | SAU101632 | 5499 | SAU1c0039_orf_3p | 12407 |
| S1M10000042B02 | 3251 | SAU202736 | 5851 | SAU2c0426_orf_7p | 12927 |
| S1M10000042B03 | 3252 | SAU101907 | 5574 | SAU1c0040_orf_79p | 12442 |
| S1M10000042B06 | 3253 | SAU101652 | 5503 | SAU1c0042_orf_123p | 12492 |
| S1M10000042B07 | 3254 | SAU101343 | 5425 | SAU1c0044_orf_40p | 12619 |
| S1M10000042B08 | 3255 | SAU100443 | 5274 | SAU1c0036_orf_55p | 12333 |
| S1M10000042B09 | 3256 | SAU101802 | 5542 | SAU1c0032_orf_22p | 12227 |
| S1M10000042B10 | 3257 | SAU100141 | 5236 | SAU1c0032_orf_8p | 12259 |
| S1M10000042B10 | 3257 | SAU102527 | 5693 | SAU1c0032_orf_9p | 12260 |
| S1M10000042B11 | 3258 | SAU101815 | 5552 | SAU1c0032_orf_33p | 12238 |
| S1M10000042B12 | 3259 | SAU101653 | 5504 | SAU1c0042_orf_124p | 12493 |
| S1M10000042C02 | 3260 | SAU100617 | 5300 | SAU1c0035_orf_102p | 12295 |
| S1M10000042C06 | 3261 | SAU102032 | 5591 | SAU1c0029_orf_47p | 12198 |
| S1M10000042C10 | 3262 | SAU101495 | 5467 | SAU1c0037_orf_65p | 12360 |
| S1M10000042C11 | 3263 | SAU103037 | 5756 | SAU1c0044_orf_303p | 12613 |
| S1M10000042D04 | 3264 | SAU101571 | 5483 | SAU1c0044_orf_210p | 12585 |
| S1M10000042D07 | 3265 | SAU101632 | 5499 | SAU1c0039_orf_3p | 12407 |
| S1M10000042D10 | 3266 | SAU203296 | 5863 | SAU2c0442_orf_18p | 12983 |
| S1M10000042D11 | 3267 | SAU102663 | 5727 | SAU1c0024_orf_2p | 12158 |
| S1M10000042E03 | 3268 | SAU101495 | 5467 | SAU1c0037_orf_65p | 12360 |
| S1M10000042E06 | 3269 | SAU102433 | 5668 | SAU1c0045_orf_37p | 12701 |
| S1M10000042E08 | 3270 | SAU103198 | 5766 | #N/A | #N/A |
| S1M10000042F01 | 3271 | SAU102117 | 5603 | SAU1c0027_orf_6p | 12181 |
| S1M10000042F02 | 3272 | SAU101891 | 5571 | SAU1c0034_orf_30p | 12281 |
| S1M10000042F05 | 3273 | SAU101652 | 5503 | SAU1c0042_orf_123p | 12492 |
| S1M10000042F06 | 3274 | SAU100773 | 5326 | SAU1c0038_orf_39p | 12377 |
| S1M10000042F08 | 3275 | SAU100162 | 5239 | SAU1c0044_orf_206p | 12583 |
| S1M10000042F09 | 3276 | SAU100246 | 5247 | SAU1c0042_orf_130p | 12496 |
| S1M10000042F09 | 3276 | SAU300998 | 5881 | SAU3c1253_orf_3p | 13077 |
| S1M10000042F10 | 3277 | SAU102602 | 5708 | SAU1c0032_orf_5p | 12249 |
| S1M10000042F11 | 3278 | SAU101653 | 5504 | SAU1c0042_orf_124p | 12493 |
| S1M10000042G01 | 3279 | SAU100140 | 5235 | SAU1c0032_orf_7p | 12258 |
| S1M10000042G03 | 3280 | SAU101220 | 5396 | SAU1c0044_orf_94p | 12645 |
| S1M10000042G08 | 3281 | SAU101907 | 5574 | SAU1c0040_orf_79p | 12442 |
| S1M10000042G09 | 3282 | SAU100158 | 5238 | SAU1c0040_orf_80p | 12443 |
| S1M10000042G12 | 3283 | SAU100521 | 5283 | SAU1c0044_orf_250p | 12600 |
| S1M10000042H05 | 3284 | SAU101491 | 5464 | SAU1c0025_orf_20p | 12165 |
| S1M10000042H07 | 3285 | SAU100433 | 5272 | SAU1c0040_orf_87p | 12449 |
| S1M10000042H11 | 3286 | SAU101632 | 5499 | SAU1c0039_orf_3p | 12407 |
| S1M10000043A02 | 3287 | SAU203001 | 5859 | SAU2c0412_orf_15p | 12894 |
| S1M10000043A03 | 3288 | SAU101400 | 5444 | SAU1c0036_orf_35p | 12326 |
| S1M10000043A04 | 3289 | SAU200088 | 5775 | SAU2c0159_orf_1p | 12724 |
| S1M10000043A06 | 3290 | SAU100077 | 5226 | SAU1c0043_orf_178p | 12520 |
| S1M10000043A07 | 3291 | SAU101752 | 5522 | SAU1c0040_orf_85p | 12447 |
| S1M10000043A08 | 3292 | SAU101543 | 5473 | SAU1c0037_orf_130p | 12346 |
| S1M10000043A10 | 3293 | SAU100865 | 5343 | SAU1c0044_orf_99p | 12648 |
| S1M10000043A11 | 3294 | SAU100865 | 5343 | SAU1c0044_orf_99p | 12648 |
| S1M10000043A12 | 3295 | SAU100887 | 5350 | SAU1c0018_orf_15p | 12138 |
| S1M10000043B01 | 3296 | SAU102059 | 5597 | SAU1c0034_orf_51p | 12286 |
| S1M10000043B02 | 3297 | SAU100059 | 5224 | SAU1c0045_orf_10p | 12652 |
| S1M10000043B07 | 3298 | SAU101922 | 5578 | SAU1c0040_orf_66p | 12438 |
| S1M10000043B07 | 3298 | SAU200345 | 5779 | SAU2c0292_orf_3p | 12751 |
| S1M10000043B08 | 3299 | SAU100313 | 5259 | SAU1c0045_orf_153p | 12661 |
| S1M10000043B08 | 3299 | SAU100359 | 5264 | SAU1c0032_orf_35p | 12239 |
| S1M10000043B08 | 3299 | SAU200297 | 5778 | SAU2c0274_orf_2p | 12739 |
| S1M10000043B09 | 3300 | SAU100521 | 5283 | SAU1c0044_orf_250p | 12600 |
| S1M10000043B10 | 3301 | SAU100436 | 5273 | SAU1c0023_orf_20p | 12154 |
| S1M10000043B12 | 3302 | SAU102142 | 5606 | SAU1c0041_orf_13p | 12457 |
| S1M10000043C02 | 3303 | SAU101777 | 5527 | SAU1c0037_orf_39p | 12352 |
| S1M10000043C07 | 3304 | SAU101784 | 5530 | SAU1c0037_orf_46p | 12355 |
| S1M10000043C11 | 3305 | SAU201403 | 5815 | SAU2c0423_orf_3p | 12913 |
| S1M10000043C12 | 3306 | SAU102059 | 5597 | SAU1c0034_orf_51p | 12286 |
| S1M10000043D01 | 3307 | SAU100866 | 5344 | SAU1c0044_orf_100p | 12553 |
| S1M10000043D02 | 3308 | SAU301465 | 5896 | SAU3c1429_orf_4p | 13121 |
| S1M10000043D04 | 3309 | SAU200928 | 5798 | SAU2c0365_orf_5p | 12815 |
| S1M10000043D10 | 3310 | SAU102631 | 5721 | SAU1c0045_orf_94p | 12712 |
| S1M10000043D12 | 3311 | SAU100496 | 5279 | SAU1c0041_orf_83p | 12484 |
| S1M10000043D12 | 3311 | SAU301004 | 5882 | SAU3c1255_orf_1p | 13079 |
| S1M10000043E02 | 3312 | SAU100793 | 5329 | SAU1c0028_orf_52p | 12188 |
| S1M10000043E02 | 3312 | SAU301433 | 5895 | SAU3c1420_orf_2p | 13118 |
| S1M10000043E03 | 3313 | SAU102032 | 5591 | SAU1c0029_orf_47p | 12198 |
| S1M10000043E05 | 3314 | SAU102067 | 5598 | SAU1c0034_orf_54p | 12287 |
| S1M10000043E07 | 3315 | SAU102117 | 5603 | SAU1c0027_orf_6p | 12181 |
| S1M10000043E08 | 3316 | SAU101344 | 5426 | SAU1c0044_orf_41p | 12620 |
| S1M10000043E10 | 3317 | SAU100186 | 5242 | SAU1c0036_orf_19p | 12317 |
| S1M10000043E11 | 3318 | SAU102498 | 5689 | SAU1c0045_orf_270p | 12688 |
| S1M10000043E11 | 3318 | SAU201381 | 5813 | SAU2c0426_orf_16p | 12923 |
| S1M10000043E12 | 3319 | SAU101752 | 5522 | SAU1c0040_orf_85p | 12447 |
| S1M10000043F01 | 3320 | SAU101797 | 5537 | SAU1c0032_orf_17p | 12221 |
| S1M10000043F01 | 3320 | SAU101798 | 5538 | SAU1c0032_orf_18p | 12222 |
| S1M10000043F05 | 3321 | SAU101543 | 5473 | SAU1c0037_orf_130p | 12346 |
| S1M10000043F07 | 3322 | SAU102447 | 5672 | SAU1c0045_orf_24p | 12685 |
| S1M10000043F07 | 3322 | SAU102448 | 5673 | SAU1c0045_orf_23p | 12681 |
| S1M10000043F08 | 3323 | SAU101344 | 5426 | SAU1c0044_orf_41p | 12620 |
| S1M10000043F09 | 3324 | SAU101801 | 5541 | #N/A | #N/A |
| S1M10000043G01 | 3325 | SAU100059 | 5224 | SAU1c0045_orf_10p | 12652 |
| S1M10000043G04 | 3326 | SAU102423 | 5667 | SAU1c0030_orf_23p | 12208 |
| S1M10000043G05 | 3327 | SAU102602 | 5708 | SAU1c0032_orf_5p | 12249 |
| S1M10000043G09 | 3328 | SAU102585 | 5703 | SAU1c0044_orf_289p | 12611 |
| S1M10000043G09 | 3328 | SAU201773 | 5834 | SAU2c0446_orf_4p | 12996 |
| S1M10000043G10 | 3329 | SAU100158 | 5238 | SAU1c0040_orf_80p | 12443 |
| S1M10000043H01 | 3330 | SAU101797 | 5537 | SAU1c0032_orf_17p | 12221 |
| S1M10000043H01 | 3330 | SAU101798 | 5538 | SAU1c0032_orf_18p | 12222 |
| S1M10000043H03 | 3331 | SAU101803 | 5543 | SAU1c0032_orf_23p | 12228 |
| S1M10000043H03 | 3331 | SAU101804 | 5544 | #N/A | #N/A |
| S1M10000043H04 | 3332 | SAU100128 | 5231 | #N/A | #N/A |
| S1M10000043H04 | 3332 | SAU101549 | 5476 | SAU1c0043_orf_64p | 12549 |
| S1M10000043H04 | 3332 | SAU101576 | 5488 | SAU1c0044_orf_105p | 12554 |
| S1M10000043H05 | 3333 | SAU200058 | 5773 | SAU2c0134_orf_1p | 12719 |
| S1M10000043H05 | 3333 | SAU200059 | 5774 | SAU2c0134_orf_3p | 12720 |
| S1M10000043H06 | 3334 | SAU102417 | 5663 | SAU1c0030_orf_17p | 12204 |
| S1M10000043H06 | 3334 | SAU102863 | 5737 | #N/A | #N/A |
| S1M10000043H09 | 3335 | SAU302950 | 5914 | SAU3c1512_orf_12p | 13160 |
| S1M10000043H10 | 3336 | SAU101024 | 5369 | SAU1c0045_orf_90p | 12711 |
| S1M10000043H11 | 3337 | SAU101907 | 5574 | SAU1c0040_orf_79p | 12442 |
| S1M10000044A02 | 3338 | SAU101092 | 5381 | SAU1c0028_orf_9p | 12192 |
| S1M10000044A06 | 3339 | SAU101777 | 5527 | SAU1c0037_orf_39p | 12352 |
| S1M10000044A08 | 3340 | SAU101175 | 5388 | SAU1c0031_orf_1p | 12213 |
| S1M10000044A09 | 3341 | SAU102292 | 5638 | SAU1c0038_orf_10p | 12368 |
| S1M10000044A11 | 3342 | SAU102602 | 5708 | SAU1c0032_orf_5p | 12249 |
| S1M10000044A12 | 3343 | SAU101791 | 5532 | SAU1c0032_orf_12p | 12216 |
| S1M10000044B01 | 3344 | SAU102268 | 5630 | SAU1c0032_orf_63p | 12252 |
| S1M10000044B02 | 3345 | SAU101968 | 5581 | SAU1c0028_orf_43p | 12187 |
| S1M10000044B05 | 3346 | SAU100690 | 5309 | #N/A | #N/A |
| S1M10000044B06 | 3347 | SAU100547 | 5290 | SAU1c0032_orf_3p | 12240 |
| S1M10000044B06 | 3347 | SAU102881 | 5740 | SAU1c0032_orf_4p | 12242 |
| S1M10000044B08 | 3348 | SAU101752 | 5522 | SAU1c0040_orf_85p | 12447 |
| S1M10000044B11 | 3349 | SAU101573 | 5485 | SAU1c0044_orf_212p | 12587 |
| S1M10000044B12 | 3350 | SAU201197 | 5806 | SAU2c0429_orf_2p | 12938 |
| S1M10000044C04 | 3351 | SAU101793 | 5534 | SAU1c0032_orf_14p | 12218 |
| S1M10000044C06 | 3352 | SAU101614 | 5494 | SAU1c0044_orf_9p | 12649 |
| S1M10000044C07 | 3353 | SAU100964 | 5363 | SAU1c0044_orf_86p | 12641 |
| S1M10000044C07 | 3353 | SAU100965 | 5364 | SAU1c0044_orf_87p | 12642 |
| S1M10000044C08 | 3354 | SAU102909 | 5743 | SAU1c0036_orf_16p | 12315 |
| S1M10000044C11 | 3355 | SAU101793 | 5534 | SAU1c0032_orf_14p | 12218 |
| S1M10000044C12 | 3356 | SAU102280 | 5632 | SAU1c0038_orf_3p | 12378 |
| S1M10000044D01 | 3357 | SAU100546 | 5289 | SAU1c0032_orf_2p | 12235 |
| S1M10000044D01 | 3357 | SAU102880 | 5739 | SAU1c0032_orf_1p | 12224 |
| S1M10000044D04 | 3358 | SAU101793 | 5534 | SAU1c0032_orf_14p | 12218 |
| S1M10000044D06 | 3359 | SAU101300 | 5415 | SAU1c0044_orf_113p | 12557 |
| S1M10000044D06 | 3359 | SAU101365 | 5432 | SAU1c0044_orf_112p | 12556 |
| S1M10000044D08 | 3360 | SAU102270 | 5631 | SAU1c0032_orf_65p | 12253 |
| S1M10000044D09 | 3361 | SAU100131 | 5232 | SAU1c0043_orf_156p | 12517 |
| S1M10000044D10 | 3362 | SAU201197 | 5806 | SAU2c0429_orf_2p | 12938 |
| S1M10000044D11 | 3363 | SAU101571 | 5483 | SAU1c0044_orf_210p | 12585 |
| S1M10000044D12 | 3364 | SAU102231 | 5614 | SAU1c0043_orf_18p | 12527 |
| S1M10000044D12 | 3364 | SAU102232 | 5615 | SAU1c0043_orf_19p | 12530 |
| S1M10000044E01 | 3365 | SAU101371 | 5435 | SAU1c0033_orf_7p | 12275 |
| S1M10000044E02 | 3366 | SAU102283 | 5634 | SAU1c0006_orf_1p | 12119 |
| S1M10000044E06 | 3367 | SAU201571 | 5824 | SAU2c0447_orf_17p | 12997 |
| S1M10000044E07 | 3368 | SAU301829 | 5902 | SAU3c1515_orf_7p | 13162 |
| S1M10000044E09 | 3369 | SAU101320 | 5420 | SAU1c0015_orf_16p | 12128 |
| S1M10000044E10 | 3370 | SAU100497 | 5280 | SAU1c0018_orf_3p | 12140 |
| S1M10000044E11 | 3371 | SAU101270 | 5410 | SAU1c0037_orf_89p | 12365 |
| S1M10000044E02 | 3372 | SAU101632 | 5499 | SAU1c0039_orf_3p | 12407 |
| S1M10000044F06 | 3373 | SAU101756 | 5524 | SAU1c0040_orf_82p | 12445 |
| S1M10000044F08 | 3374 | SAU101262 | 5406 | SAU1c0042_orf_113p | 12488 |
| S1M10000044F10 | 3375 | SAU101092 | 5381 | SAU1c0028_orf_9p | 12192 |
| S1M10000044F10 | 3375 | SAU202882 | 5855 | SAU2c0381_orf_3p | 12848 |
| S1M10000044G02 | 3376 | SAU102933 | 5744 | SAU1c0039_orf_62p | 12412 |
| S1M10000044G05 | 3377 | SAU101242 | 5404 | SAU1c0044_orf_18p | 12578 |
| S1M10000044G08 | 3378 | SAU102601 | 5707 | SAU1c0041_orf_46p | 12467 |
| S1M10000044G08 | 3378 | SAU102606 | 5711 | SAU1c0041_orf_50p | 12471 |
| S1M10000044G10 | 3379 | SAU101092 | 5381 | SAU1c0028_orf_9p | 12192 |
| S1M10000044G10 | 3379 | SAU202882 | 5855 | SAU2c0381_orf_3p | 12848 |
| S1M10000044G11 | 3380 | SAU101546 | 5475 | SAU1c0037_orf_133p | 12349 |
| S1M10000044H06 | 3381 | SAU100964 | 5363 | SAU1c0044_orf_86p | 12641 |
| S1M10000044H06 | 3381 | SAU100965 | 5364 | SAU1c0044_orf_87p | 12642 |
| S1M10000044H07 | 3382 | SAU100595 | 5294 | SAU1c0043_orf_62p | 12547 |
| S1M10000044H08 | 3383 | SAU101543 | 5473 | SAU1c0037_orf_130p | 12346 |
| S1M10000044H09 | 3384 | SAU100886 | 5349 | SAU1c0018_orf_16p | 12139 |
| S1M10000044H09 | 3384 | SAU100887 | 5350 | SAU1c0018_orf_15p | 12138 |
| S1M10000044H10 | 3385 | SAU101573 | 5485 | SAU1c0044_orf_212p | 12587 |
| S1M10000044H11 | 3386 | SAU102578 | 5701 | SAU1c0039_orf_61p | 12411 |
| S1M10000045A02 | 3387 | SAU100866 | 5344 | SAU1c0044_orf_100p | 12553 |
| S1M10000045A06 | 3388 | SAU102602 | 5708 | SAU1c0032_orf_5p | 12249 |
| S1M10000045A07 | 3389 | SAU102378 | 5653 | SAU1c0040_orf_61p | 12437 |
| S1M10000045A08 | 3390 | SAU102336 | 5646 | SAU1c0045_orf_146p | 12659 |
| S1M10000045A12 | 3391 | SAU201765 | 5833 | SAU2c0309_orf_5p | 12770 |
| S1M10000045B01 | 3392 | SAU101791 | 5532 | SAU1c0032_orf_12p | 12216 |
| S1M10000045B02 | 3393 | SAU100546 | 5289 | SAU1c0032_orf_2p | 12235 |
| S1M10000045B03 | 3394 | SAU200928 | 5798 | SAU2c0365_orf_5p | 12815 |
| S1M10000045B07 | 3395 | SAU101803 | 5543 | SAU1c0032_orf_23p | 12228 |
| S1M10000045B10 | 3396 | SAU200468 | 5781 | SAU2c0429_orf_19p | 12937 |
| S1M10000045B11 | 3397 | SAU101571 | 5483 | SAU1c0044_orf_210p | 12585 |
| S1M10000045B12 | 3398 | SAU101571 | 5483 | SAU1c0044_orf_210p | 12585 |
| S1M10000045C02 | 3399 | SAU100690 | 5309 | #N/A | #N/A |
| S1M10000045C03 | 3400 | SAU100887 | 5350 | SAU1c0018_orf_15p | 12138 |
| S1M10000045C04 | 3401 | SAU102286 | 5636 | SAU1c0038_orf_6p | 12393 |
| S1M10000045C04 | 3401 | SAU102287 | 5637 | SAU1c0038_orf_7p | 12398 |
| S1M10000045C05 | 3402 | SAU101571 | 5483 | SAU1c0044_orf_210p | 12585 |
| S1M10000045C07 | 3403 | SAU101573 | 5485 | SAU1c0044_orf_212p | 12587 |
| S1M10000045C09 | 3404 | SAU101744 | 5520 | SAU1c0037_orf_94p | 12367 |
| S1M10000045C09 | 3404 | SAU300191 | 5868 | SAU3c0672_orf_1p | 13037 |
| S1M10000045D01 | 3405 | SAU101893 | 5572 | SAU1c0034_orf_32p | 12282 |
| S1M10000045D03 | 3406 | SAU101599 | 5491 | SAU1c0041_orf_5p | 12478 |
| S1M10000045D07 | 3407 | SAU101491 | 5464 | SAU1c0025_orf_20p | 12165 |
| S1M10000045D08 | 3408 | SAU102117 | 5603 | SAU1c0027_orf_6p | 12181 |
| S1M10000045D09 | 3409 | SAU101572 | 5484 | SAU1c0044_orf_211p | 12586 |
| S1M10000045D10 | 3410 | SAU100866 | 5344 | SAU1c0044_orf_100p | 12553 |
| S1M10000045D11 | 3411 | SAU101492 | 5465 | SAU1c0025_orf_21p | 12166 |
| S1M10000045D11 | 3411 | SAU101493 | 5466 | SAU1c0025_orf_22p | 12167 |
| S1M10000045D12 | 3412 | SAU101800 | 5540 | SAU1c0032_orf_20p | 12225 |
| S1M10000045D12 | 3412 | SAU101801 | 5541 | #N/A | #N/A |
| S1M10000045E04 | 3413 | SAU102132 | 5605 | SAU1c0027_orf_19p | 12177 |
| S1M10000045E05 | 3414 | SAU101491 | 5464 | SAU1c0025_orf_20p | 12165 |
| S1M10000045E08 | 3415 | SAU201752 | 5832 | SAU2c0436_orf_19p | 12963 |
| S1M10000045E09 | 3416 | SAU101794 | 5535 | #N/A | #N/A |
| S1M10000045E10 | 3417 | SAU101756 | 5524 | SAU1c0040_orf_82p | 12445 |
| S1M10000045E11 | 3418 | SAU100970 | 5365 | SAU1c0043_orf_197p | 12529 |
| S1M10000045E12 | 3419 | SAU100547 | 5290 | SAU1c0032_orf_3p | 12240 |
| S1M10000045F04 | 3420 | SAU102241 | 5617 | SAU1c0043_orf_25p | 12539 |
| S1M10000045F05 | 3421 | SAU100114 | 5228 | SAU1c0043_orf_225p | 12535 |
| S1M10000045F08 | 3422 | SAU200657 | 5789 | #N/A | #N/A |
| S1M10000045F11 | 3423 | SAU102117 | 5603 | SAU1c0027_orf_6p | 12181 |
| S1M10000045F12 | 3424 | SAU101806 | 5546 | SAU1c0032_orf_25p | 12230 |
| S1M10000045G03 | 3425 | SAU102059 | 5597 | SAU1c0034_orf_51p | 12286 |
| S1M10000045G06 | 3426 | SAU101400 | 5444 | SAU1c0036_orf_35p | 12326 |
| S1M10000045G07 | 3427 | SAU101561 | 5479 | SAU1c0022_orf_4p | 12149 |
| S1M10000045G08 | 3428 | SAU100690 | 5309 | #N/A | #N/A |
| S1M10000045G10 | 3429 | SAU201571 | 5824 | SAU2c0447_orf_17p | 12997 |
| S1M10000045G12 | 3430 | SAU101400 | 5444 | SAU1c0036_orf_35p | 12326 |
| S1M10000045H06 | 3431 | SAU200928 | 5798 | SAU2c0365_orf_5p | 12815 |
| S1M10000045H10 | 3432 | SAU100414 | 5270 | SAU1c0022_orf_24p | 12148 |
| S1M10000045H11 | 3433 | SAU100414 | 5270 | SAU1c0022_orf_24p | 12148 |
| S1M10000046A03 | 3434 | SAU202731 | 5850 | #N/A | #N/A |
| S1M10000046A04 | 3435 | SAU100062 | 5225 | SAU1c0035_orf_98p | 12309 |
| S1M10000046A04 | 3435 | SAU100231 | 5245 | #N/A | #N/A |
| S1M10000046A06 | 3436 | SAU101383 | 5438 | SAU1c0022_orf_20p | 12147 |
| S1M10000046A08 | 3437 | SAU200994 | 5802 | SAU2c0428_orf_4p | 12935 |
| S1M10000046A09 | 3438 | SAU100315 | 5260 | SAU1c0037_orf_62p | 12358 |
| S1M10000046A11 | 3439 | SAU100432 | 5271 | SAU1c0040_orf_88p | 12450 |
| S1M10000046A11 | 3439 | SAU100433 | 5272 | SAU1c0040_orf_87p | 12449 |
| S1M10000046A12 | 3440 | SAU101814 | 5551 | SAU1c0032_orf_32p | 12237 |
| S1M10000046B01 | 3441 | SAU102334 | 5645 | SAU1c0045_orf_144p | 12658 |
| S1M10000046B03 | 3442 | SAU101039 | 5373 | SAU1c0043_orf_181p | 12522 |
| S1M10000046B04 | 3443 | SAU101797 | 5537 | SAU1c0032_orf_17p | 12221 |
| S1M10000046B05 | 3444 | SAU101156 | 5386 | SAU1c0036_orf_12p | 12311 |
| S1M10000046B07 | 3445 | SAU100866 | 5344 | SAU1c0044_orf_100p | 12553 |
| S1M10000046B08 | 3446 | SAU101365 | 5432 | SAU1c0044_orf_112p | 12556 |
| S1M10000046B09 | 3447 | SAU100866 | 5344 | SAU1c0044_orf_100p | 12553 |
| S1M10000046B11 | 3448 | SAU102541 | 5697 | SAU1c0045_orf_195p | 12668 |
| S1M10000046B12 | 3449 | SAU101400 | 5444 | SAU1c0036_orf_35p | 12326 |
| S1M10000046C02 | 3450 | SAU200601 | 5787 | #N/A | #N/A |
| S1M10000046C04 | 3451 | SAU100118 | 5229 | SAU1c0015_orf_13p | 12125 |
| S1M10000046C05 | 3452 | SAU101159 | 5387 | SAU1c0036_orf_46p | 12331 |
| S1M10000046C06 | 3453 | SAU102585 | 5703 | SAU1c0044_orf_289p | 12611 |
| S1M10000046C06 | 3453 | SAU201773 | 5834 | SAU2c0446_orf_4p | 12996 |
| S1M10000046C07 | 3454 | SAU102602 | 5708 | SAU1c0032_orf_5p | 12249 |
| S1M10000046C08 | 3455 | SAU100414 | 5270 | SAU1c0022_orf_24p | 12148 |
| S1M10000046C11 | 3456 | SAU102144 | 5608 | SAU1c0041_orf_15p | 12459 |
| S1M10000046C12 | 3457 | SAU100313 | 5259 | SAU1c0045_orf_153p | 12661 |
| S1M10000046C12 | 3457 | SAU100359 | 5264 | SAU1c0032_orf_35p | 12239 |
| S1M10000046D01 | 3458 | SAU100158 | 5238 | SAU1c0040_orf_80p | 12443 |
| S1M10000046D02 | 3459 | SAU102144 | 5608 | SAU1c0041_orf_15p | 12459 |
| S1M10000046D03 | 3460 | SAU101857 | 5560 | SAU1c0044_orf_156p | 12569 |
| S1M10000046D04 | 3461 | SAU102433 | 5668 | SAU1c0045_orf_37p | 12701 |
| S1M10000046D05 | 3462 | SAU102602 | 5708 | SAU1c0032_orf_5p | 12249 |
| S1M10000046D08 | 3463 | SAU101495 | 5467 | SAU1c0037_orf_65p | 12360 |
| S1M10000046D09 | 3464 | SAU100679 | 5305 | SAU1c0018_orf_14p | 12137 |
| S1M10000046D10 | 3465 | SAU101808 | 5548 | SAU1c0032_orf_27p | 12232 |
| S1M10000046D11 | 3466 | SAU100496 | 5279 | SAU1c0041_orf_83p | 12484 |
| S1M10000046D11 | 3466 | SAU301004 | 5882 | SAU3c1255_orf_1p | 13079 |
| S1M10000046D12 | 3467 | SAU100496 | 5279 | SAU1c0041_orf_83p | 12484 |
| S1M10000046D12 | 3467 | SAU301004 | 5882 | SAU3c1255_orf_1p | 13079 |
| S1M10000046E01 | 3468 | SAU101610 | 5492 | SAU1c0044_orf_5p | 12629 |
| S1M10000046E02 | 3469 | SAU101857 | 5560 | SAU1c0044_orf_156p | 12569 |
| S1M10000046E04 | 3470 | SAU101800 | 5540 | SAU1c0032_orf_20p | 12225 |
| S1M10000046E04 | 3470 | SAU101801 | 5541 | #N/A | #N/A |
| S1M10000046E07 | 3471 | SAU100521 | 5283 | SAU1c0044_orf_250p | 12600 |
| S1M10000046E08 | 3472 | SAU102283 | 5634 | SAU1c0006_orf_1p | 12119 |
| S1M10000046E10 | 3473 | SAU102283 | 5634 | SAU1c0006_orf_1p | 12119 |
| S1M10000046F01 | 3474 | SAU101028 | 5370 | SAU1c0043_orf_7p | 12552 |
| S1M10000046F02 | 3475 | SAU100546 | 5289 | SAU1c0032_orf_2p | 12235 |
| S1M10000046F02 | 3475 | SAU102880 | 5739 | SAU1c0032_orf_1p | 12224 |
| S1M10000046F05 | 3476 | SAU102671 | 5729 | SAU1c0024_orf_9p | 12161 |
| S1M10000046F06 | 3477 | SAU100702 | 5310 | SAU1c0029_orf_34p | 12196 |
| S1M10000046F06 | 3477 | SAU300825 | 5878 | SAU3c1171_orf_1p | 13068 |
| S1M10000046F08 | 3478 | SAU102297 | 5640 | SAU1c0045_orf_41p | 12704 |
| S1M10000046F09 | 3479 | SAU100517 | 5282 | #N/A | #N/A |
| S1M10000046F10 | 3480 | SAU102059 | 5597 | SAU1c0034_orf_51p | 12286 |
| S1M10000046F12 | 3481 | SAU101365 | 5432 | SAU1c0044_orf_112p | 12556 |
| S1M10000046G01 | 3482 | SAU200752 | 5795 | SAU2c0354_orf_5p | 12809 |
| S1M10000046G01 | 3482 | SAU300975 | 5880 | SAU3c1240_orf_3p | 13075 |
| S1M10000046G02 | 3483 | SAU101571 | 5483 | SAU1c0044_orf_210p | 12585 |
| S1M10000046G03 | 3484 | SAU100773 | 5326 | SAU1c0038_orf_39p | 12377 |
| S1M10000046G04 | 3485 | SAU100436 | 5273 | SAU1c0023_orf_20p | 12154 |
| S1M10000046G07 | 3486 | SAU101866 | 5564 | SAU1c0036_orf_21p | 12319 |
| S1M10000046G09 | 3487 | SAU102663 | 5727 | SAU1c0024_orf_2p | 12158 |
| S1M10000046G10 | 3488 | SAU101756 | 5524 | SAU1c0040_orf_82p | 12445 |
| S1M10000046H01 | 3489 | SAU101445 | 5452 | SAU1c0038_orf_47p | 12382 |
| S1M10000046H01 | 3489 | SAU101446 | 5453 | SAU1c0038_orf_48p | 12383 |
| S1M10000046H10 | 3490 | SAU200928 | 5798 | SAU2c0365_orf_5p | 12815 |
| S1M10000047A03 | 3491 | SAU100157 | 5237 | SAU1c0040_orf_81p | 12444 |
| S1M10000047A04 | 3492 | SAU300572 | 5873 | SAU3c1019_orf_1p | 13051 |
| S1M10000047A05 | 3493 | SAU101805 | 5545 | SAU1c0032_orf_24p | 12229 |
| S1M10000047A06 | 3494 | SAU201775 | 5835 | SAU2c0446_orf_4p | 12996 |
| S1M10000047A06 | 3494 | SAU301030 | 5883 | SAU3c1268_orf_1p | 13080 |
| S1M10000047A07 | 3495 | SAU101807 | 5547 | SAU1c0032_orf_26p | 12231 |
| S1M10000047A08 | 3496 | SAU102602 | 5708 | SAU1c0032_orf_5p | 12249 |
| S1M10000047A09 | 3497 | SAU101271 | 5411 | SAU1c0037_orf_90p | 12366 |
| S1M10000047A10 | 3498 | SAU100751 | 5321 | SAU1c0036_orf_59p | 12335 |
| S1M10000047A11 | 3499 | SAU100131 | 5232 | SAU1c0043_orf_156p | 12517 |
| S1M10000047A12 | 3500 | SAU100300 | 5253 | SAU1c0040_orf_90p | 12451 |
| S1M10000047B02 | 3501 | SAU101791 | 5532 | SAU1c0032_orf_12p | 12216 |
| S1M10000047B04 | 3502 | SAU101366 | 5433 | SAU1c0033_orf_2p | 12266 |
| S1M10000047B05 | 3503 | SAU101545 | 5474 | SAU1c0037_orf_132p | 12348 |
| S1M10000047B06 | 3504 | SAU200006 | 5770 | SAU2c0157_orf_1p | 12723 |
| S1M10000047B08 | 3505 | SAU101808 | 5548 | SAU1c0032_orf_27p | 12232 |
| S1M10000047B09 | 3506 | SAU100131 | 5232 | SAU1c0043_orf_156p | 12517 |
| S1M10000047B10 | 3507 | SAU101156 | 5386 | SAU1c0036_orf_12p | 12311 |
| S1M10000047B12 | 3508 | SAU101868 | 5565 | SAU1c0036_orf_23p | 12320 |
| S1M10000047C01 | 3509 | SAU100275 | 5252 | SAU1c0036_orf_15p | 12314 |
| S1M10000047C02 | 3510 | SAU101156 | 5386 | SAU1c0036_orf_12p | 12311 |
| S1M10000047C03 | 3511 | SAU200006 | 5770 | SAU2c0157_orf_1p | 12723 |
| S1M10000047C04 | 3512 | SAU101271 | 5411 | SAU1c0037_orf_90p | 12366 |
| S1M10000047C06 | 3513 | SAU101815 | 5552 | SAU1c0032_orf_33p | 12238 |
| S1M10000047C08 | 3514 | SAU101808 | 5548 | SAU1c0032_orf_27p | 12232 |
| S1M10000047C09 | 3515 | SAU101271 | 5411 | SAU1c0037_orf_90p | 12366 |
| S1M10000047C11 | 3516 | SAU201775 | 5835 | SAU2c0446_orf_4p | 12996 |
| S1M10000047C11 | 3516 | SAU301030 | 5883 | SAU3c1268_orf_1p | 13080 |
| S1M10000047C12 | 3517 | SAU101868 | 5565 | SAU1c0036_orf_23p | 12320 |
| S1M10000047D02 | 3518 | SAU101387 | 5440 | SAU1c0038_orf_52p | 12386 |
| S1M10000047D03 | 3519 | SAU101868 | 5565 | SAU1c0036_orf_23p | 12320 |
| S1M10000047D04 | 3520 | SAU100157 | 5237 | SAU1c0040_orf_81p | 12444 |
| S1M10000047D05 | 3521 | SAU101271 | 5411 | SAU1c0037_orf_90p | 12366 |
| S1M10000047D09 | 3522 | SAU100921 | 5355 | SAU1c0038_orf_76p | 12396 |
| S1M10000047D10 | 3523 | SAU201571 | 5824 | SAU2c0447_orf_17p | 12997 |
| S1M10000047D11 | 3524 | SAU103038 | 5757 | #N/A | #N/A |
| S1M10000047D12 | 3525 | SAU101175 | 5388 | SAU1c0031_orf_1p | 12213 |
| S1M10000047E01 | 3526 | SAU100158 | 5238 | SAU1c0040_orf_80p | 12443 |
| S1M10000047E02 | 3527 | SAU100131 | 5232 | SAU1c0043_orf_156p | 12517 |
| S1M10000047E03 | 3528 | SAU102452 | 5676 | SAU1c0045_orf_20p | 12674 |
| S1M10000047E04 | 3529 | SAU101996 | 5584 | SAU1c0040_orf_99p | 12456 |
| S1M10000047E05 | 3530 | SAU101815 | 5552 | SAU1c0032_orf_33p | 12238 |
| S1M10000047E06 | 3531 | SAU101807 | 5547 | SAU1c0032_orf_26p | 12231 |
| S1M10000047E08 | 3532 | SAU102200 | 5611 | SAU1c0045_orf_168p | 12665 |
| S1M10000047E09 | 3533 | SAU100810 | 5333 | SAU1c0037_orf_11p | 12343 |
| S1M10000047E10 | 3534 | SAU200928 | 5798 | SAU2c0365_orf_5p | 12815 |
| S1M10000047E11 | 3535 | SAU101156 | 5386 | SAU1c0036_orf_12p | 12311 |
| S1M10000047E12 | 3536 | SAU200928 | 5798 | SAU2c0365_orf_5p | 12815 |
| S1M10000047F02 | 3537 | SAU100158 | 5238 | SAU1c0040_orf_80p | 12443 |
| S1M10000047F03 | 3538 | SAU101242 | 5404 | SAU1c0044_orf_18p | 12578 |
| S1M10000047F04 | 3539 | SAU300572 | 5873 | SAU3c1019_orf_1p | 13051 |
| S1M10000047F05 | 3540 | SAU101271 | 5411 | SAU1c0037_orf_90p | 12366 |
| S1M10000047F06 | 3541 | SAU200928 | 5798 | SAU2c0365_orf_5p | 12815 |
| S1M10000047F07 | 3542 | SAU102602 | 5708 | SAU1c0032_orf_5p | 12249 |
| S1M10000047F08 | 3543 | SAU101242 | 5404 | SAU1c0044_orf_18p | 12578 |
| S1M10000047F09 | 3544 | SAU100157 | 5237 | SAU1c0040_orf_81p | 12444 |
| S1M10000047F10 | 3545 | SAU201571 | 5824 | SAU2c0447_orf_17p | 12997 |
| S1M10000047F11 | 3546 | SAU101805 | 5545 | SAU1c0032_orf_24p | 12229 |
| S1M10000047F12 | 3547 | SAU101808 | 5548 | SAU1c0032_orf_27p | 12232 |
| S1M10000047G01 | 3548 | SAU101369 | 5434 | SAU1c0033_orf_5p | 12274 |
| S1M10000047G02 | 3549 | SAU100141 | 5236 | SAU1c0032_orf_8p | 12259 |
| S1M10000047G04 | 3550 | SAU101341 | 5424 | SAU1c0044_orf_38p | 12618 |
| S1M10000047G05 | 3551 | SAU100684 | 5306 | SAU1c0044_orf_68p | 12632 |
| S1M10000047G05 | 3551 | SAU100685 | 5307 | SAU1c0044_orf_69p | 12633 |
| S1M10000047G06 | 3552 | SAU100141 | 5236 | SAU1c0032_orf_8p | 12259 |
| S1M10000047G07 | 3553 | SAU101798 | 5538 | SAU1c0032_orf_18p | 12222 |
| S1M10000047G08 | 3554 | SAU101028 | 5370 | SAU1c0043_orf_7p | 12552 |
| S1M10000047G09 | 3555 | SAU100810 | 5333 | SAU1c0037_orf_11p | 12343 |
| S1M10000047G10 | 3556 | SAU102607 | 5712 | SAU1c0041_orf_51p | 12472 |
| S1M10000047H03 | 3557 | SAU201571 | 5824 | SAU2c0447_orf_17p | 12997 |
| S1M10000047H04 | 3558 | SAU102200 | 5611 | SAU1c0045_orf_168p | 12665 |
| S1M10000047H05 | 3559 | SAU102452 | 5676 | SAU1c0045_orf_20p | 12674 |
| S1M10000047H06 | 3560 | SAU103038 | 5757 | #N/A | #N/A |
| S1M10000047H07 | 3561 | SAU200006 | 5770 | SAU2c0157_orf_1p | 12723 |
| S1M10000047H08 | 3562 | SAU101798 | 5538 | SAU1c0032_orf_18p | 12222 |
| S1M10000047H09 | 3563 | SAU102578 | 5701 | SAU1c0039_orf_61p | 12411 |
| S1M10000047H11 | 3564 | SAU101028 | 5370 | SAU1c0043_orf_7p | 12552 |
| S1M10000048A02 | 3565 | SAU201571 | 5824 | SAU2c0447_orf_17p | 12997 |
| S1M10000048A03 | 3566 | SAU100866 | 5344 | SAU1c0044_orf_100p | 12553 |
| S1M10000048A04 | 3567 | SAU103038 | 5757 | #N/A | #N/A |
| S1M10000048A05 | 3568 | SAU101868 | 5565 | SAU1c0036_orf_23p | 12320 |
| S1M10000048A06 | 3569 | SAU100157 | 5237 | SAU1c0040_orf_81p | 12444 |
| S1M10000048A07 | 3570 | SAU101156 | 5386 | SAU1c0036_orf_12p | 12311 |
| S1M10000048A09 | 3571 | SAU100158 | 5238 | SAU1c0040_orf_80p | 12443 |
| S1M10000048A10 | 3572 | SAU201571 | 5824 | SAU2c0447_orf_17p | 12997 |
| S1M10000048A11 | 3573 | SAU101807 | 5547 | SAU1c0032_orf_26p | 12231 |
| S1M10000048A12 | 3574 | SAU101271 | 5411 | SAU1c0037_orf_90p | 12366 |
| S1M10000048B02 | 3575 | SAU100608 | 5297 | SAU1c0034_orf_69p | 12293 |
| S1M10000048B05 | 3576 | SAU101028 | 5370 | SAU1c0043_orf_7p | 12552 |
| S1M10000048B08 | 3577 | SAU102452 | 5676 | SAU1c0045_orf_20p | 12674 |
| S1M10000048B10 | 3578 | SAU100158 | 5238 | SAU1c0040_orf_80p | 12443 |
| S1M10000048B11 | 3579 | SAU103038 | 5757 | #N/A | #N/A |
| S1M10000048B12 | 3580 | SAU200916 | 5797 | SAU2c0373_orf_4p | 12838 |
| S1M10000048B12 | 3580 | SAU301620 | 5899 | SAU3c1478_orf_2p | 13140 |
| S1M10000048C01 | 3581 | SAU101028 | 5370 | SAU1c0043_orf_7p | 12552 |
| S1M10000048C02 | 3582 | SAU301465 | 5896 | SAU3c1429_orf_4p | 13121 |
| S1M10000048C03 | 3583 | SAU102200 | 5611 | SAU1c0045_orf_168p | 12665 |
| S1M10000048C05 | 3584 | SAU300998 | 5881 | SAU3c1253_orf_3p | 13077 |
| S1M10000048C06 | 3585 | SAU100684 | 5306 | SAU1c0044_orf_68p | 12632 |
| S1M10000048C06 | 3585 | SAU100685 | 5307 | SAU1c0044_orf_69p | 12633 |
| S1M10000048C07 | 3586 | SAU102452 | 5676 | SAU1c0045_orf_20p | 12674 |
| S1M10000048C08 | 3587 | SAU101632 | 5499 | SAU1c0039_orf_3p | 12407 |
| S1M10000048C09 | 3588 | SAU101907 | 5574 | SAU1c0040_orf_79p | 12442 |
| S1M10000048C11 | 3589 | SAU101815 | 5552 | SAU1c0032_orf_33p | 12238 |
| S1M10000048D02 | 3590 | SAU100123 | 5230 | SAU1c0043_orf_189p | 12526 |
| S1M10000048D02 | 3590 | SAU102001 | 5586 | SAU1c0040_orf_102p | 12424 |
| S1M10000048D02 | 3590 | SAU103159 | 5762 | SAU1c0045_orf_204p | 12670 |
| S1M10000048D02 | 3590 | SAU201827 | 5837 | SAU2c0449_orf_21p | 13002 |
| S1M10000048D08 | 3591 | SAU300572 | 5873 | SAU3c1019_orf_1p | 13051 |
| S1M10000048D09 | 3592 | SAU100141 | 5236 | SAU1c0032_orf_8p | 12259 |
| S1M10000048D10 | 3593 | SAU302950 | 5914 | SAU3c1512_orf_12p | 13160 |
| S1M10000048D12 | 3594 | SAU102599 | 5706 | SAU1c0041_orf_45p | 12466 |
| S1M10000048D12 | 3594 | SAU103191 | 5765 | SAU1c00241_orf_44p | 12465 |
| S1M10000048E02 | 3595 | SAU101028 | 5370 | SAU1c0043_orf_7p | 12552 |
| S1M10000048E03 | 3596 | SAU102200 | 5611 | SAU1c0045_orf_168p | 12665 |
| S1M10000048E04 | 3597 | SAU101545 | 5474 | SAU1c0037_orf_132p | 12348 |
| S1M10000048E06 | 3598 | SAU200006 | 5770 | SAU2c0157_orf_1p | 12723 |
| S1M10000048E07 | 3599 | SAU100959 | 5359 | SAU1c0042_orf_102p | 12485 |
| S1M10000048E08 | 3600 | SAU101807 | 5547 | SAU1c0032_orf_26p | 12231 |
| S1M10000048E10 | 3601 | SAU302950 | 5914 | SAU3c1512_orf_12p | 13160 |
| S1M10000048F02 | 3602 | SAU101387 | 5440 | SAU1c0038_orf_52p | 12386 |
| S1M10000048F07 | 3603 | SAU101175 | 5388 | SAU1c0031_orf_1p | 12213 |
| S1M10000048F08 | 3604 | SAU100157 | 5237 | SAU1c0040_orf_81p | 12444 |
| S1M10000048F09 | 3605 | SAU101793 | 5534 | SAU1c0032_orf_14p | 12218 |
| S1M10000048F11 | 3606 | SAU202174 | 5845 | SAU2c0412_orf_3p | 12895 |
| S1M10000048F11 | 3606 | SAU301148 | 5888 | #N/A | #N/A |
| S1M10000048F12 | 3607 | SAU103038 | 5757 | #N/A | #N/A |
| S1M10000048G02 | 3608 | SAU102453 | 5677 | SAU1c0045_orf_19p | 12669 |
| S1M10000048G03 | 3609 | SAU200928 | 5798 | SAU2c0365_orf_5p | 12815 |
| S1M10000048G04 | 3610 | SAU102602 | 5708 | SAU1c0032_orf_5p | 12249 |
| S1M10000048G05 | 3611 | SAU101752 | 5522 | SAU1c0040_orf_85p | 12447 |
| S1M10000048G07 | 3612 | SAU102006 | 5589 | SAU1c0040_orf_107p | 12427 |
| S1M10000048G07 | 3612 | SAU102007 | 5590 | SAU1c0040_orf_108p | 12428 |
| S1M10000048G10 | 3613 | SAU101793 | 5534 | SAU1c0032_orf_14p | 12218 |
| S1M10000048G11 | 3614 | SAU200006 | 5770 | SAU2c0157_orf_1p | 12723 |
| S1M10000048H01 | 3615 | SAU100608 | 5297 | SAU1c0034_orf_69p | 12293 |
| S1M10000048H02 | 3616 | SAU100158 | 5238 | SAU1c0040_orf_80p | 12443 |
| S1M10000048H03 | 3617 | SAU101815 | 5552 | SAU1c0032_orf_33p | 12238 |
| S1M10000048H04 | 3618 | SAU102200 | 5611 | SAU1c0045_orf_168p | 12665 |
| S1M10000048H05 | 3619 | SAU100157 | 5237 | SAU1c0040_orf_81p | 12444 |
| S1M10000048H07 | 3620 | SAU100157 | 5237 | SAU1c0040_orf_81p | 12444 |
| S1M10000048H08 | 3621 | SAU100141 | 5236 | SAU1c0032_orf_8p | 12259 |
| S1M10000048H09 | 3622 | SAU100157 | 5237 | SAU1c0040_orf_81p | 12444 |
| S1M10000048H10 | 3623 | SAU101791 | 5532 | SAU1c0032_orf_12p | 12216 |
| S1M10000048H11 | 3624 | SAU101271 | 5411 | SAU1c0037_orf_90p | 12366 |
| K1M10000037D10 | 1077 | ECO100078 | 10023 | #N/A | #N/A |
| K1M10000002F02 | 1054 | ECO100252 | 10052 | #N/A | #N/A |
| K1M10000007F01 | 1057 | ECO100397 | 10064 | #N/A | #N/A |
| K1M10000007F01 | 1057 | ECO100398 | 10065 | #N/A | #N/A |
| K1M10000004F06 | 1056 | ECO100990 | 10120 | #N/A | #N/A |
| K1M10000019D06 | 1064 | ECO100990 | 10120 | #N/A | #N/A |
| K1M10000030C07 | 1070 | ECO102108 | 10214 | #N/A | #N/A |
| K1M10000044G05 | 1086 | ECO102262 | 10228 | #N/A | #N/A |
| K1M10000036G08 | 1076 | ECO102447 | 10247 | #N/A | #N/A |
| K1M10000033E01 | 1075 | ECO102539 | 10258 | #N/A | #N/A |
| K1M10000043D05 | 1081 | ECO102620 | 10266 | #N/A | #N/A |
| K1M10000045D10 | 1088 | ECO102620 | 10266 | #N/A | #N/A |
| K1M10000003C01 | 1055 | ECO103101 | 10315 | #N/A | #N/A |
| K1M10000030E07 | 1071 | ECO104120 | 10462 | #N/A | #N/A |
| K1M10000045A07 | 1087 | ECO104268 | 10475 | #N/A | #N/A |
| S4M10000020F05 | 3721 | ECO100449 | #N/A | #N/A | #N/A |
| S4M10000026D04 | 3742 | ECO100676 | #N/A | #N/A | #N/A |
| S4M10000014D07 | 3706 | ECO100757 | #N/A | #N/A | #N/A |
| S4M10000015B11 | 3708 | ECO100757 | #N/A | #N/A | #N/A |
| S4M10000016A02 | 3710 | ECO100757 | #N/A | #N/A | #N/A |
| S4M10000022E12 | 3725 | ECO100757 | #N/A | #N/A | #N/A |
| S4M10000026E12 | 3744 | ECO100757 | #N/A | #N/A | #N/A |
| S4M10000035E03 | 3764 | ECO100757 | #N/A | #N/A | #N/A |
| S4M10000008H10 | 3693 | ECO100758 | 10101 | #N/A | #N/A |
| S4M10000014B05 | 3704 | ECO100758 | 10101 | #N/A | #N/A |
| S4M10000014D07 | 3706 | ECO100758 | 10101 | #N/A | #N/A |
| S4M10000015B11 | 3708 | ECO100758 | 10101 | #N/A | #N/A |
| S4M10000015E09 | 3709 | ECO100758 | 10101 | #N/A | #N/A |
| S4M10000016A02 | 3710 | ECO100758 | 10101 | #N/A | #N/A |
| S4M10000022E12 | 3725 | ECO100758 | 10101 | #N/A | #N/A |
| S4M10000029B12 | 3747 | ECO100758 | 10101 | #N/A | #N/A |
| S4M10000020G10 | 3722 | ECO100796 | 10105 | #N/A | #N/A |
| S4M10000023F01 | 3728 | ECO101916 | #N/A | #N/A | #N/A |
| S4M10000014H02 | 3707 | ECO102028 | #N/A | #N/A | #N/A |
| S4M10000012B06 | 3700 | ECO102066 | #N/A | #N/A | #N/A |
| S4M10000035D01 | 3762 | ECO102066 | #N/A | #N/A | #N/A |
| S4M10000024C06 | 3730 | ECO102189 | 10224 | #N/A | #N/A |
| S4M10000006C05 | 3689 | ECO102282 | #N/A | #N/A | #N/A |
| S4M10000037H09 | 3772 | ECO102296 | #N/A | #N/A | #N/A |
| S4M10000030G11 | 3751 | ECO102302 | #N/A | #N/A | #N/A |
| S4M10000026C10 | 3741 | ECO102416 | 10245 | #N/A | #N/A |
| 34M10000026E06 | 3743 | ECO102416 | 10245 | #N/A | #N/A |
| S4M10000036F07 | 3768 | ECO102416 | 10245 | #N/A | #N/A |
| S4M10000034A02 | 3756 | ECO102526 | #N/A | #N/A | #N/A |
| S4M10000006F08 | 3690 | ECO102541 | 10259 | #N/A | #N/A |
| S4M10000002G08 | 3684 | ECO102730 | #N/A | #N/A | #N/A |
| S4M10000026C10 | 3741 | ECO102870 | #N/A | #N/A | #N/A |
| S4M10000026E06 | 3743 | ECO102870 | #N/A | #N/A | #N/A |
| S4M10000036F07 | 3768 | ECO102870 | #N/A | #N/A | #N/A |
| S4M10000034H05 | 3759 | ECO102900 | #N/A | #N/A | #N/A |
| S4M10000006A08 | 3688 | ECO102944 | #N/A | #N/A | #N/A |
| S4M10000014D04 | 3705 | ECO102986 | 10301 | #N/A | #N/A |
| S4M10000022D12 | 3724 | ECO103238 | 10354 | #N/A | #N/A |
| S4M10000033F08 | 3753 | ECO103238 | 10354 | #N/A | #N/A |
| S4M10000033G09 | 3755 | ECO103238 | 10354 | #N/A | #N/A |
| S4M10000001C01 | 3680 | ECO103265 | 10365 | #N/A | #N/A |
| S4M10000024B02 | 3729 | ECO103280 | #N/A | #N/A | #N/A |
| S4M10000020A04 | 3720 | ECO103461 | #N/A | #N/A | #N/A |
| S4M10000002B06 | 3681 | ECO103666 | #N/A | #N/A | #N/A |
| S4M10000019H06 | 3719 | ECO103738 | #N/A | #N/A | #N/A |
| S4M10000024H02 | 3736 | ECO103738 | #N/A | #N/A | #N/A |
| S4M10000030F07 | 3750 | ECO103738 | #N/A | #N/A | #N/A |
| S4M10000034H09 | 3760 | ECO103738 | #N/A | #N/A | #N/A |
| S4M10000032B12 | 3752 | ECO103935 | #N/A | #N/A | #N/A |
| S4M10000002B09 | 3682 | ECO103936 | #N/A | #N/A | #N/A |
| S4M10000037A10 | 3770 | ECO103951 | #N/A | #N/A | #N/A |
| S4M10000018D09 | 3711 | ECO104080 | #N/A | #N/A | #N/A |
| S4M10000035F09 | 3766 | EFA101301 | #N/A | EFA1c0040_orf_173p | #N/A |
| S4M10000035F09 | 3766 | EFA102170 | #N/A | EFA1c0040_orf_121p | #N/A |
| S4M10000001C01 | 3680 | EFA103268 | #N/A | EFA1c0010_orf_1p | 10479 |
| S4M10000036F07 | 3768 | HPY200334 | #N/A | #N/A | #N/A |
| S4M10000001C01 | 3680 | HPY201116 | 11570 | #N/A | #N/A |
| S4M10000037A10 | 3770 | KPN100467 | #N/A | KPN1c0583_orf_2p | #N/A |
| S4M10000030G11 | 3751 | KPN101078 | #N/A | KPN1c1190_orf_1p | #N/A |
| S4M10000024B02 | 3729 | KPN101160 | #N/A | KPN1c1224_orf_1p | #N/A |
| S4M10000032B12 | 3752 | KPN101846 | #N/A | KPN1c1681_orf_2p | #N/A |
| S4M10000006C05 | 3689 | KPN102011 | #N/A | KPN1c1862_orf_4p | #N/A |
| S4M10000035B01 | 3761 | KPN102014 | #N/A | KPN1c1786_orf_1p | 11654 |
| S4M10000012B06 | 3700 | KPN102524 | #N/A | #N/A | #N/A |
| S4M10000035D01 | 3762 | KPN102524 | #N/A | #N/A | #N/A |
| S4M10000002G04 | 3683 | KPN102558 | #N/A | KPN1c1982_orf_3p | #N/A |
| S4M10000002G08 | 3684 | KPN102558 | #N/A | KPN1c1982_orf_3p | #N/A |
| S4M10000008H10 | 3693 | KPN103640 | #N/A | KPN1c2761_orf_1p | #N/A |
| S4M10000014B05 | 3704 | KPN103640 | #N/A | KPN1c2761_orf_1p | #N/A |
| S4M10000014D07 | 3706 | KPN103640 | #N/A | KPN1c2761_orf_1p | #N/A |
| S4M10000015B11 | 3708 | KPN103640 | #N/A | KPN1c2761_orf_1p | #N/A |
| S4M10000015E09 | 3709 | KPN103640 | #N/A | KPN1c2761_orf_1p | #N/A |
| S4M10000016A02 | 3710 | KPN103640 | #N/A | KPN1c2761_orf_1p | #N/A |
| S4M10000022E12 | 3725 | KPN103640 | #N/A | KPN1c2761_orf_1p | #N/A |
| S4M10000026E12 | 3744 | KPN103640 | #N/A | KPN1c2761_orf_1p | #N/A |
| S4M10000035E03 | 3764 | KPN103640 | #N/A | KPN1c2761_orf_1p | #N/A |
| S4M10000008H10 | 3693 | KPN103641 | #N/A | KPN1c2761_orf_2p | 11705 |
| S4M10000014B05 | 3704 | KPN103641 | #N/A | KPN1c2761_orf_2p | 11705 |
| S4M10000014D07 | 3706 | KPN103641 | #N/A | KPN1c2761_orf_2p | 11705 |
| S4M10000015B11 | 3708 | KPN103641 | #N/A | KPN1c2761_orf_2p | 11705 |
| S4M10000015E09 | 3709 | KPN103641 | #N/A | KPN1c2761_orf_2p | 11705 |
| S4M10000016A02 | 3710 | KPN103641 | #N/A | KPN1c2761_orf_2p | 11705 |
| S4M10000022E12 | 3725 | KPN103641 | #N/A | KPN1c2761_orf_2p | 11705 |
| S4M10000029B12 | 3747 | KPN103641 | #N/A | KPN1c2761_orf_2p | 11705 |
| S4M10000035E03 | 3764 | KPN103641 | #N/A | KPN1c2761_orf_2p | 11705 |
| S4M10000026C10 | 3741 | KPN103871 | #N/A | KPN1c2844_orf_2p | #N/A |
| S4M10000026E06 | 3743 | KPN103871 | #N/A | KPN1c2844_orf_2p | #N/A |
| S4M10000036F07 | 3768 | KPN103871 | #N/A | KPN1c2844_orf_2p | #N/A |
| S4M10000019H06 | 3719 | KPN104321 | #N/A | KPN1c3011_orf_1p | #N/A |
| S4M10000024H02 | 3736 | KPN104321 | #N/A | KPN1c3011_orf_1p | #N/A |
| S4M10000030E07 | 3750 | KPN104321 | #N/A | KPN1c3011_orf_1p | #N/A |
| S4M10000034H09 | 3760 | KPN104321 | #N/A | KPN1c3011_orf_1p | #N/A |
| S4M10000035F02 | 3765 | KPN104321 | #N/A | KPN1c3011_orf_1p | #N/A |
| S4M10000002B06 | 3681 | KPN104608 | #N/A | KPN1c3070_orf_3p | #N/A |
| S4M10000018D09 | 3711 | KPN105957 | #N/A | KPN1c3587_orf_1p | #N/A |
| S4M10000024C06 | 3730 | KPN106468 | #N/A | KPN1c1186_orf_1p | 11638 |
| S4M10000009A05 | 3694 | KPN106681 | #N/A | #N/A | #N/A |
| S4M10000010D04 | 3696 | KPN106681 | #N/A | #N/A | #N/A |
| S4M10000011E08 | 3699 | KPN106681 | #N/A | #N/A | #N/A |
| S4M10000020A04 | 3720 | KPN106813 | #N/A | KPN1c2010_orf_1p | #N/A |
| S4M10000005G05 | 3685 | KPN106840 | #N/A | KPN1c2087_orf_1p | 11664 |
| S4M10000006F08 | 3690 | KPN106840 | #N/A | KPN1c2087_orf_1p | 11664 |
| S4M10000007G01 | 3691 | KPN106840 | #N/A | KPN1c2087_orf_1p | 11664 |
| S4M10000008C08 | 3692 | KPN106840 | #N/A | KPN1c2087_orf_1p | 11664 |
| S4M10000018E10 | 3712 | KPN106840 | #N/A | KPN1c2087_orf_1p | 11664 |
| S4M10000018E10 | 3713 | KPN106840 | #N/A | KPN1c2087_orf_1p | 11664 |
| S4M10000019G04 | 3717 | KPN106840 | #N/A | KPN1c2087_orf_1p | 11664 |
| S4M10000001C01 | 3680 | SAU101756 | #N/A | SAU1c0040_orf_82p | 12445 |
| S4M10000001C01 | 3680 | SAU200931 | #N/A | SAU2c0151_orf_1p | 12722 |
| S4M10000001C01 | 3680 | SPN102008 | #N/A | SPN1c0007_orf_92p | #N/A |
| S4M10000001C01 | 3680 | SPN202419 | #N/A | SPN2c0592_orf_1p | #N/A |
| S4M10000019H06 | 3719 | STY000068 | #N/A | STYc00048_orf_26p | #N/A |
| S4M10000024H02 | 3736 | STY000068 | #N/A | STYc00048_orf_26p | #N/A |
| S4M10000030F07 | 3750 | STY000068 | #N/A | STYc00048_orf_26p | #N/A |
| S4M10000034H09 | 3760 | STY000068 | #N/A | STYc00048_orf_26p | #N/A |
| S4M10000035F02 | 3765 | STY000068 | #N/A | STYc00048_orf_26p | #N/A |
| S4M10000026C10 | 3741 | STY000225 | #N/A | STYc00041_orf_40p | 13740 |
| S4M10000026E06 | 3743 | STY000225 | #N/A | STYc00041_orf_40p | 13740 |
| S4M10000036F07 | 3768 | STY000225 | #N/A | STYc00041_orf_40p | 13740 |
| S4M10000026D04 | 3742 | STY000244 | #N/A | STYc00041_orf_11p | #N/A |
| S4M10000034H05 | 3759 | STY000244 | #N/A | STYc00041_orf_11p | #N/A |
| S4M10000027E02 | 3746 | STY000409 | #N/A | STYc00053_orf_110p | #N/A |
| S4M10000025E02 | 3738 | STY000498 | #N/A | STYc00072_orf_46p | #N/A |
| S4M10000034A02 | 3756 | STY000498 | #N/A | STYc00072_orf_46p | #N/A |
| S4M10000034D06 | 3758 | STY000625 | #N/A | STYc00062_orf_63p | 13784 |
| S4M10000014D04 | 3705 | STY000737 | #N/A | STYc00054_orf_108p | 13759 |
| S4M10000013H02 | 3703 | STY000753 | #N/A | STYc00054_orf_91p | #N/A |
| S4M10000006A08 | 3688 | STY000817 | #N/A | STYc00054_orf_145p | #N/A |
| S4M10000036D07 | 3767 | STY000817 | #N/A | STYc00054_orf_145p | #N/A |
| S4M10000018D09 | 3711 | STY000848 | #N/A | STYc00101_orf_23p | #N/A |
| S4M10000014H02 | 3707 | STY000968 | #N/A | STYc00086_orf_86p | #N/A |
| S4M10000024G04 | 3734 | STY000986 | #N/A | #N/A | #N/A |
| S4M10000025H07 | 3740 | STY000986 | #N/A | #N/A | #N/A |
| S4M10000029D12 | 3748 | STY000986 | #N/A | #N/A | #N/A |
| S4M10000037A10 | 3770 | STY001009 | #N/A | STYc00080_orf_144p | #N/A |
| S4M10000035F09 | 3766 | STY001185 | #N/A | STYc00098_orf_2p | #N/A |
| S4M10000026D04 | 3742 | STY001220 | #N/A | STYc00123_orf_17p | #N/A |
| S4M10000022H06 | 3727 | STY001285 | #N/A | #N/A | #N/A |
| S4M10000030D03 | 3749 | STY001285 | #N/A | #N/A | #N/A |
| S4M10000037E10 | 3771 | STY001363 | #N/A | STYc00034_orf_126p | #N/A |
| S4M10000002B06 | 3681 | STY001380 | #N/A | STYc00119_orf_3p | #N/A |
| S4M10000011D08 | 3698 | STY001534 | #N/A | #N/A | #N/A |
| S4M10000024C11 | 3731 | STY001582 | #N/A | #N/A | #N/A |
| S4M10000025A11 | 3737 | STY001582 | #N/A | #N/A | #N/A |
| S4M10000035F09 | 3766 | STY001619 | #N/A | #N/A | #N/A |
| S4M10000022D12 | 3724 | STY001777 | #N/A | STYc00187_orf_4p | 13970 |
| S4M10000033F08 | 3753 | STY001777 | #N/A | STYc00187_orf_4p | 13970 |
| S4M10000033G09 | 3755 | STY001777 | #N/A | STYc00187_orf_4p | 13970 |
| S4M10000001C01 | 3680 | STY001790 | #N/A | STYc00187_orf_14p | 13967 |
| S4M10000026C10 | 3741 | STY001853 | #N/A | STYc00180_orf_22p | #N/A |
| S4M10000026E06 | 3743 | STY001853 | #N/A | STYc00180_orf_22p | #N/A |
| S4M10000036F07 | 3768 | STY001853 | #N/A | STYc00180_orf_22p | #N/A |
| S4M10000020A04 | 3720 | STY002064 | #N/A | STYc00074_orf_163p | #N/A |
| S4M10000020A04 | 3720 | STY002066 | #N/A | #N/A | #N/A |
| S4M10000024B02 | 3729 | STY002145 | #N/A | STYc00074_orf_17p | #N/A |
| S4M10000010B05 | 3695 | STY002525 | #N/A | STYc00114_orf_159p | #N/A |
| S4M10000012B12 | 3701 | STY002525 | #N/A | STYc00114_orf_159p | #N/A |
| S4M10000022D04 | 3723 | STY002525 | #N/A | STYc00114_orf_159p | #N/A |
| S4M10000022G07 | 3726 | STY002525 | #N/A | STYc00114_orf_159p | #N/A |
| S4M10000024G01 | 3733 | STY002525 | #N/A | STYc00114_orf_159p | #N/A |
| S4M10000024G09 | 3735 | STY002525 | #N/A | STYc00114_orf_159p | #N/A |
| S4M10000025E05 | 3739 | STY002525 | #N/A | STYc00114_orf_159p | #N/A |
| S4M10000027C10 | 3745 | STY002525 | #N/A | STYc00114_orf_159p | #N/A |
| S4M10000034A09 | 3757 | STY002525 | #N/A | STYc00114_orf_159p | #N/A |
| S4M10000037H09 | 3772 | STY002590 | #N/A | STYc00114_orf_104p | #N/A |
| S4M10000002G04 | 3683 | STY002623 | #N/A | STYc00114_orf_90p | #N/A |
| S4M10000002G08 | 3684 | STY002623 | #N/A | STYc00114_orf_90p | #N/A |
| S4M10000033G05 | 3754 | STY002638 | #N/A | STYc00114_orf_15p | 13870 |
| S4M10000006A06 | 3687 | STY002672 | #N/A | STYc00114_orf_136p | #N/A |
| S4M10000010H04 | 3697 | STY002711 | #N/A | STYc00223_orf_1p | #N/A |
| S4M10000005H02 | 3686 | STY002738 | #N/A | STYc00223_orf_17p | #N/A |
| S4M10000012B06 | 3700 | STY002826 | #N/A | STYc00152_orf_12p | #N/A |
| S4M10000035D01 | 3762 | STY002826 | #N/A | STYc00152_orf_12p | #N/A |
| S4M10000018G03 | 3714 | STY002889 | #N/A | #N/A | #N/A |
| S4M10000018H04 | 3715 | STY002889 | #N/A | #N/A | #N/A |
| S4M10000019F05 | 3716 | STY002889 | #N/A | #N/A | #N/A |
| S4M10000019G05 | 3718 | STY002889 | #N/A | #N/A | #N/A |
| S4M10000037E10 | 3771 | STY002959 | #N/A | STYc00215_orf_11p | 14011 |
| S4M10000002B09 | 3682 | STY003082 | #N/A | STYc00238_orf_12p | #N/A |
| S4M10000032B12 | 3752 | STY003084 | #N/A | STYc00238_orf_13p | #N/A |
| S4M10000024C06 | 3730 | STY003375 | #N/A | STYc00183_orf_19p | 13957 |
| S4M10000012D02 | 3702 | STY003377 | #N/A | #N/A | #N/A |
| S4M10000030G11 | 3751 | STY003384 | #N/A | STYc00183_orf_130p | #N/A |
| S4M10000006F08 | 3690 | STY003460 | #N/A | STYc00339_orf_20p | 14087 |
| S4M10000024F08 | 3732 | STY003664 | #N/A | #N/A | #N/A |
| S4M10000020G10 | 3722 | STY004048 | #N/A | STYc00207_orf_161p | 13999 |
| S4M10000008H10 | 3693 | STY004152 | #N/A | STYc00207_orf_194p | 14003 |
| S4M10000014B05 | 3704 | STY004152 | #N/A | STYc00207_orf_194p | 14003 |
| S4M10000015E09 | 3709 | STY004152 | #N/A | STYc00207_orf_194p | 14003 |
| S4M10000016A02 | 3710 | STY004152 | #N/A | STYc00207_orf_194p | 14003 |
| S4M10000022E12 | 3725 | STY004152 | #N/A | STYc00207_orf_194p | 14003 |
| S4M10000029B12 | 3747 | STY004152 | #N/A | STYc00207_orf_194p | 14003 |
| S4M10000035E03 | 3764 | STY004152 | #N/A | STYc00207_orf_194p | 14003 |
| S4M10000008H10 | 3693 | STY004154 | #N/A | STYc00207_orf_195p | #N/A |
| S4M10000014B05 | 3704 | STY004154 | #N/A | STYc00207_orf_195p | #N/A |
| S4M10000014D07 | 3706 | STY004154 | #N/A | STYc00207_orf_195p | #N/A |
| S4M10000015B11 | 3708 | STY004154 | #N/A | STYc00207_orf_195p | #N/A |
| S4M10000015E09 | 3709 | STY004154 | #N/A | STYc00207_orf_195p | #N/A |
| S4M10000016A02 | 3710 | STY004154 | #N/A | STYc00207_orf_195p | #N/A |
| S4M10000022E12 | 3725 | STY004154 | #N/A | STYc00207_orf_195p | #N/A |
| S4M10000026E12 | 3744 | STY004154 | #N/A | STYc00207_orf_195p | #N/A |
| S4M10000035E03 | 3764 | STY004154 | #N/A | STYc00207_orf_195p | #N/A |
| S4M10000005G05 | 3685 | STY004239 | #N/A | #N/A | #N/A |
| S4M10000007G01 | 3691 | STY004239 | #N/A | #N/A | #N/A |
| S4M10000008C08 | 3692 | STY004239 | #N/A | #N/A | #N/A |
| S4M10000018E10 | 3712 | STY004239 | #N/A | #N/A | #N/A |
| S4M10000018F10 | 3713 | STY004239 | #N/A | #N/A | #N/A |
| S4M10000019G04 | 3717 | STY004239 | #N/A | #N/A | #N/A |
| S4M10000037A04 | 3769 | STY005016 | #N/A | #N/A | #N/A |
| K1M10000007F01 | 1057 | SAU100968 | #N/A | SAU1c0044_orf_90p | 12643 |
| K1M10000007E01 | 1057 | SAU201145 | #N/A | SAU2c0405_orf_7p | 12884 |
| K1M10000007F01 | 1057 | SPN101971 | #N/A | SPN1c0209_orf_54p | #N/A |
| K1M10000007F01 | 1057 | SPN201024 | #N/A | SPN2c0417_orf_4p | #N/A |
| K1M10000003C01 | 1055 | STY000773 | #N/A | STYc00054_orf_16p | 13764 |
| K1M10000023E09 | 1068 | STY000886 | #N/A | #N/A | #N/A |
| K1M10000023E10 | 1069 | STY000886 | #N/A | #N/A | #N/A |
| K1M10000007F01 | 1057 | STY001430 | #N/A | STYc00148_orf_11p | 13915 |
| K1M10000007F01 | 1057 | STY001433 | #N/A | STYc00148_orf_12p | 13916 |
| K1M10000036G08 | 1076 | STY001867 | #N/A | STYc00180_orf_50p | 13948 |
| K1M10000030C07 | 1070 | STY002768 | #N/A | #N/A | #N/A |
| K1M10000037D10 | 1077 | STY002995 | #N/A | STYc00215_orf_67p | 14018 |
| K1M10000044G05 | 1086 | STY003357 | #N/A | STYc00183_orf_91p | 13963 |

[0880] TABLE IC

| PathoSeq Gene Locus | Nucleotide SeqID | Protein SeqID |
|---|---|---|
| EFA100001 | 3806 | 4861 |
| EFA100023 | 3807 | 4862 |
| EFA100065 | 3808 | 4863 |
| EFA100151 | 3809 | 4864 |
| EFA100157 | 3810 | 4865 |
| EFA100165 | 3811 | 4866 |
| EFA100190 | 3812 | 4867 |
| EFA100194 | 3813 | 4868 |
| EFA100200 | 3814 | 4869 |
| EFA100210 | 3815 | 4870 |
| EFA100211 | 3816 | 4871 |
| EFA100289 | 3817 | 4872 |
| EFA100295 | 3818 | 4873 |
| EFA100312 | 3819 | 4874 |
| EFA100329 | 3820 | 4875 |
| EFA100394 | 3821 | 4876 |
| EFA100397 | 3822 | 4877 |
| EFA100399 | 3823 | 4878 |
| EFA100426 | 3824 | 4879 |
| EFA100478 | 3825 | 4880 |
| EFA100615 | 3826 | 4881 |
| EFA100617 | 3827 | 4882 |
| EFA100641 | 3828 | 4883 |
| EFA100642 | 3829 | 4884 |
| EFA100668 | 3830 | 4885 |
| EFA100689 | 3831 | 4886 |
| EFA100704 | 3832 | 4887 |
| EFA100739 | 3833 | 4888 |
| EFA100740 | 3834 | 4889 |
| EFA100741 | 3835 | 4890 |
| EFA100742 | 3836 | 4891 |
| EFA100748 | 3837 | 4892 |
| EFA100756 | 3838 | 4893 |
| EFA100757 | 3839 | 4894 |
| EFA100783 | 3840 | 4895 |
| EFA100795 | 3841 | 4896 |
| EFA100798 | 3842 | 4897 |
| EFA100811 | 3843 | 4898 |
| EFA100870 | 3844 | 4899 |
| EFA100914 | 3845 | 4900 |
| EFA100919 | 3846 | 4901 |
| EFA100955 | 3847 | 4902 |
| EFA100970 | 3848 | 4903 |
| EFA100978 | 3849 | 4904 |
| EFA100991 | 3850 | 4905 |
| EFA101022 | 3851 | 4906 |
| EFA101060 | 3852 | 4907 |
| EFA101079 | 3853 | 4908 |
| EFA101080 | 3854 | 4909 |
| EFA101086 | 3855 | 4910 |
| EFA101120 | 3856 | 4911 |
| EFA101121 | 3857 | 4912 |
| EFA101123 | 3858 | 4913 |
| EFA101141 | 3859 | 4914 |
| EFA101150 | 3860 | 4915 |
| EFA101159 | 3861 | 4916 |
| EFA101160 | 3862 | 4917 |
| EFA101161 | 3863 | 4918 |
| EFA101162 | 3864 | 4919 |
| EFA101163 | 3865 | 4920 |
| EFA101164 | 3866 | 4921 |
| EFA101165 | 3867 | 4922 |
| EFA101169 | 3868 | 4923 |
| EFA101253 | 3869 | 4924 |
| EFA101257 | 3870 | 4925 |
| EFA101258 | 3871 | 4926 |
| EFA101322 | 3872 | 4927 |
| EFA101339 | 3873 | 4928 |
| EFA101340 | 3874 | 4929 |
| EFA101354 | 3875 | 4930 |
| EFA101370 | 3876 | 4931 |
| EFA101403 | 3877 | 4932 |
| EFA101404 | 3878 | 4933 |
| EFA101409 | 3879 | 4934 |
| EFA101410 | 3880 | 4935 |
| EFA101411 | 3881 | 4936 |
| EFA101412 | 3882 | 4937 |
| EFA101413 | 3883 | 4938 |
| EFA101414 | 3884 | 4939 |
| EFA101415 | 3885 | 4940 |
| EFA101416 | 3886 | 4941 |
| EFA101417 | 3887 | 4942 |
| EFA101424 | 3888 | 4943 |
| EFA101425 | 3889 | 4944 |
| EFA101477 | 3890 | 4945 |
| EFA101536 | 3891 | 4946 |
| EFA101540 | 3892 | 4947 |
| EFA101541 | 3893 | 4948 |
| EFA101583 | 3894 | 4949 |
| EFA101670 | 3895 | 4950 |
| EFA101682 | 3896 | 4951 |
| EFA101685 | 3897 | 4952 |
| EFA101686 | 3898 | 4953 |
| EFA101695 | 3899 | 4954 |
| EFA101736 | 3900 | 4955 |
| EFA101737 | 3901 | 4956 |
| EFA101753 | 3902 | 4957 |
| EFA101765 | 3903 | 4958 |
| EFA101790 | 3904 | 4959 |
| EFA101791 | 3905 | 4960 |
| EFA101792 | 3906 | 4961 |
| EFA101795 | 3907 | 4962 |
| EFA101797 | 3908 | 4963 |
| EFA101799 | 3909 | 4964 |
| EFA101833 | 3910 | 4965 |
| EFA101868 | 3911 | 4966 |
| EFA101872 | 3912 | 4967 |
| EFA101873 | 3913 | 4968 |
| EFA101892 | 3914 | 4969 |
| EFA101924 | 3915 | 4970 |
| EFA101925 | 3916 | 4971 |
| EFA101963 | 3917 | 4972 |
| EFA102006 | 3918 | 4973 |
| EFA102022 | 3919 | 4974 |
| EFA102023 | 3920 | 4975 |
| EFA102051 | 3921 | 4976 |
| EFA102091 | 3922 | 4977 |
| EFA102110 | 3923 | 4978 |
| EFA102183 | 3924 | 4979 |
| EFA102185 | 3925 | 4980 |
| EFA102186 | 3926 | 4981 |
| EFA102201 | 3927 | 4982 |
| EFA102205 | 3928 | 4983 |
| EFA102253 | 3929 | 4984 |
| EFA102282 | 3930 | 4985 |
| EFA102326 | 3931 | 4986 |
| EFA102338 | 3932 | 4987 |
| EFA102350 | 3933 | 4988 |
| EFA102351 | 3934 | 4989 |
| EFA102352 | 3935 | 4990 |
| EFA102353 | 3936 | 4991 |
| EFA102389 | 3937 | 4992 |
| EFA102453 | 3938 | 4993 |
| EFA102501 | 3939 | 4994 |
| EFA102502 | 3940 | 4995 |
| EFA102503 | 3941 | 4996 |
| EFA102518 | 3942 | 4997 |
| EFA102541 | 3943 | 4998 |
| EFA102542 | 3944 | 4999 |
| EFA102549 | 3945 | 5000 |
| EFA102551 | 3946 | 5001 |
| EFA102554 | 3947 | 5002 |
| EFA102655 | 3948 | 5003 |
| EFA102656 | 3949 | 5004 |
| EFA102698 | 3950 | 5005 |
| EFA102728 | 3951 | 5006 |
| EFA102736 | 3952 | 5007 |
| EFA102764 | 3953 | 5008 |
| EFA102774 | 3954 | 5009 |
| EFA102780 | 3955 | 5010 |
| EFA102788 | 3956 | 5011 |
| EFA102802 | 3957 | 5012 |
| EFA102813 | 3958 | 5013 |
| EFA102915 | 3959 | 5014 |
| EFA103021 | 3960 | 5015 |
| EFA103033 | 3961 | 5016 |
| EFA103038 | 3962 | 5017 |
| EFA103039 | 3963 | 5018 |
| EFA103062 | 3964 | 5019 |
| EFA103081 | 3965 | 5020 |
| EFA103174 | 3966 | 5021 |
| EFA103210 | 3967 | 5022 |
| EFA103268 | 3968 | 5023 |
| EFA103295 | 3969 | 5024 |
| EFA103348 | 3970 | 5025 |
| EFA103365 | 3971 | 5026 |
| EFA103375 | 3972 | 5027 |
| EFA103504 | 3973 | 5028 |
| EFA103508 | 3974 | 5029 |
| EFA103571 | 3975 | 5030 |
| EFA103786 | 3976 | 5031 |
| KPN100432 | 3977 | 5032 |
| KPN100854 | 3978 | 5033 |
| KPN101022 | 3979 | 5034 |
| KPN101026 | 3980 | 5035 |
| KPN101729 | 3981 | 5036 |
| KPN101750 | 3982 | 5037 |
| KPN102057 | 3983 | 5038 |
| KPN102638 | 3984 | 5039 |
| KPN103882 | 3985 | 5040 |
| KPN104183 | 3986 | 5041 |
| KPN104281 | 3987 | 5042 |
| KPN104430 | 3988 | 5043 |
| KPN104538 | 3989 | 5044 |
| KPN104716 | 3990 | 5045 |
| KPN105722 | 3991 | 5046 |
| KPN105779 | 3992 | 5047 |
| KPN106044 | 3993 | 5048 |
| KPN106659 | 3994 | 5049 |
| KPN106840 | 3995 | 5050 |
| KPN107626 | 3996 | 5051 |
| KPN107776 | 3997 | 5052 |
| PA0028 | 3998 | 5053 |
| PA0120 | 3999 | 5054 |
| PA0129 | 4000 | 5055 |
| PA0141 | 4001 | 5056 |
| PA0221 | 4002 | 5057 |
| PA0265 | 4003 | 5058 |
| PA0321 | 4004 | 5059 |
| PA0337 | 4005 | 5060 |
| PA0353 | 4006 | 5061 |
| PA0378 | 4007 | 5062 |
| PA0401 | 4008 | 5063 |
| PA0413 | 4009 | 5064 |
| PA0414 | 4010 | 5065 |
| PA0419 | 4011 | 5066 |
| PA0423 | 4012 | 5067 |
| PA0469 | 4013 | 5068 |
| PA0472 | 4014 | 5069 |
| PA0506 | 4015 | 5070 |
| PA0600 | 4016 | 5071 |
| PA0642 | 4017 | 5072 |
| PA0650 | 4018 | 5073 |
| PA0715 | 4019 | 5074 |
| PA0788 | 4020 | 5075 |
| PA0882 | 4021 | 5076 |
| PA0934 | 4022 | 5077 |
| PA0938 | 4023 | 5078 |
| PA1019 | 4024 | 5079 |
| PA1072 | 4025 | 5080 |
| PA1115 | 4026 | 5081 |
| PA1270 | 4027 | 5082 |
| PA1301 | 4028 | 5083 |
| PA1360 | 4029 | 5084 |
| PA1365 | 4030 | 5085 |
| PA1398 | 4031 | 5086 |
| PA1462 | 4032 | 5087 |
| PA1493 | 4033 | 5088 |
| PA1547 | 4034 | 5089 |
| PA1636 | 4035 | 5090 |
| PA1684 | 4036 | 5091 |
| PA1868 | 4037 | 5092 |
| PA1876 | 4038 | 5093 |
| PA1918 | 4039 | 5094 |
| PA1986 | 4040 | 5095 |
| PA2009 | 4041 | 5096 |
| PA2083 | 4042 | 5097 |
| PA2101 | 4043 | 5098 |
| PA2108 | 4044 | 5099 |
| PA2128 | 4045 | 5100 |
| PA2147 | 4046 | 5101 |
| PA2196 | 4047 | 5102 |
| PA2197 | 4048 | 5103 |
| PA2222 | 4049 | 5104 |
| PA2313 | 4050 | 5105 |
| PA2398 | 4051 | 5106 |
| PA2424 | 4052 | 5107 |
| PA2461 | 4053 | 5108 |
| PA2470 | 4054 | 5109 |
| PA2488 | 4055 | 5110 |
| PA2494 | 4056 | 5111 |
| PA2584 | 4057 | 5112 |
| PA2594 | 4058 | 5113 |
| PA2634 | 4059 | 5114 |
| PA2641 | 4060 | 5115 |
| PA2671 | 4061 | 5116 |
| PA2680 | 4062 | 5117 |
| PA2684 | 4063 | 5118 |
| PA2726 | 4064 | 5119 |
| PA2742 | 4065 | 5120 |
| PA3006 | 4066 | 5121 |
| PA3011 | 4067 | 5122 |
| PA3013 | 4068 | 5123 |
| PA3041 | 4069 | 5124 |
| PA3048 | 4070 | 5125 |
| PA3068 | 4071 | 5126 |
| PA3121 | 4072 | 5127 |
| PA3153 | 4073 | 5128 |
| PA3154 | 4074 | 5129 |
| PA3160 | 4075 | 5130 |
| PA3279 | 4076 | 5131 |
| PA3280 | 4077 | 5132 |
| PA3374 | 4078 | 5133 |
| PA3479 | 4079 | 5134 |
| PA3484 | 4080 | 5135 |
| PA3522 | 4081 | 5136 |
| PA3643 | 4082 | 5137 |
| PA3703 | 4083 | 5138 |
| PA3709 | 4084 | 5139 |
| PA3716 | 4085 | 5140 |
| PA3764 | 4086 | 5141 |
| PA3845 | 4087 | 5142 |
| PA3866 | 4088 | 5143 |
| PA3876 | 4089 | 5144 |
| PA3877 | 4090 | 5145 |
| PA3931 | 4091 | 5146 |
| PA3984 | 4092 | 5147 |
| PA4024 | 4093 | 5148 |
| PA4027 | 4094 | 5149 |
| PA4037 | 4095 | 5150 |
| PA4067 | 4096 | 5151 |
| PA4070 | 4097 | 5152 |
| PA4081 | 4098 | 5153 |
| PA4105 | 4099 | 5154 |
| PA4124 | 4100 | 5155 |
| PA4125 | 4101 | 5156 |
| PA4158 | 4102 | 5157 |
| PA4237 | 4103 | 5158 |
| PA4242 | 4104 | 5159 |
| PA4244 | 4105 | 5160 |
| PA4245 | 4106 | 5161 |
| PA4246 | 4107 | 5162 |
| PA4247 | 4108 | 5163 |
| PA4248 | 4109 | 5164 |
| PA4249 | 4110 | 5165 |
| PA4250 | 4111 | 5166 |
| PA4251 | 4112 | 5167 |
| PA4252 | 4113 | 5168 |
| PA4253 | 4114 | 5169 |
| PA4254 | 4115 | 5170 |
| PA4256 | 4116 | 5171 |
| PA4257 | 4117 | 5172 |
| PA4258 | 4118 | 5173 |
| PA4259 | 4119 | 5174 |
| PA4262 | 4120 | 5175 |
| PA4263 | 4121 | 5176 |
| PA4264 | 4122 | 5177 |
| PA4268 | 4123 | 5178 |
| PA4269 | 4124 | 5179 |
| PA4271 | 4125 | 5180 |
| PA4272 | 4126 | 5181 |
| PA4316 | 4127 | 5182 |
| PA4332 | 4128 | 5183 |
| PA4347 | 4129 | 5184 |
| PA4363 | 4130 | 5185 |
| PA4375 | 4131 | 5186 |
| PA4413 | 4132 | 5187 |
| PA4433 | 4133 | 5188 |
| PA4473 | 4134 | 5189 |
| PA4506 | 4135 | 5190 |
| PA4512 | 4136 | 5191 |
| PA4542 | 4137 | 5192 |
| PA4576 | 4138 | 5193 |
| PA4598 | 4139 | 5194 |
| PA4665 | 4140 | 5195 |
| PA4681 | 4141 | 5196 |
| PA4709 | 4142 | 5197 |
| PA4744 | 4143 | 5198 |
| PA4771 | 4144 | 5199 |
| PA4888 | 4145 | 5200 |
| PA4942 | 4146 | 5201 |
| PA4997 | 4147 | 5202 |
| PA5030 | 4148 | 5203 |
| PA5076 | 4149 | 5204 |
| PA5088 | 4150 | 5205 |
| PA5193 | 4151 | 5206 |
| PA5199 | 4152 | 5207 |
| PA5207 | 4153 | 5208 |
| PA5209 | 4154 | 5209 |
| PA5248 | 4155 | 5210 |
| PA5299 | 4156 | 5211 |
| PA5316 | 4157 | 5212 |
| PA5388 | 4158 | 5213 |
| PA5393 | 4159 | 5214 |
| PA5436 | 4160 | 5215 |
| PA5443 | 4161 | 5216 |
| PA5490 | 4162 | 5217 |
| PA5493 | 4163 | 5218 |
| PA5507 | 4164 | 5219 |
| PA5567 | 4165 | 5220 |
| SAU100040 | 4166 | 5221 |
| SAU100053 | 4167 | 5222 |
| SAU100056 | 4168 | 5223 |
| SAU100059 | 4169 | 5224 |
| SAU100062 | 4170 | 5225 |
| SAU100077 | 4171 | 5226 |
| SAU100112 | 4172 | 5227 |
| SAU100114 | 4173 | 5228 |
| SAU100118 | 4174 | 5229 |
| SAU100123 | 4175 | 5230 |
| SAU100128 | 4176 | 5231 |
| SAU100131 | 4177 | 5232 |
| SAU100133 | 4178 | 5233 |
| SAU100139 | 4179 | 5234 |
| SAU100140 | 4180 | 5235 |
| SAU100141 | 4181 | 5236 |
| SAU100157 | 4182 | 5237 |
| SAU100158 | 4183 | 5238 |
| SAU100162 | 4184 | 5239 |
| SAU100175 | 4185 | 5240 |
| SAU100182 | 4186 | 5241 |
| SAU100186 | 4187 | 5242 |
| SAU100198 | 4188 | 5243 |
| SAU100227 | 4189 | 5244 |
| SAU100231 | 4190 | 5245 |
| SAU100242 | 4191 | 5246 |
| SAU100246 | 4192 | 5247 |
| SAU100251 | 4193 | 5248 |
| SAU100265 | 4194 | 5249 |
| SAU100266 | 4195 | 5250 |
| SAU100272 | 4196 | 5251 |
| SAU100275 | 4197 | 5252 |
| SAU100300 | 4198 | 5253 |
| SAU100301 | 4199 | 5254 |
| SAU100302 | 4200 | 5255 |
| SAU100305 | 4201 | 5256 |
| SAU100307 | 4202 | 5257 |
| SAU100308 | 4203 | 5258 |
| SAU100313 | 4204 | 5259 |
| SAU100315 | 4205 | 5260 |
| SAU100323 | 4206 | 5261 |
| SAU100347 | 4207 | 5262 |
| SAU100355 | 4208 | 5263 |
| SAU100359 | 4209 | 5264 |
| SAU100381 | 4210 | 5265 |
| SAU100389 | 4211 | 5266 |
| SAU100390 | 4212 | 5267 |
| SAU100401 | 4213 | 5268 |
| SAU100412 | 4214 | 5269 |
| SAU100414 | 4215 | 5270 |
| SAU100432 | 4216 | 5271 |
| SAU100433 | 4217 | 5272 |
| SAU100436 | 4218 | 5273 |
| SAU100443 | 4219 | 5274 |
| SAU100444 | 4220 | 5275 |
| SAU100475 | 4221 | 5276 |
| SAU100478 | 4222 | 5277 |
| SAU100489 | 4223 | 5278 |
| SAU100496 | 4224 | 5279 |
| SAU100497 | 4225 | 5280 |
| SAU100514 | 4226 | 5281 |
| SAU100517 | 4227 | 5282 |
| SAU100521 | 4228 | 5283 |
| SAU100522 | 4229 | 5284 |
| SAU100527 | 4230 | 5285 |
| SAU100528 | 4231 | 5286 |
| SAU100532 | 4232 | 5287 |
| SAU100542 | 4233 | 5288 |
| SAU100546 | 4234 | 5289 |
| SAU100547 | 4235 | 5290 |
| SAU100557 | 4236 | 5291 |
| SAU100582 | 4237 | 5292 |
| SAU100590 | 4238 | 5293 |
| SAU100595 | 4239 | 5294 |
| SAU100596 | 4240 | 5295 |
| SAU100601 | 4241 | 5296 |
| SAU100608 | 4242 | 5297 |
| SAU100610 | 4243 | 5298 |
| SAU100613 | 4244 | 5299 |
| SAU100617 | 4245 | 5300 |
| SAU100633 | 4246 | 5301 |
| SAU100646 | 4247 | 5302 |
| SAU100658 | 4248 | 5303 |
| SAU100659 | 4249 | 5304 |
| SAU100679 | 4250 | 5305 |
| SAU100684 | 4251 | 5306 |
| SAU100685 | 4252 | 5307 |
| SAU100689 | 4253 | 5308 |
| SAU100690 | 4254 | 5309 |
| SAU100702 | 4255 | 5310 |
| SAU100710 | 4256 | 5311 |
| SAU100714 | 4257 | 5312 |
| SAU100731 | 4258 | 5313 |
| SAU100733 | 4259 | 5314 |
| SAU100734 | 4260 | 5315 |
| SAU100736 | 4261 | 5316 |
| SAU100738 | 4262 | 5317 |
| SAU100741 | 4263 | 5318 |
| SAU100745 | 4264 | 5319 |
| SAU100747 | 4265 | 5320 |
| SAU100751 | 4266 | 5321 |
| SAU100752 | 4267 | 5322 |
| SAU100767 | 4268 | 5323 |
| SAU100770 | 4269 | 5324 |
| SAU100771 | 4270 | 5325 |
| SAU100773 | 4271 | 5326 |
| SAU100776 | 4272 | 5327 |
| SAU100778 | 4273 | 5328 |
| SAU100793 | 4274 | 5329 |
| SAU100794 | 4275 | 5330 |
| SAU100799 | 4276 | 5331 |
| SAU100808 | 4277 | 5332 |
| SAU100810 | 4278 | 5333 |
| SAU100813 | 4279 | 5334 |
| SAU100831 | 4280 | 5335 |
| SAU100836 | 4281 | 5336 |
| SAU100838 | 4282 | 5337 |
| SAU100839 | 4283 | 5338 |
| SAU100843 | 4284 | 5339 |
| SAU100845 | 4285 | 5340 |
| SAU100858 | 4286 | 5341 |
| SAU100859 | 4287 | 5342 |
| SAU100865 | 4288 | 5343 |
| SAU100866 | 4289 | 5344 |
| SAU100879 | 4290 | 5345 |
| SAU100880 | 4291 | 5346 |
| SAU100882 | 4292 | 5347 |
| SAU100885 | 4293 | 5348 |
| SAU100886 | 4294 | 5349 |
| SAU100887 | 4295 | 5350 |
| SAU100899 | 4296 | 5351 |
| SAU100901 | 4297 | 5352 |
| SAU100916 | 4298 | 5353 |
| SAU100920 | 4299 | 5354 |
| SAU100921 | 4300 | 5355 |
| SAU100932 | 4301 | 5356 |
| SAU100944 | 4302 | 5357 |
| SAU100952 | 4303 | 5358 |
| SAU100959 | 4304 | 5359 |
| SAU100961 | 4305 | 5360 |
| SAU100962 | 4306 | 5361 |
| SAU100963 | 4307 | 5362 |
| SAU100964 | 4308 | 5363 |
| SAU100965 | 4309 | 5364 |
| SAU100970 | 4310 | 5365 |
| SAU100996 | 4311 | 5366 |
| SAU101006 | 4312 | 5367 |
| SAU101020 | 4313 | 5368 |
| SAU101024 | 4314 | 5369 |
| SAU101028 | 4315 | 5370 |
| SAU101034 | 4316 | 5371 |
| SAU101038 | 4317 | 5372 |
| SAU101039 | 4318 | 5373 |
| SAU101065 | 4319 | 5374 |
| SAU101067 | 4320 | 5375 |
| SAU101070 | 4321 | 5376 |
| SAU101084 | 4322 | 5377 |
| SAU101085 | 4323 | 5378 |
| SAU101086 | 4324 | 5379 |
| SAU101090 | 4325 | 5380 |
| SAU101092 | 4326 | 5381 |
| SAU101104 | 4327 | 5382 |
| SAU101143 | 4328 | 5383 |
| SAU101145 | 4329 | 5384 |
| SAU101155 | 4330 | 5385 |
| SAU101156 | 4331 | 5386 |
| SAU101159 | 4332 | 5387 |
| SAU101175 | 4333 | 5388 |
| SAU101180 | 4334 | 5389 |
| SAU101183 | 4335 | 5390 |
| SAU101184 | 4336 | 5391 |
| SAU101189 | 4337 | 5392 |
| SAU101197 | 4338 | 5393 |
| SAU101198 | 4339 | 5394 |
| SAU101199 | 4340 | 5395 |
| SAU101220 | 4341 | 5396 |
| SAU101224 | 4342 | 5397 |
| SAU101226 | 4343 | 5398 |
| SAU101231 | 4344 | 5399 |
| SAU101235 | 4345 | 5400 |
| SAU101236 | 4346 | 5401 |
| SAU101239 | 4347 | 5402 |
| SAU101240 | 4348 | 5403 |
| SAU101242 | 4349 | 5404 |
| SAU101247 | 4350 | 5405 |
| SAU101262 | 4351 | 5406 |
| SAU101265 | 4352 | 5407 |
| SAU101266 | 4353 | 5408 |
| SAU101267 | 4354 | 5409 |
| SAU101270 | 4355 | 5410 |
| SAU101271 | 4356 | 5411 |
| SAU101275 | 4357 | 5412 |
| SAU101286 | 4358 | 5413 |
| SAU101293 | 4359 | 5414 |
| SAU101300 | 4360 | 5415 |
| SAU101301 | 4361 | 5416 |
| SAU101302 | 4362 | 5417 |
| SAU101310 | 4363 | 5418 |
| SAU101311 | 4364 | 5419 |
| SAU101320 | 4365 | 5420 |
| SAU101327 | 4366 | 5421 |
| SAU101339 | 4367 | 5422 |
| SAU101340 | 4368 | 5423 |
| SAU101341 | 4369 | 5424 |
| SAU101343 | 4370 | 5425 |
| SAU101344 | 4371 | 5426 |
| SAU101346 | 4372 | 5427 |
| SAU101347 | 4373 | 5428 |
| SAU101350 | 4374 | 5429 |
| SAU101351 | 4375 | 5430 |
| SAU101360 | 4376 | 5431 |
| SAU101365 | 4377 | 5432 |
| SAU101366 | 4378 | 5433 |
| SAU101369 | 4379 | 5434 |
| SAU101371 | 4380 | 5435 |
| SAU101381 | 4381 | 5436 |
| SAU101382 | 4382 | 5437 |
| SAU101383 | 4383 | 5438 |
| SAU101385 | 4384 | 5439 |
| SAU101387 | 4385 | 5440 |
| SAU101389 | 4386 | 5441 |
| SAU101398 | 4387 | 5442 |
| SAU101399 | 4388 | 5443 |
| SAU101400 | 4389 | 5444 |
| SAU101408 | 4390 | 5445 |
| SAU101421 | 4391 | 5446 |
| SAU101427 | 4392 | 5447 |
| SAU101432 | 4393 | 5448 |
| SAU101436 | 4394 | 5449 |
| SAU101438 | 4395 | 5450 |
| SAU101444 | 4396 | 5451 |
| SAU101445 | 4397 | 5452 |
| SAU101446 | 4398 | 5453 |
| SAU101447 | 4399 | 5454 |
| SAU101452 | 4400 | 5455 |
| SAU101455 | 4401 | 5456 |
| SAU101461 | 4402 | 5457 |
| SAU101463 | 4403 | 5458 |
| SAU101476 | 4404 | 5459 |
| SAU101481 | 4405 | 5460 |
| SAU101482 | 4406 | 5461 |
| SAU101483 | 4407 | 5462 |
| SAU101488 | 4408 | 5463 |
| SAU101491 | 4409 | 5464 |
| SAU101492 | 4410 | 5465 |
| SAU101493 | 4411 | 5466 |
| SAU101495 | 4412 | 5467 |
| SAU101497 | 4413 | 5468 |
| SAU101509 | 4414 | 5469 |
| SAU101526 | 4415 | 5470 |
| SAU101529 | 4416 | 5471 |
| SAU101541 | 4417 | 5472 |
| SAU101543 | 4418 | 5473 |
| SAU101545 | 4419 | 5474 |
| SAU101546 | 4420 | 5475 |
| SAU101549 | 4421 | 5476 |
| SAU101551 | 4422 | 5477 |
| SAU101554 | 4423 | 5478 |
| SAU101561 | 4424 | 5479 |
| SAU101565 | 4425 | 5480 |
| SAU101567 | 4426 | 5481 |
| SAU101570 | 4427 | 5482 |
| SAU101571 | 4428 | 5483 |
| SAU101572 | 4429 | 5484 |
| SAU101573 | 4430 | 5485 |
| SAU101574 | 4431 | 5486 |
| SAU101575 | 4432 | 5487 |
| SAU101576 | 4433 | 5488 |
| SAU101586 | 4434 | 5489 |
| SAU101592 | 4435 | 5490 |
| SAU101599 | 4436 | 5491 |
| SAU101610 | 4437 | 5492 |
| SAU101612 | 4438 | 5493 |
| SAU101614 | 4439 | 5494 |
| SAU101616 | 4440 | 5495 |
| SAU101622 | 4441 | 5496 |
| SAU101624 | 4442 | 5497 |
| SAU101630 | 4443 | 5498 |
| SAU101632 | 4444 | 5499 |
| SAU101637 | 4445 | 5500 |
| SAU101641 | 4446 | 5501 |
| SAU101651 | 4447 | 5502 |
| SAU101652 | 4448 | 5503 |
| SAU101653 | 4449 | 5504 |
| SAU101655 | 4450 | 5505 |
| SAU101663 | 4451 | 5506 |
| SAU101664 | 4452 | 5507 |
| SAU101674 | 4453 | 5508 |
| SAU101679 | 4454 | 5509 |
| SAU101681 | 4455 | 5510 |
| SAU101682 | 4456 | 5511 |
| SAU101685 | 4457 | 5512 |
| SAU101717 | 4458 | 5513 |
| SAU101724 | 4459 | 5514 |
| SAU101726 | 4460 | 5515 |
| SAU101727 | 4461 | 5516 |
| SAU101728 | 4462 | 5517 |
| SAU101736 | 4463 | 5518 |
| SAU101737 | 4464 | 5519 |
| SAU101744 | 4465 | 5520 |
| SAU101751 | 4466 | 5521 |
| SAU101752 | 4467 | 5522 |
| SAU101754 | 4468 | 5523 |
| SAU101756 | 4469 | 5524 |
| SAU101771 | 4470 | 5525 |
| SAU101772 | 4471 | 5526 |
| SAU101777 | 4472 | 5527 |
| SAU101781 | 4473 | 5528 |
| SAU101782 | 4474 | 5529 |
| SAU101784 | 4475 | 5530 |
| SAU101790 | 4476 | 5531 |
| SAU101791 | 4477 | 5532 |
| SAU101792 | 4478 | 5533 |
| SAU101793 | 4479 | 5534 |
| SAU101794 | 4480 | 5535 |
| SAU101795 | 4481 | 5536 |
| SAU101797 | 4482 | 5537 |
| SAU101798 | 4483 | 5538 |
| SAU101799 | 4484 | 5539 |
| SAU101800 | 4485 | 5540 |
| SAU101801 | 4486 | 5541 |
| SAU101802 | 4487 | 5542 |
| SAU101803 | 4488 | 5543 |
| SAU101804 | 4489 | 5544 |
| SAU101805 | 4490 | 5545 |
| SAU101806 | 4491 | 5546 |
| SAU101807 | 4492 | 5547 |
| SAU101808 | 4493 | 5548 |
| SAU101810 | 4494 | 5549 |
| SAU101811 | 4495 | 5550 |
| SAU101814 | 4496 | 5551 |
| SAU101815 | 4497 | 5552 |
| SAU101818 | 4498 | 5553 |
| SAU101824 | 4499 | 5554 |
| SAU101833 | 4500 | 5555 |
| SAU101839 | 4501 | 5556 |
| SAU101842 | 4502 | 5557 |
| SAU101845 | 4503 | 5558 |
| SAU101849 | 4504 | 5559 |
| SAU101857 | 4505 | 5560 |
| SAU101862 | 4506 | 5561 |
| SAU101864 | 4507 | 5562 |
| SAU101865 | 4508 | 5563 |
| SAU101866 | 4509 | 5564 |
| SAU101868 | 4510 | 5565 |
| SAU101869 | 4511 | 5566 |
| SAU101876 | 4512 | 5567 |
| SAU101881 | 4513 | 5568 |
| SAU101882 | 4514 | 5569 |
| SAU101890 | 4515 | 5570 |
| SAU101891 | 4516 | 5571 |
| SAU101893 | 4517 | 5572 |
| SAU101904 | 4518 | 5573 |
| SAU101907 | 4519 | 5574 |
| SAU101909 | 4520 | 5575 |
| SAU101910 | 4521 | 5576 |
| SAU101915 | 4522 | 5577 |
| SAU101922 | 4523 | 5578 |
| SAU101948 | 4524 | 5579 |
| SAU101966 | 4525 | 5580 |
| SAU101968 | 4526 | 5581 |
| SAU101991 | 4527 | 5582 |
| SAU101995 | 4528 | 5583 |
| SAU101996 | 4529 | 5584 |
| SAU101999 | 4530 | 5585 |
| SAU102001 | 4531 | 5586 |
| SAU102002 | 4532 | 5587 |
| SAU102003 | 4533 | 5588 |
| SAU102006 | 4534 | 5589 |
| SAU102007 | 4535 | 5590 |
| SAU102032 | 4536 | 5591 |
| SAU102035 | 4537 | 5592 |
| SAU102044 | 4538 | 5593 |
| SAU102046 | 4539 | 5594 |
| SAU102049 | 4540 | 5595 |
| SAU102054 | 4541 | 5596 |
| SAU102059 | 4542 | 5597 |
| SAU102067 | 4543 | 5598 |
| SAU102068 | 4544 | 5599 |
| SAU102102 | 4545 | 5600 |
| SAU102113 | 4546 | 5601 |
| SAU102116 | 4547 | 5602 |
| SAU102117 | 4548 | 5603 |
| SAU102129 | 4549 | 5604 |
| SAU102132 | 4550 | 5605 |
| SAU102142 | 4551 | 5606 |
| SAU102143 | 4552 | 5607 |
| SAU102144 | 4553 | 5608 |
| SAU102162 | 4554 | 5609 |
| SAU102165 | 4555 | 5610 |
| SAU102200 | 4556 | 5611 |
| SAU102201 | 4557 | 5612 |
| SAU102222 | 4558 | 5613 |
| SAU102231 | 4559 | 5614 |
| SAU102232 | 4560 | 5615 |
| SAU102233 | 4561 | 5616 |
| SAU102241 | 4562 | 5617 |
| SAU102242 | 4563 | 5618 |
| SAU102246 | 4564 | 5619 |
| SAU102247 | 4565 | 5620 |
| SAU102252 | 4566 | 5621 |
| SAU102256 | 4567 | 5622 |
| SAU102257 | 4568 | 5623 |
| SAU102259 | 4569 | 5624 |
| SAU102260 | 4570 | 5625 |
| SAU102261 | 4571 | 5626 |
| SAU102262 | 4572 | 5627 |
| SAU102264 | 4573 | 5628 |
| SAU102265 | 4574 | 5629 |
| SAU102268 | 4575 | 5630 |
| SAU102270 | 4576 | 5631 |
| SAU102280 | 4577 | 5632 |
| SAU102281 | 4578 | 5633 |
| SAU102283 | 4579 | 5634 |
| SAU102284 | 4580 | 5635 |
| SAU102286 | 4581 | 5636 |
| SAU102287 | 4582 | 5637 |
| SAU102292 | 4583 | 5638 |
| SAU102294 | 4584 | 5639 |
| SAU102297 | 4585 | 5640 |
| SAU102298 | 4586 | 5641 |
| SAU102308 | 4587 | 5642 |
| SAU102318 | 4588 | 5643 |
| SAU102333 | 4589 | 5644 |
| SAU102334 | 4590 | 5645 |
| SAU102336 | 4591 | 5646 |
| SAU102340 | 4592 | 5647 |
| SAU102345 | 4593 | 5648 |
| SAU102350 | 4594 | 5649 |
| SAU102352 | 4595 | 5650 |
| SAU102355 | 4596 | 5651 |
| SAU102356 | 4597 | 5652 |
| SAU102378 | 4598 | 5653 |
| SAU102380 | 4599 | 5654 |
| SAU102388 | 4600 | 5655 |
| SAU102389 | 4601 | 5656 |
| SAU102390 | 4602 | 5657 |
| SAU102392 | 4603 | 5658 |
| SAU102394 | 4604 | 5659 |
| SAU102396 | 4605 | 5660 |
| SAU102401 | 4606 | 5661 |
| SAU102407 | 4607 | 5662 |
| SAU102417 | 4608 | 5663 |
| SAU102418 | 4609 | 5664 |
| SAU102420 | 4610 | 5665 |
| SAU102422 | 4611 | 5666 |
| SAU102423 | 4612 | 5667 |
| SAU102433 | 4613 | 5668 |
| SAU102434 | 4614 | 5669 |
| SAU102437 | 4615 | 5670 |
| SAU102440 | 4616 | 5671 |
| SAU102447 | 4617 | 5672 |
| SAU102448 | 4618 | 5673 |
| SAU102449 | 4619 | 5674 |
| SAU102450 | 4620 | 5675 |
| SAU102452 | 4621 | 5676 |
| SAU102453 | 4622 | 5677 |
| SAU102460 | 4623 | 5678 |
| SAU102469 | 4624 | 5679 |
| SAU102473 | 4625 | 5680 |
| SAU102474 | 4626 | 5681 |
| SAU102476 | 4627 | 5682 |
| SAU102479 | 4628 | 5683 |
| SAU102480 | 4629 | 5684 |
| SAU102481 | 4630 | 5685 |
| SAU102485 | 4631 | 5686 |
| SAU102486 | 4632 | 5687 |
| SAU102487 | 4633 | 5688 |
| SAU102498 | 4634 | 5689 |
| SAU102502 | 4635 | 5690 |
| SAU102503 | 4636 | 5691 |
| SAU102526 | 4637 | 5692 |
| SAU102527 | 4638 | 5693 |
| SAU102531 | 4639 | 5694 |
| SAU102533 | 4640 | 5695 |
| SAU102534 | 4641 | 5696 |
| SAU102541 | 4642 | 5697 |
| SAU102551 | 4643 | 5698 |
| SAU102554 | 4644 | 5699 |
| SAU102575 | 4645 | 5700 |
| SAU102578 | 4646 | 5701 |
| SAU102584 | 4647 | 5702 |
| SAU102585 | 4648 | 5703 |
| SAU102593 | 4649 | 5704 |
| SAU102598 | 4650 | 5705 |
| SAU102599 | 4651 | 5706 |
| SAU102601 | 4652 | 5707 |
| SAU102602 | 4653 | 5708 |
| SAU102603 | 4654 | 5709 |
| SAU102605 | 4655 | 5710 |
| SAU102606 | 4656 | 5711 |
| SAU102607 | 4657 | 5712 |
| SAU102609 | 4658 | 5713 |
| SAU102610 | 4659 | 5714 |
| SAU102613 | 4660 | 5715 |
| SAU102614 | 4661 | 5716 |
| SAU102615 | 4662 | 5717 |
| SAU102620 | 4663 | 5718 |
| SAU102621 | 4664 | 5719 |
| SAU102629 | 4665 | 5720 |
| SAU102631 | 4666 | 5721 |
| SAU102636 | 4667 | 5722 |
| SAU102637 | 4668 | 5723 |
| SAU102639 | 4669 | 5724 |
| SAU102652 | 4670 | 5725 |
| SAU102658 | 4671 | 5726 |
| SAU102663 | 4672 | 5727 |
| SAU102669 | 4673 | 5728 |
| SAU102671 | 4674 | 5729 |
| SAU102674 | 4675 | 5730 |
| SAU102693 | 4676 | 5731 |
| SAU102694 | 4677 | 5732 |
| SAU102725 | 4678 | 5733 |
| SAU102764 | 4679 | 5734 |
| SAU102766 | 4680 | 5735 |
| SAU102812 | 4681 | 5736 |
| SAU102863 | 4682 | 5737 |
| SAU102870 | 4683 | 5738 |
| SAU102880 | 4684 | 5739 |
| SAU102881 | 4685 | 5740 |
| SAU102883 | 4686 | 5741 |
| SAU102905 | 4687 | 5742 |
| SAU102909 | 4688 | 5743 |
| SAU102933 | 4689 | 5744 |
| SAU102935 | 4690 | 5745 |
| SAU102936 | 4691 | 5746 |
| SAU102939 | 4692 | 5747 |
| SAU102942 | 4693 | 5748 |
| SAU102944 | 4694 | 5749 |
| SAU102979 | 4695 | 5750 |
| SAU102983 | 4696 | 5751 |
| SAU102992 | 4697 | 5752 |
| SAU103010 | 4698 | 5753 |
| SAU103024 | 4699 | 5754 |
| SAU103025 | 4700 | 5755 |
| SAU103037 | 4701 | 5756 |
| SAU103038 | 4702 | 5757 |
| SAU103042 | 4703 | 5758 |
| SAU103077 | 4704 | 5759 |
| SAU103115 | 4705 | 5760 |
| SAU103144 | 4706 | 5761 |
| SAU103159 | 4707 | 5762 |
| SAU103169 | 4708 | 5763 |
| SAU103175 | 4709 | 5764 |
| SAU103191 | 4710 | 5765 |
| SAU103198 | 4711 | 5766 |
| SAU103204 | 4712 | 5767 |
| SAU103226 | 4713 | 5768 |
| SAU103232 | 4714 | 5769 |
| SAU200006 | 4715 | 5770 |
| SAU200028 | 4716 | 5771 |
| SAU200030 | 4717 | 5772 |
| SAU200058 | 4718 | 5773 |
| SAU200059 | 4719 | 5774 |
| SAU200088 | 4720 | 5775 |
| SAU200157 | 4721 | 5776 |
| SAU200242 | 4722 | 5777 |
| SAU200297 | 4723 | 5778 |
| SAU200345 | 4724 | 5779 |
| SAU200392 | 4725 | 5780 |
| SAU200468 | 4726 | 5781 |
| SAU200558 | 4727 | 5782 |
| SAU200561 | 4728 | 5783 |
| SAU200564 | 4729 | 5784 |
| SAU200565 | 4730 | 5785 |
| SAU200593 | 4731 | 5786 |
| SAU200601 | 4732 | 5787 |
| SAU200628 | 4733 | 5788 |
| SAU200657 | 4734 | 5789 |
| SAU200685 | 4735 | 5790 |
| SAU200721 | 4736 | 5791 |
| SAU200725 | 4737 | 5792 |
| SAU200731 | 4738 | 5793 |
| SAU200740 | 4739 | 5794 |
| SAU200752 | 4740 | 5795 |
| SAU200914 | 4741 | 5796 |
| SAU200916 | 4742 | 5797 |
| SAU200928 | 4743 | 5798 |
| SAU200934 | 4744 | 5799 |
| SAU200949 | 4745 | 5800 |
| SAU200960 | 4746 | 5801 |
| SAU200994 | 4747 | 5802 |
| SAU201167 | 4748 | 5803 |
| SAU201168 | 4749 | 5804 |
| SAU201184 | 4750 | 5805 |
| SAU201197 | 4751 | 5806 |
| SAU201225 | 4752 | 5807 |
| SAU201236 | 4753 | 5808 |
| SAU201301 | 4754 | 5809 |
| SAU201333 | 4755 | 5810 |
| SAU201375 | 4756 | 5811 |
| SAU201380 | 4757 | 5812 |
| SAU201381 | 4758 | 5813 |
| SAU201385 | 4759 | 5814 |
| SAU201403 | 4760 | 5815 |
| SAU201469 | 4761 | 5816 |
| SAU201486 | 4762 | 5817 |
| SAU201506 | 4763 | 5818 |
| SAU201508 | 4764 | 5819 |
| SAU201513 | 4765 | 5820 |
| SAU201539 | 4766 | 5821 |
| SAU201541 | 4767 | 5822 |
| SAU201558 | 4768 | 5823 |
| SAU201571 | 4769 | 5824 |
| SAU201611 | 4770 | 5825 |
| SAU201615 | 4771 | 5826 |
| SAU201620 | 4772 | 5827 |
| SAU201621 | 4773 | 5828 |
| SAU201654 | 4774 | 5829 |
| SAU201666 | 4775 | 5830 |
| SAU201743 | 4776 | 5831 |
| SAU201752 | 4777 | 5832 |
| SAU201765 | 4778 | 5833 |
| SAU201773 | 4779 | 5834 |
| SAU201775 | 4780 | 5835 |
| SAU201810 | 4781 | 5836 |
| SAU201827 | 4782 | 5837 |
| SAU201929 | 4783 | 5838 |
| SAU201952 | 4784 | 5839 |
| SAU201961 | 4785 | 5840 |
| SAU201971 | 4786 | 5841 |
| SAU202006 | 4787 | 5842 |
| SAU202039 | 4788 | 5843 |
| SAU202126 | 4789 | 5844 |
| SAU202174 | 4790 | 5845 |
| SAU202176 | 4791 | 5846 |
| SAU202186 | 4792 | 5847 |
| SAU202267 | 4793 | 5848 |
| SAU202708 | 4794 | 5849 |
| SAU202731 | 4795 | 5850 |
| SAU202736 | 4796 | 5851 |
| SAU202756 | 4797 | 5852 |
| SAU202781 | 4798 | 5853 |
| SAU202872 | 4799 | 5854 |
| SAU202882 | 4800 | 5855 |
| SAU202930 | 4801 | 5856 |
| SAU202945 | 4802 | 5857 |
| SAU202968 | 4803 | 5858 |
| SAU203001 | 4804 | 5859 |
| SAU203007 | 4805 | 5860 |
| SAU203196 | 4806 | 5861 |
| SAU203293 | 4807 | 5862 |
| SAU203296 | 4808 | 5863 |
| SAU203524 | 4809 | 5864 |
| SAU300110 | 4810 | 5865 |
| SAU300131 | 4811 | 5866 |
| SAU300156 | 4812 | 5867 |
| SAU300191 | 4813 | 5868 |
| SAU300269 | 4814 | 5869 |
| SAU300335 | 4815 | 5870 |
| SAU300338 | 4816 | 5871 |
| SAU300455 | 4817 | 5872 |
| SAU300572 | 4818 | 5873 |
| SAU300617 | 4819 | 5874 |
| SAU300713 | 4820 | 5875 |
| SAU300719 | 4821 | 5876 |
| SAU300732 | 4822 | 5877 |
| SAU300825 | 4823 | 5878 |
| SAU300868 | 4824 | 5879 |
| SAU300975 | 4825 | 5880 |
| SAU300998 | 4826 | 5881 |
| SAU301004 | 4827 | 5882 |
| SAU301030 | 4828 | 5883 |
| SAU301054 | 4829 | 5884 |
| SAU301080 | 4830 | 5885 |
| SAU301118 | 4831 | 5886 |
| SAU301133 | 4832 | 5887 |
| SAU301148 | 4833 | 5888 |
| SAU301223 | 4834 | 5889 |
| SAU301230 | 4835 | 5890 |
| SAU301268 | 4836 | 5891 |
| SAU301275 | 4837 | 5892 |
| SAU301357 | 4838 | 5893 |
| SAU301363 | 4839 | 5894 |
| SAU301433 | 4840 | 5895 |
| SAU301465 | 4841 | 5896 |
| SAU301472 | 4842 | 5897 |
| SAU301592 | 4843 | 5898 |
| SAU301620 | 4844 | 5899 |
| SAU301758 | 4845 | 5900 |
| SAU301773 | 4846 | 5901 |
| SAU301829 | 4847 | 5902 |
| SAU301869 | 4848 | 5903 |
| SAU301898 | 4849 | 5904 |
| SAU302060 | 4850 | 5905 |
| SAU302513 | 4851 | 5906 |
| SAU302626 | 4852 | 5907 |
| SAU302685 | 4853 | 5908 |
| SAU302698 | 4854 | 5909 |
| SAU302699 | 4855 | 5910 |
| SAU302805 | 4856 | 5911 |
| SAU302901 | 4857 | 5912 |
| SAU302931 | 4858 | 5913 |
| SAU302950 | 4859 | 5914 |
| SAU302956 | 4860 | 5915 |

What is claimed is:

1. A purified or isolated nucleic acid sequence comprising a nucleotide sequence consisting essentially of one of SEQ ID NOs: 8-3795, wherein expression of said nucleic acid inhibits proliferation of a cell.

2. A purified or isolated nucleic acid comprising a fragment of one of SEQ ID NOs.: 8-3795, said fragment selected from the group consisting of fragments comprising at least 10, at least 20, at least 25, at least 30, at least 50 and more than 50 consecutive nucleotides of one of SEQ ID NOs: 8-3795.

3. A purified or isolated antisense nucleic acid comprising a nucleotide sequence complementary to at least a portion of an intragenic sequence, intergenic sequence, sequences spanning at least a portion of two or more genes, 5′ noncoding region, or 3′ noncoding region within an operon comprising a proliferation-required gene whose activity or expression is inhibited by an antisense nucleic acid comprising the nucleotide sequence of one of SEQ ID NOs.: 8-3795.

4. A purified or isolated nucleic acid comprising a nucleotide sequence having at least 70% identity to a nucleotide sequence selected from the group consisting of SEQ ID NOs.: 8-3795, fragments comprising at least 25 consecutive nucleotides of SEQ ID NOs.: 8-3795, the nucleotide sequences complementary to SEQ ID NOs.: 8-3795 and the sequences complementary to fragments comprising at least 25 consecutive nucleotides of SEQ ID NOs.: 8-3795 as determined using BLASTN version 2.0 with the default parameters.

5. A vector comprising a promoter operably linked to a nucleic acid encoding a polypeptide whose expression is inhibited by an antisense nucleic acid comprising a nucleotide sequence of any one of SEQ ID NOs.: 8-3795.

6. A purified or isolated polypeptide comprising a polypeptide whose expression is inhibited by an antisense nucleic acid comprising a nucleotide sequence of any one of SEQ ID NOs.: 8-3795, or a fragment selected from the group consisting of fragments comprising at least 5, at least 10, at least 20, at least 30, at least 40, at least 50, at least 60 or more than 60 consecutive amino acids of one of the said polypeptides.

7. A purified or isolated polypeptide comprising a polypeptide having at least 25% amino acid identity to a polypeptide whose expression is inhibited by a nucleic acid comprising a nucleotide sequence selected from the group consisting of SEQ ID NOs.: 8-3795, or at least 25% amino acid identity to a fragment comprising at least 10, at least 20, at least 30, at least 40, at least 50, at least 60 or more than 60 consecutive amino acids of a polypeptide whose expression is inhibited by a nucleic acid comprising a nucleotide sequence selected from the group consisting of SEQ ID NOs.: 8-3795 as determined using FASTA version 3.0t78 with the default parameters.

8. A method of producing a polypeptide, comprising introducing a vector comprising a promoter operably linked to a nucleic acid comprising a nucleotide sequence encoding a polypeptide whose expression is inhibited by an antisense nucleic acid comprising one of SEQ ID NOs.: 8-3795 into a cell.

9. A method of inhibiting proliferation of a cell in an individual comprising inhibiting the activity or reducing the amount of a gene product whose expression is inhibited by an antisense nucleic acid comprising a nucleotide sequence selected from the group consisting of SEQ ID NOs.: 8-3795 or inhibiting the activity or reducing the amount of a nucleic acid encoding said gene product.

10. A method for identifying a compound which influences the activity of a gene product required for proliferation, said gene product comprising a gene product whose expression is inhibited by an antisense nucleic acid comprising a nucleotide sequence selected from the group consisting of SEQ ID NOs.: 8-3795, said method comprising:
contacting said gene product with a candidate compound; and
determining whether said compound influences the activity of said gene product.

11. A method for identifying a compound or nucleic acid having the ability to reduce the activity or level of a gene product required for proliferation, said gene product comprising a gene product whose activity or expression is inhibited by an antisense nucleic acid comprising a nucleotide sequence selected from the group consisting of SEQ ID NOs.: 8-3795, said method comprising:
(a) contacting a target gene or RNA encoding said gene product with a candidate compound or nucleic acid; and
(b) measuring an activity of said target.

12. A method for identifying a compound which reduces the activity or level of a gene product required for proliferation of a cell, wherein the activity or expression of said gene product is inhibited by an antisense nucleic acid comprising a nucleotide sequence selected from the group consisting of SEQ ID NOs.: 8-3795, said method comprising the steps of:
(a) providing a sublethal level of an antisense nucleic acid comprising a nucleotide sequence complementary to a nucleic acid comprising a nucleotide sequence encoding said gene product in a cell to reduce the activity or amount of said gene product in said cell, thereby producing a sensitized cell;
(b) contacting said sensitized cell with a compound; and
(c) determining the degree to which said compound inhibits proliferation of said sensitized cell relative to a cell which does not contain said antisense nucleic acid.

13. A method for inhibiting cellular proliferation comprising introducing an effective amount of a compound with activity against a gene whose activity or expression is inhibited by an antisense nucleic acid comprising a nucleotide sequence selected from the group consisting of SEQ ID NOs.: 8-3795 or a compound with activity against the product of said gene into a population of cells expressing said gene.

14. A composition comprising an effective concentration of an antisense nucleic acid comprising a nucleotide sequence selected from the group consisting of SEQ ID NOs.: 8-3795, or a proliferation-inhibiting portion thereof in a pharmaceutically acceptable carrier.

15. A method for inhibiting the activity or expression of a gene in an operon required for proliferation wherein the activity or expression of at least one gene in said operon is inhibited by an antisense nucleic acid comprising a sequence selected from the group consisting of SEQ ID NOs.: 8-3795, said method comprising contacting a cell in a cell population with an antisense nucleic acid complementary to at least a portion of said operon.

16. A method for identifying a gene which is required for proliferation of a cell comprising:
(a) contacting a cell with an antisense nucleic acid comprising a nucleotide sequence selected from the group consisting of SEQ ID NOs.: 8-3795, wherein said cell is a cell other than the organism from which said nucleic acid was obtained;
(b) determining whether said nucleic acid inhibits proliferation of said cell; and
(c) identifying the gene in said cell which encodes the mRNA which is complementary to said antisense nucleic acid or a portion thereof.

17. A method for identifying a compound having the ability to inhibit proliferation of a cell comprising:
(a) identifying a homolog of a gene or gene product whose activity or level is inhibited by a nucleic acid comprising a nucleotide sequence selected from the group consisting of SEQ ID NOs. 8-3795 in a test cell, wherein said test cell is not the cell from which said nucleic acid was obtained;
(b) identifying an inhibitory nucleic acid sequence which inhibits the activity of said homolog in said test cell;
(c) contacting said test cell with a sublethal level of said inhibitory nucleic acid, thus sensitizing said cell;
(d) contacting the sensitized cell of step (c) with a compound; and
(e) determining the degree to which said compound inhibits proliferation of said sensitized cell relative to a cell which does not contain said inhibitory nucleic acid.

18. A method of identifying a compound having the ability to inhibit proliferation comprising:
(a) contacting a test cell with a sublethal level of a nucleic acid comprising a nucleotide sequence selected from the group consisting of SEQ ID NOs. 8-3795 or a portion thereof which inhibits the proliferation of the cell from which said nucleic acid was obtained, thus sensitizing said test cell;
(b) contacting the sensitized test cell of step (a) with a compound; and
(c) determining the degree to which said compound inhibits proliferation of said sensitized test cell relative to a cell which does not contain said nucleic acid.

19. A method for identifying a compound having activity against a biological pathway required for proliferation comprising:
(a) sensitizing a cell by providing a sublethal level of an antisense nucleic acid complementary to a nucleic acid encoding a gene product required for proliferation, wherein the activity or expression of said gene product is inhibited by an antisense nucleic acid comprising a nucleotide sequence selected from the group consisting of SEQ ID NOs.: 8-3795, in said cell to reduce the activity or amount of said gene product;
(b) contacting the sensitized cell with a compound; and
(c) determining the degree to which said compound inhibits the growth of said sensitized cell relative to a cell which does not contain said antisense nucleic acid.

20. A method for identifying a compound having the ability to inhibit cellular proliferation comprising:
(a) contacting a cell with an agent which reduces the activity or level of a gene product required for proliferation of said cell, wherein said gene product is a gene product whose activity or expression is inhibited by an antisense nucleic acid comprising a nucleotide sequence selected from the group consisting of SEQ ID NOs.: 8-3795;
(b) contacting said cell with a compound; and
(c) determining whether said compound reduces proliferation of said contacted cell by acting on said gene product.

21. A method for identifying the biological pathway in which a proliferation-required gene or its gene product lies, wherein said gene or gene product comprises a gene or gene product whose activity or expression is inhibited by an antisense nucleic acid comprising a sequence selected from the group consisting of SEQ ID NOs.: 8-3795, said method comprising:
(a) providing a sublethal level of an antisense nucleic acid which inhibits the activity of said proliferation-required gene or gene product in a test cell;
(b) contacting said test cell with a compound known to inhibit growth or proliferation of a cell, wherein the biological pathway on which said compound acts is known; and
(c) determining the degree to which said proliferation of said test cell is inhibited relative to a cell which was not contacted with said compound.

22. A method for determining the biological pathway on which a test compound acts comprising:
(a) providing a sublethal level of an antisense nucleic acid complementary to a proliferation-required nucleic acid in a first cell, wherein the activity or expression of said proliferation-required nucleic acid is inhibited by an antisense nucleic acid comprising a sequence selected from the group consisting of SEQ ID NOs.: 8-3795 and wherein the biological pathway in which said proliferation-required nucleic acid or a protein encoded by said proliferation-required nucleic acid lies is known,
(b) contacting said first cell with said test compound; and
(c) determining the degree to which said test compound inhibits proliferation of said first cell relative to a cell which does not contain said antisense nucleic acid.

23. A purified or isolated nucleic acid comprising a sequence selected from the group consisting of SEQ ID NOs.: 8-3795.

24. A compound which interacts with a gene or gene product whose activity or expression is inhibited by an antisense nucleic acid comprising a nucleotide sequence of one of SEQ ID NOs.: 8-3795 to inhibit proliferation.

25. A compound which interacts with a gene product whose expression is inhibited by an antisense nucleic acid comprising a nucleotide sequence of one of SEQ ID NOs.: 8-3795 to inhibit proliferation.

26. A method for manufacturing an antibiotic comprising the steps of:
screening one or more candidate compounds to identify a compound that reduces the activity or level of a gene product required for proliferation, said gene product comprising a gene product whose activity or expression is inhibited by an antisense nucleic acid comprising a nucleotide sequence selected from the group consisting of SEQ ID NOs.: 8-3795; and
manufacturing the compound so identified.

27. A purified or isolated nucleic acid comprising a nucleic acid having at least 70% nucleotide sequence identity to a nucleotide sequence selected from the group consisting of SEQ ID NOs.: 3796-3800, 3806-4860, 5916-10012, fragments comprising at least 25 consecutive nucleotides of SEQ ID NOs.: 3796-3800, 3806-4860, 5916-10012, the nucleotide sequences complementary to SEQ ID NOs.:3796-3800, 3806-4860, 5916-10012, and the nucleotide sequences complementary to fragments comprising at least 25 consecutive nucleotides of SEQ ID NOs.: 3796-3800, 3806-4860, 5916-10012 as determined using BLASTN version 2.0 with the default parameters.

28. A method of inhibiting proliferation of a cell comprising inhibiting the activity or reducing the amount of a gene product in said cell or inhibiting the activity or reducing the amount of a nucleic acid encoding said gene product in said cell, wherein said gene product is selected from the group consisting of a gene product having having at least 70% nucleotide sequence identity as determined using BLASTN version 2.0 with the default parameters to a gene product whose expression is inhibited by an antisense nucleic acid comprising a nucleotide sequence selected from the group consisting of SEQ ID NOs.: 8-3795, a gene product encoded by a nucleic acid having at least 70% nucleotide sequence identity as determined using BLASTN version 2.0 with the default parameters to a nucleic acid encoding a gene product whose expression is inhibited by an antisense nucleic acid comprising a nucleotide sequence selected from the group consisting of SEQ ID NOs:8-3795, a gene product having at least 25% amino acid identity as determined using FASTA version 3.0t78 with the default parameters to a gene product whose expression is inhibited by an antisense nucleic acid comprising a nucleotide sequence selected from the group consisting of SEQ ID NOs.: 8-3795, a gene product encoded by a nucleic acid which hybridizes to a nucleic acid comprising a nucleotide sequence selected from the group consisting of SEQ ID NOs.: 8-3795 under stringent conditions, a gene product encoded by a nucleic acid which hybridizes to a nucleic acid comprising a nucleotide sequence selected from the group consisting of SEQ ID NOs.: 8-3795 under moderate conditions, and a gene product whose activity may be complemented by the gene product whose activity is inhibited by a nucleic acid comprising a nucleotide sequence selected from the group consisting of SEQ ID NOs: 8-3795.

29. A method for identifying a compound which influences the activity of a gene product required for proliferation comprising:
contacting a candidate compound with a gene product selected from the group consisting of a gene product having at least 70% nucleotide sequence identity as determined using BLASTN version 2.0 with the default parameters to a gene product whose expression is inhibited by an antisense nucleic acid comprising a nucleotide sequence selected from the group consisting of SEQ ID NOs.: 8-3795, a gene product encoded by a nucleic acid having at least 70% nucleotide sequence identity as determined using BLASTN version 2.0 with the default parameters to a nucleic acid encoding a gene product whose expression is inhibited by an antisense nucleic acid comprising a nucleotide sequence selected from the group consisting of SEQ ID NOs:8-3795, a gene product having at least 25% amino acid identity as determined using FASTA version 3.0t78 with the default parameters to a gene product whose expression is inhibited by an antisense nucleic acid comprising a nucleotide sequence selected from the group consisting of SEQ ID NOs.: 8-3795, a gene product encoded by a nucleic acid comprising a nucleotide sequence which hybridizes to a nucleic acid selected from the group consisting of SEQ ID NOs.: 8-3795 under stringent conditions, a gene product encoded by a nucleic acid comprising a nucleotide sequence which hybridizes to a nucleic acid selected from the group consisting of SEQ ID NOs.: 8-3795 under moderate conditions, and a gene product whose activity may be complemented by the gene product whose activity is inhibited by a nucleic acid selected from the group consisting of SEQ ID NOs: 8-3795; and
determining whether said candidate compound influences the activity of said gene product.

30. A method for identifying a compound or nucleic acid having the ability to reduce the activity or level of a gene product required for proliferation comprising:
(a) providing a target that is a gene or RNA, wherein said target comprises a nucleic acid that encodes a gene product selected from the group consisting of a gene product having having at least 70% nucleotide sequence identity as determined using BLASTN version 2.0 with the default parameters to a gene product whose expression is inhibited by an antisense nucleic acid comprising a nucleotide sequence selected from the group consisting of SEQ ID NOs.: 8-3795, a gene product encoded by a nucleic acid having at least 70% nucleic acid identity as determined using BLASTN version 2.0 with the default parameters to a nucleic acid encoding a gene product whose expression is inhibited by an antisense nucleic acid comprising a nucleotide sequence selected from the group consisting of SEQ ID NOs:8-3795, a gene product having at least 25% amino acid identity as determined using FASTA version 3.0t78 with the default parameters to a gene product whose expression is inhibited by an antisense nucleic acid comprising a sequence selected from the group consisting of SEQ ID NOs.: 8-3795, a gene product encoded by a nucleic acid comprising a nucleotide sequence which hybridizes to a nucleic acid selected from the group consisting of SEQ ID NOs.: 8-3795 under stringent conditions, a gene product encoded by a nucleic acid comprising a nucleotide sequence which hybridizes to a nucleic acid selected from the group consisting of SEQ ID NOs.: 8-3795 under moderate conditions, and a gene product whose activity may be complemented by the gene product whose activity is inhibited by a nucleic acid selected from the group consisting of SEQ ID NOs: 8-3795;
(b) contacting said target with a candidate compound or nucleic acid; and
(c) measuring an activity of said target.

31. A method for identifying a compound which reduces the activity or level of a gene product required for proliferation of a cell comprising:
(a) providing a sublethal level of an antisense nucleic acid complementary to a nucleic acid encoding said gene product in a cell to reduce the activity or amount of said gene product in said cell, thereby producing a sensitized cell, wherein said gene product is selected from the group consisting of a gene product having having at least 70% nucleic acid identity as determined using BLASTN version 2.0 with the default parameters to a gene product whose expression is inhibited by an antisense nucleic acid comprising a nucleotide sequence selected from the group consisting of SEQ ID NOs.: 8-3795, a gene product encoded by a nucleic acid having at least 70% nucleotide sequence identity as determined using BLASTN version 2.0 with the default parameters to a nucleic acid encoding a gene product whose expression is inhibited by an antisense nucleic acid comprising a nucleotide sequence selected from the group consisting of SEQ ID NOs:8-3795, a gene product having at least 25% amino acid identity as determined using FASTA version 3.0t78 with the default parameters to a gene product whose expression is inhibited by an antisense nucleic acid comprising a nucleotide sequence selected from the group consisting of SEQ ID NOs.: 8-3795, a gene product encoded by a nucleic acid comprising a nucleotide sequence which hybridizes to a nucleic acid selected from the group consisting of SEQ ID NOs.: 8-3795 under stringent conditions, a gene product encoded by a nucleic acid comprising a nucleotide sequence which hybridizes to a nucleic acid comprising a nucleotide sequence selected from the group consisting of SEQ ID NOs.: 8-3795 under moderate conditions, and a gene product whose activity may be complemented by the gene product whose activity is inhibited by a nucleic acid selected from the group consisting of SEQ ID NOs: 8-3795;
(b) contacting said sensitized cell with a compound; and
(c) determining the degree to which said compound inhibits the growth of said sensitized cell relative to a cell which does not contain said antisense nucleic acid.

32. A method for inhibiting cellular proliferation comprising introducing a compound with activity against a gene product or a compound with activity against a gene encoding said gene product into a population of cells expressing said gene product, wherein said gene product is selected from the group consisting of a gene product having at least 70% nucleotide sequence identity as determined using BLASTN version 2.0 with the default parameters to a gene product whose expression is inhibited by an antisense nucleic acid comprising a nucleotide sequence selected from the group consisting of SEQ ID NOs.: 8-3795, a gene product encoded by a nucleic acid having at least 70% nucleotide sequence identity as determined using BLASTN version 2.0 with the default parameters to a nucleic acid encoding a gene product whose expression is inhibited by an antisense nucleic acid comprising a nucleotide sequence selected from the group consisting of SEQ ID NOs:8-3795, a gene product having at least 25% amino acid identity as determined using FASTA version 3.0t78 with the default parameters to a gene product whose expression is inhibited by an antisense nucleic acid comprising a nucleotide sequence selected from the group consisting of SEQ ID NOs.: 8-3795, a gene product encoded by a nucleic acid comprising a nucleotide sequence which hybridizes to a nucleic acid selected from the group consisting of SEQ ID NOs.: 8-3795 under stringent conditions, a gene product encoded by a nucleic acid comprising a nucleotide sequence which hybridizes to a nucleic acid selected from the group consisting of SEQ ID NOs.: 8-3795 under moderate conditions, and a gene product whose activity may be complemented by the gene product whose activity is inhibited by a nucleic acid selected from the group consisting of SEQ ID NOs: 8-3795.

33. A preparation comprising an effective concentration of an antisense nucleic acid in a pharmaceutically acceptable carrier wherein said antisense nucleic acid is selected from the group consisting of a nucleic acid comprising a sequence having at least 70% nucleotide sequence identity as determined using BLASTN version 2.0 with the default parameters to a nucleotide sequence selected from the group consisting of SEQ ID NOs.: 8-3795 or a proliferation-inhibiting portion thereof, a nucleic acid comprising a nucleotide sequence which hybridizes to a nucleic acid selected from the group consisting of SEQ ID NOs.: 8-3795 under stringent conditions, and a nucleic acid comprising a nucleotide sequence which hybridizes to a nucleic acid selected from the group consisting of SEQ ID NOs.: 8-3795 under moderate conditions.

34. A method for inhibiting the activity or expression of a gene in an operon which encodes a gene product required for proliferation comprising contacting a cell in a cell population with an antisense nucleic acid comprising at least a proliferation-inhibiting portion of said operon in an antisense orientation, wherein said gene product is selected from the group consisting of a gene product having at least 70% nucleotide sequence identity as determined using BLASTN version 2.0 with the default parameters to a gene product whose expression is inhibited by an antisense nucleic acid comprising a nucleotide sequence selected from the group consisting of SEQ ID NOs.: 8-3795, a gene product encoded by a nucleic acid having at least 70% nucleotide sequence identity as determined using BLASTN version 2.0 with the default parameters to a nucleic acid encoding a gene product whose expression is inhibited by an antisense nucleic acid comprising a nucleotide sequence selected from the group consisting of SEQ ID NOs:8-3795, a gene product having at least 25% amino acid identity as determined using FASTA version 3.0t78 with the default parameters to a gene product whose expression is inhibited by an antisense nucleic acid comprising a nucleotide sequence selected from the group consisting of SEQ ID NOs.: 8-3795, a gene product encoded by a nucleic acid comprising a nucleotide sequence which hybridizes to a nucleic acid selected from the group consisting of SEQ ID NOs.: 8-3795 under stringent conditions, a gene product encoded by a nucleic acid comprising a nucleotide sequence which hybridizes to a nucleic acid selected from the group consisting of SEQ ID NOs.: 8-3795 under moderate conditions, and a gene product whose activity may be complemented by the gene product whose activity is inhibited by a nucleic acid selected from the group consisting of SEQ ID NOs: 8-3795.

35. A method for identifying a gene which is required for proliferation of a cell comprising:
(a) contacting a cell with an antisense nucleic acid selected from the group consisting of a nucleic acid at least 70% nucleotide sequence identity as determined using BLASTN version 2.0 with the default parameters to a nucleotide sequence selected from the group consisting of SEQ ID NOs.: 8-3795 or a proliferation-inhibiting portion thereof, a nucleic acid comprising a nucleotide sequence which hybridizes to a nucleic acid selected from the group consisting of SEQ ID NOs.: 8-3795 under stringent conditions, and a nucleic acid comprising a nucleotide sequence which hybridizes to a nucleic acid selected from the group consisting of SEQ ID NOs.: 8-3795 under moderate conditions, wherein said cell is a cell other than the organism from which said nucleic acid was obtained;
(b) determining whether said nucleic acid inhibits proliferation of said cell; and
(c) identifying the gene in said cell which encodes the mRNA which is complementary to said antisense nucleic acid or a portion thereof.

36. A method for identifying a compound having the ability to inhibit proliferation of a cell comprising:
(a) identifying a homolog of a gene or gene product whose activity or level is inhibited by an antisense nucleic acid in a test cell, wherein said test cell is not the microorgaism from which the antisense nucleic acid was obtained, wherein said antisense nucleic acid is selected from the group consisting of a nucleic acid having at least 70% nucleotide sequence identity as determined using BLASTN version 2.0 with the default parameters to a nucleotide sequence selected from the group consisting of SEQ ID NOs. 8-3795, a nucleic acid comprising a nucleotide sequence which hybridizes to a nucleic acid selected from the group consisting of SEQ ID NOs.: 8-3795 under stringent conditions, and a nucleic acid comprising a nucleotide sequence which hybridizes to a nucleic acid selected from the group consisting of SEQ ID NOs.: 8-3795 under moderate conditions;
(b) identifying an inhibitory nucleic acid sequence which inhibits the activity of said homolog in said test cell;
(c) contacting said test cell with a sublethal level of said inhibitory nucleic acid, thus sensitizing said cell;
(d) contacting the sensitized cell of step (c) with a compound; and
(e) determining the degree to which said compound inhibits proliferation of said sensitized cell relative to a cell which does not express said inhibitory nucleic acid.

37. A method of identifying a compound having the ability to inhibit proliferation comprising:
(a) sensitizing a test cell by contacting said test cell with a sublethal level of an antisense nucleic acid, wherein said antisense nucleic acid is selected from the group consisting of a nucleic acid having at least 70% nucleotide sequence identity as determined using BLASTN version 2.0 with the default parameters to a nucleotide sequence selected from the group consisting of SEQ ID NOs. 8-3795 or a portion thereof which inhibits the proliferation of the cell from which said nucleic acid was obtained, a nucleic acid comprising a nucleotide sequence which hybridizes to a nucleic acid selected from the group consisting of SEQ ID NOs.: 8-3795 under stringent conditions, and a nucleic acid comprising a nucleotide sequence which hybridizes to a nucleic acid selected from the group consisting of SEQ ID NOs.: 8-3795 under moderate conditionst;
(b) contacting the sensitized test cell of step (a) with a compound; and
(c) determining the degree to which said compound inhibits proliferation of said sensitized test cell relative to a cell which does not contain said antisense nucleic acid.

38. A method for identifying a compound having activity against a biological pathway required for proliferation comprising:
(a) sensitizing a cell by providing a sublethal level of an antisense nucleic acid complementary to a nucleic acid encoding a gene product required for proliferation, wherein said gene product is selected from the group consisting of a gene product having at least 70% nucleotide sequence identity as determined using BLASTN version 2.0 with the default parameters to a gene product whose expression is inhibited by an antisense nucleic acid comprising a nucleotide sequence selected from the group consisting of SEQ ID NOs.: 8-3795, a gene product encoded by a nucleic acid having at least 70% nucleotide sequence identity as determined using BLASTN version 2.0 with the default parameters to a nucleic acid encoding a gene product whose expression is inhibited by an antisense nucleic acid comprising a nucleotide sequence selected from the group consisting of SEQ ID NOs:8-3795, a gene product having at least 25% amino acid identity as determined using FASTA version 3.0t78 with the default parameters to a gene product whose expression is inhibited by an antisense nucleic acid comprising a nucleotide sequence selected from the group consisting of SEQ ID NOs.: 8-3795, a gene product encoded by a nucleic acid comprising a nucleotide sequence which hybridizes to a nucleic acid selected from the group consisting of SEQ ID NOs.: 8-3795 under stringent conditions, a gene product encoded by a nucleic acid comprising a nucleotide sequence which hybridizes to a nucleic acid selected from the group consisting of SEQ ID NOs.: 8-3795 under moderate conditions, and a gene product whose activity may be complemented by the gene product whose activity is inhibited by a nucleic acid selected from the group consisting of SEQ ID NOs: 8-3795;
(b) contacting the sensitized cell with a compound; and
(c) determining the extent to which said compound inhibits the growth of said sensitized cell relative to a cell which does not contain said antisense nucleic acid.

39. A method for identifying a compound having the ability to inhibit cellular proliferation comprising:
(a) contacting a cell with an agent which reduces the activity or level of a gene product required for proliferation of said cell, wherein said gene product is selected from the group consisting of a gene product having at least 70% nucleotide sequence identity as determined using BLASTN version 2.0 with the default parameters to a gene product whose expression is inhibited by an antisense nucleic acid comprising a nucleotide sequence selected from the group consisting of SEQ ID NOs.: 8-3795, a gene product encoded by a nucleic acid having at least 70% nucleotide sequence identity as determined using BLASTN version 2.0 with the default parameters to a nucleic acid encoding a gene product whose expression is inhibited by an antisense nucleic acid comprising a nucleotide sequence selected from the group consisting of SEQ ID NOs:8-3795, a gene product having at least 25% amino acid identity as determined using FASTA version 3.0t78 with the default parameters to a gene product whose expression is inhibited by an antisense nucleic acid comprising a nucleotide sequence selected from the group consisting of SEQ ID NOs.: 8-3795, a gene product encoded by a nucleic acid comprising a nucleotide sequence which hybridizes to a nucleic acid selected from the group consisting of SEQ ID NOs.: 8-3795 under stringent conditions, a gene product encoded by a nucleic acid comprising a nucleotide sequence which hybridizes to a nucleic acid selected from the group consisting of SEQ ID NOs.: 8-3795 under moderate conditions, and a gene product whose activity may be complemented by the gene product whose activity is inhibited by a nucleic acid selected from the group consisting of SEQ ID NOs: 8-3795;
(b) contacting said cell with a compound; and
(c) determining the degree to which said compound reduces proliferation of said contacted cell relative to a cell which was not contacted with said agent.

40. A method for identifying the biological pathway in which a proliferation-required gene product or a gene encoding a proliferation-required gene product lies comprising:
(a) providing a sublethal level of an antisense nucleic acid which inhibits the activity or reduces the level of said gene encoding a proliferation-required gene product or said said proliferation-required gene product in a test cell, wherein said proliferation-required gene product is selected from the group consisting of a gene product having at least 70% nucleotide sequence identity as determined using BLASTN version 2.0 with the default parameters to a gene product whose expression is inhibited by an antisense nucleic acid comprising a nucleotide sequence selected from the group consisting of SEQ ID NOs.: 8-3795, a gene product encoded by a nucleic acid having at least 70% nucleotide sequence identity as determined using BLASTN version 2.0 with the default parameters to a nucleic acid encoding a gene product whose expression is inhibited by an antisense nucleic acid comprising a nucleotide sequence selected from the group consisting of SEQ ID NOs:8-3795, a gene product having at least 25% amino acid identity as determined using FASTA version 3.0t78 with the default parameters to a gene product whose expression is inhibited by an antisense nucleic acid comprising a nucleotide sequence selected from the group consisting of SEQ ID NOs.: 8-3795, a gene product encoded by a nucleic acid comprising a nucleotide sequence which hybridizes to a nucleic acid selected from the group consisting of SEQ ID NOs.: 8-3795 under stringent conditions, a gene product encoded by a nucleic acid comprising a nucleotide sequence which hybridizes to a nucleic acid selected from the group consisting of SEQ ID NOs.: 8-3795 under moderate conditions, and a gene product whose activity may be complemented by the gene product whose activity is inhibited by a nucleic acid selected from the group consisting of SEQ ID NOs: 8-3795;
(b) contacting said test cell with a compound known to inhibit growth or proliferation of a cell, wherein the biological pathway on which said compound acts is known; and
(c) determining the degree to which said compound inhibits proliferation of said test cell relative to a cell which does not contain said antisense nucleic acid.

41. A method for determining the biological pathway on which a test compound acts comprising:
(a) providing a sublethal level of an antisense nucleic acid complementary to a proliferation-required nucleic acid in a cell, thereby producing a sensitized cell, wherein said antisense nucleic acid is selected from the group consisting of a nucleic acid having at least 70% nucleotide sequence identity as determined using BLASTN version 2.0 with the default parameters to a nucleotide sequence selected from the group consisting of SEQ ID NOs:8-3795 or a proliferation-inhibiting portion thereof,a nucleic acid comprising a nucleotide sequence which hybridizes to a nucleic acid selected from the group consisting of SEQ ID NOs.: 8-3795 under stringent conditions, and a nucleic acid comprising a nucleotide sequence which hybridizes to a nucleic acid selected from the group consisting of SEQ ID NOs.: 8-3795 under moderate conditions and wherein the biological pathway in which said proliferation-required nucleic acid or a protein encoded by said proliferation-required polypeptide lies is known,
(b) contacting said cell with said test compound; and
(c) determining the degree to which said compound inhibits proliferation of said sensitized cell relative to a cell which does not contain said antisense nucleic acid.

42. A compound which inhibits proliferation by interacting with a gene encoding a gene product required for proliferation or with a gene product required for proliferation, wherein said gene product is selected from the group consisting of a gene product having at least 70% nucleotide sequence identity as determined using BLASTN version 2.0 with the default parameters to a gene product whose expression is inhibited by an anti sense nucleic acid comprising a nucleotide sequence selected from the group consisting of SEQ ID NOs.: 8-3795, a gene product encoded by a nucleic acid having at least 70% nucleotide sequence identity as determined using BLASTN version 2.0 with the default parameters to a nucleic acid encoding a gene product whose expression is inhibited by an antisense nucleic acid comprising a nucleotide sequence selected from the group consisting of SEQ ID NOs:8-3795, a gene product having at least 25% amino acid identity as determined using FASTA version 3.0t78 with the default parameters to a gene product whose expression is inhibited by an antisense nucleic acid comprising a nucleotide sequence selected from the group consisting of SEQ ID NOs.: 8-3795, a gene product encoded by a nucleic acid comprising a nucleotide sequence which hybridizes to a nucleic acid selected from the group consisting of SEQ ID NOs.: 8-3795 under stringent conditions, a gene product encoded by a nucleic acid comprising a nucleotide sequence which hybridizes to a nucleic acid selected from the group consisting of SEQ ID NOs.: 8-3795 under moderate conditions, and a gene product whose activity may be complemented by the gene product whose activity is inhibited by a nucleic acid selected from the group consisting of SEQ ID NOs: 8-3795.

43. A method for manufacturing an antibiotic comprising the steps of:
screening one or more candidate compounds to identify a compound that reduces the activity or level of a gene product required for proliferation wherein said gene product is selected from the group consisting of a gene product having at least 70% nucleotide sequence identity as determined using BLASTN version 2.0 with the default parameters to a gene product whose expression is inhibited by an antisense nucleic acid comprising a nucleotide sequence selected from the group consisting of SEQ ID NOs.: 8-3795, a gene product encoded by a nucleic acid having at least 70% nucleotide sequence identity as determined using BLASTN version 2.0 with the default parameters to a nucleic acid encoding a gene product whose expression is inhibited by an antisense nucleic acid comprising a nucleotide sequence selected from the group consisting of SEQ ID NOs:8-3795, a gene product having at least 25% amino acid identity as determined using FASTA version 3.0t78 with the default parameters to a gene product whose expression is inhibited by an antisense nucleic acid comprising a nucleotide sequence selected from the group consisting of SEQ ID NOs.: 8-3795, a gene product encoded by a nucleic acid comprising a nucleotide sequence which hybridizes to a nucleic acid selected from the group consisting of SEQ ID NOs.: 8-3795 under stringent conditions, a gene product encoded by a nucleic acid comprising a nucleotide sequence which hybridizes to a nucleic acid selected from the group consisting of SEQ ID NOs.: 8-3795 under moderate conditions, and a gene product whose activity may be complemented by the gene product whose activity is inhibited by a nucleic acid selected from the group consisting of SEQ ID NOs: 8-3795; and
manufacturing the compound so identified.

44. A method for inhibiting proliferation of a cell in a subject comprising administering an effective amount of a compound that reduces the activity or level of a gene product required for proliferation of said cell, wherein said gene product is selected from the group consisting of a gene product having at least 70% nucleotide sequence identity as determined using BLASTN version 2.0 with the default parameters to a gene product whose expression is inhibited by an antisense nucleic acid comprising a nucleotide sequence selected from the group consisting of SEQ ID NOs.: 8-3795, a gene product encoded by a nucleic acid having at least 70% nucleotide sequence identity as determined using BLASTN version 2.0 with the default parameters to a nucleic acid encoding a gene product whose expression is inhibited by an antisense nucleic acid comprising a nucleotide sequence selected from the group consisting of SEQ ID NOs:8-3795, a gene product having at least 25% amino acid identity as determined using FASTA version 3.0t78 with the default parameters to a gene product whose expression is inhibited by an antisense nucleic acid comprising a nucleotide sequence selected from the group consisting of SEQ ID NOs.: 8-3795, a gene product encoded by a nucleic acid comprising a nucleotide sequence which hybridizes to a nucleic acid selected from the group consisting of SEQ ID NOs.: 8-3795 under stringent conditions, a gene product encoded by a nucleic acid comprising a nucleotide sequence which hybridizes to a nucleic acid selected from the group consisting of SEQ ID NOs.: 8-3795 under moderate conditions, and a gene product whose activity may be complemented by the gene product whose activity is inhibited by a nucleic acid selected from the group consisting of SEQ ID NOs: 8-3795.

The application's sequence listing, which the Patent Office published only in electronic form, follows.

SEQUENCE LISTING (14110 sequences)

SEQ ID NO: 1 - DNA, 23 bp, Artificial Sequence
  DNA primer
cagcagtctgagttataaaatag

SEQ ID NO: 2 - DNA, 18 bp, Artificial Sequence
  DNA primer
tgttttatcagaccgctt

SEQ ID NO: 3 - DNA, 29 bp, Artificial Sequence
  DNA primer
ttctgttttatcagaccgcttctgcgttc

SEQ ID NO: 4 - DNA, 18 bp, Artificial Sequence
  DNA primer
acaatttcacacagcctc

SEQ ID NO: 5 - DNA, 26 bp, Artificial Sequence
  DNA primer
gtcggcgatataggcgccagcaaccg

SEQ ID NO: 6 - DNA, 24 bp, Artificial Sequence
  DNA primer
ataatcgagcatgagtatcatacg

SEQ ID NO: 7 - DNA, 20 bp, Artificial Sequence
  DNA primer
atgcgtccggcgtagaggat

SEQ ID NO: 8 - DNA, 245 bp, Enterococcus faecalis
ctgataatggacgagtttccatgatttttacgatgtctccaactttcgctgtgttgttttcatcatgcgctttatattttttagaatatttcatacgtttgccatagatagggtggtttttctttgtttcaacgacaactgtgattgttttatccattttgtctgataccacacgaccttggtaaactttacgttgatttctttcttcagtcatacgcgtttggcctccttccactattagttag

SEQ ID NO: 9 - DNA, 268 bp, Enterococcus faecalis
ctcttcttgcaataacttgttaaccacacctgggtttgcttgtccacgagttgctttcataatttgtccaacaaggaaaccaactgcacggtcttttccgtttttaaagtcatcaattgattgttggttgttgtctaaaacttcgttaatcattggtaataattgcgctggatcagataactgaacaaggccttttgcttcgacaacttctttagcgtctccaccgttttcaattaactctttgaacactttcttcgcaattttcgag

SEQ ID NO: 10 - DNA, 245 bp, Enterococcus faecalis; identical to SEQ ID NO: 8

SEQ ID NO: 11 - DNA, 532 bp, Enterococcus faecalis
ctgtagtgttaccaataccataaatgtaagtaagagaaactactacacgtttgtcacgagggatgtctactcctgcaatacgagccattattcgttacacctcctaattatccttgacgttgtttatgttttggatttgctgggcaaataaccataacacgtcctttacggcgaattactttacaatgttcacacattggttttactgatggtcttactttcatgataatacctcctgtggttttacggagtacaattatttaaagcgataagtaatacggccacgcgttaaatcatacggtgataattcaactgttactttgtcaccaggtaagatacggatgtagtgcatacggattttacctgaaacagtagcaagaacttggtgtccattttctagttcgactttaaacattgcattcggcaaagtttcgacgactgtaccttcgacttcaatcatatcttcttttgccacgcacagtacctccttgtacttgtttcgcgttttcacacgataaacggcggaactcca

SEQ ID NO: 12 - DNA, 236 bp, Enterococcus faecalis
ctgtgtgaattgaaatgttaacacggtttgcagcgcgttcgatttcaattgtagatacagcagcatcagcaagttttgttgcgataaatttacggattcttaaatcttcgtgtaagaattcagcatactctttttcagcataccatttcgcatcccagtcgcggatgatgcctacacgcattccaattggatgtactttttgacccactgattgtccctcctcttaaatgtttaag

SEQ ID NO: 13 - DNA, 270 bp, Enterococcus faecalis
ctgaaccttttgcacgaggacggaaacgtttcattgttggtccttcgttaacaaatgcttcagatacgactaagctttcaacgtctaagtcaaagttgttttctgcgttagcaactgctgacattaaaactttttcaatgattccagcagacttgttcggtgtgaatttcaagattgaaattgcatccgcaacgcttttccctctgataagatcgattactaaacgtgctttacgaggtgaagtgcgaactgtttttgcagttgctttag

SEQ ID NO: 14 - DNA, 269 bp, Enterococcus faecalis
ctcttcttgcaataacttgttaaccacacctgggtttgcttgtccacgagttgctttcataatttgtccaacaaggaaaccaactgcacaggtcttttccgtttttaaagtcatcaattgattgttggttgttgtctaaaacttcgttaatcattggtaataattgcgctggatcagataactgaacaaggccttttgcttcgacaacttctttagcgtctccaccgttttcaattaactctttgaacactttcttcgcaattttcgag

SEQ ID NO: 15 - DNA, 245 bp, Enterococcus faecalis; identical to SEQ ID NO: 8

SEQ ID NO: 16 - DNA, 372 bp, Enterococcus faecalis
cttttgtaacgtccattgttacagtaccagttttagggtttggcattaaaccttttggtcctaagacacggcctaatttaccaactgtagccatcatgtcaggagtcgcaacaactacgtcaaagtcgaaccatccaccttggatttttgcaaccatgtcgtcgtcgcctacgaaatctgcaccagcagcttcagcttctttagctttttcgcctttagcgaatactaaaacagtttgtgttttaccagttccgtttggaagcacaactgctccacggatttgttggtctgcttttttagggtcaacgttcaatttgtaagcaacttcaactgttgcgtcaaatttcgcgatgtttgtatcttttgctaaag

SEQ ID NO: 17 - DNA, 314 bp, Enterococcus faecalis
ctacttctttgagtaagtgtggaataaaaattattctacgatgatacccatgcttcgtgcagttcctgcaaccatgcgcattgctgcttcaacgtcagcggcgtttaggtctgccattttaagttcagcgatttctttcacttgatcgcttgaaactgttgcaactttagttttgtttggttcacctgaacctttttcgatttttgcagcttttttcaataatactgcagcaggtggtgttttagtaatgaatgtaaatgaacgatcttcatatacagagattactactggaataatcaagcctgcttggtcag

SEQ ID NO: 18 - DNA, 351 bp, Enterococcus faecalis
tgatttgattgtgattaaagattttttcgctccaggaatgtttcctttgattaagataacatttctttctacgtccactttaacaacttcaaggttttgaattgttacgcggtcgccacccatacggccggctagtcgtttatttttaaatacacggttaggcgctactggacccattgacccaggacgacggtgataacgagaaccatgagacataggtccgcggctttggccgtgacgtttgattgccccttggaatcctttacctttcgtagtacctgtaacatcaacaacgtctcctgcttggaaaacatctactttgatttctttacctacttcatattctcctag

SEQ ID NO: 19 - DNA, 481 bp, Enterococcus faecalis
ctgttttaccattaccagatgaagtaccacgtccaacacggttacgtacttggcgtgagccctcagcaggttttaattcatgaagtttcataggtttggcacctccttaagcaatcttctattacaaatctataaatcttaaacttcttctacgtccactaaatgtgaaatagtgttaaccatacctttgattgcttcattggcaggttttgtaacagtactattcactttacctaaacctaacgctttaactgtagcacgttggttttgaggacgtccgataacactgcgttttaaagtaatttttaattcagccattatttttgtcctccttaaccgataatttcttctacagatttaccgcgaagtgctgccacttcttcggcacgttttaattgttttagaccttcaacagttgcgcgaacaacgttaataggtgtgtttgaacctagtgatttagatgtaatatctgctacaccag

SEQ ID NO: 20 - DNA, 544 bp, Enterococcus faecalis
tttacgttggcttgatgtgcgtcctaatttacggtaactcacgttgggttccctccttcgtttctgttctcacgagccactgctgttaagcaggactggaaacttcgtaaaagtcttaatcgtccttacgtaatcctaatcctagatcatgcaatttaagttttacttcttcaagagatttacgacctaaattacgtactttgatcatttctggttcagatttgtttgtaagttcttgtacagtattaatgcctgcacgttttaaacagttatatgaacgaactgataaatcaagttcttcaatcgtcatttctagcattttctctttttgagtttcttctttttccaccatgatttcagcgtttttcgcttcgtcagtaaggtttacaaagatatctaaatgctcagtcatgattttcgcagctaaacttagtgcttcttgaggaatgattgaaccatctgtccatatttccattgttaatttgtcgaaatcatcacgacgaccaacacgtgtattttctacttggtagttaacacgacgaac

SEQ ID NO: 21 - DNA, 265 bp, Enterococcus faecalis
cttgttcacgcaatactgttttgatgcgtgcaatcgattgacgtacttctttaatacgtgcagtgttttctaattgacctgttgctaattggaatcttaagttgaacaattcttcttttaattgtttttctttatctagcatttcggcagtggttaattctctgatttctttaaccttcattcgattcaccacccatttcctcacgttttacgatcttagtttttaccggcaatttgtgagatgcaagacgaagagcttcacgag

SEQ ID NO: 22 - DNA, 407 bp, Enterococcus faecalis
ctgatgtaatttgttctgacatttgcatatcctcccctcaaaattagcagtttagtttttttatcgtcagcaacagtggccacgataagttctagttggtgcaaattcacctaatttatgtcctaccatgtcttcttgaatgtaaacagggacatgtttccgtccatcatatacagcgattgtgaaacctacgaatgatggaaaaattgtagagcggcgagaccaagttttaattacttttttcttttcggcaccttgttgtgcttcgacctttttcatcaaatgatcatcgacgaaaggtcctttttttaaactacgacccatggtgaacctcctctcaaaatgtacgacacatggtcaaaaaaattatttagtacgacgacgaacgataagtttgtctgatttag

SEQ ID NO: 23 - DNA, 372 bp, Enterococcus faecalis; identical to SEQ ID NO: 16

SEQ ID NO: 24 - DNA, 256 bp, Enterococcus faecalis
cttgttcacgcaatactgttttgatgcgtgcaatcgattgacgtacttctttaatacgtgcagtgttttctaattgacctgttgctaattggaatcttaagttgaacaattcttcttttaattgtttttctttatctagcatttcggcagtggttaattctctgatttctttaaccttcattcgattcaccacccatttcctcacgttttacgatcttagtttttaccggcaatttgtgagatgcaagacgaagag

SEQ ID NO: 25 - DNA, 268 bp, Enterococcus faecalis; identical to SEQ ID NO: 9

SEQ ID NO: 26 - DNA, 228 bp, Enterococcus faecalis
cttctacgaagtatttatctggtgtttgaacagttaagttatagtctgttggttcgttcaagtaagggaactcaacaggcatgatttcgttaaagatgatcttaccaactgtggtgattaagattcgttctttttgccaatcagtaaatggtttgtcacctaaaagtgttgtttgaaccccaatccgtgagtgtaaatgcacgtagccattttgccatgctaaaacag

SEQ ID NO: 27 - DNA, 256 bp, Enterococcus faecalis; identical to SEQ ID NO: 24

SEQ ID NO: 28 - DNA, 600 bp, Enterococcus faecalis
cttccatactttcgatcagtttttgttggatttcgtctttggcaccgttccaaacgccgattacacgttcataacgttcgtcatcagtaattaaaccacgacggaattgtttagtaattgtttcaacttgtttgtgggcagcatcaatgattgcttgtttttcatgaagaaccatgatatcggcaatccctaccgtcatcccagcatacgttgagtgtttgtaacctaagtctttcatgcggtcaagcattttagaggtttccgtaatgtggaatctcttgaagacttcagcaatgatatttccaagatttttcttcttgaatggtaaaactaattcttgctctttaatgtgtgcaggaatgtctgtaccagcttctacgaagtatttatctggtgtttgaacagttaagttatagtctgttggttcgttcaagtaagggaactcaacaggcatgatttcgttaaagatgatcttaccaactgtggtgattaagattcgttctttttgccaatcagtaaatggtttgtcacctaaaagtgttgtttgaaccccaatccgtgagtgtaaatgcacgtagccattttgccatgctaaaacag

SEQ ID NO: 29 - DNA, 183 bp, Enterococcus faecalis
cttttttacctgttaattttactttatcagcgttaattacgattacgaaatctccagtatccacatgtggtgtgaatgttggtttatttttaccacgtagtacagaagcaacaactgctgatagacgtcctaaaggaacatctgttgcatctactacgtaccatttacgttctacttcgccag

SEQ ID NO: 30 - DNA, 268 bp, Enterococcus faecalis; identical to SEQ ID NO: 9

SEQ ID NO: 31 - DNA, 270 bp, Enterococcus faecalis; identical to SEQ ID NO: 13

SEQ ID NO: 32 - DNA, 244 bp, Enterococcus faecalis
tgataatggacgagtttccatgatttttacgatgtctccaactttcgctgtgttgttttcatcatgcgctttatattttttagaatatttcatacgtttgccatagatagggtggtttttctttgtttcaacgacaactgtgattgttttatccattttgtctgataccacacgaccttggtaaactttacgttgatttctttcttcagtcatacgcgtttggcctccttccactattagttag

SEQ ID NO: 33 - DNA, 256 bp, Enterococcus faecalis; identical to SEQ ID NO: 24

SEQ ID NO: 34 - DNA, 235 bp, Enterococcus faecalis
tgtgtgaattgaaatgttaacacggtttgcagcgcgttcgatttcaattgtagatacagcagcatcagcaagttttgttgcgataaatttacggattcttaaatcttcgtgtaagaattcagcatactctttttcagcataccatttcgcatcccagtcgcggatgatgcctacacgcattccaattggatgtactttttgacccactgattgtccctcctcttaaatgtttaag

SEQ ID NO: 35 - DNA, 326 bp, Enterococcus faecalis
ctgtatgaacgcggtgttggtccaaagactacgccacctccacgccattgtggtgaacggattgaaccttgacgagcacgaccagttcctttttgacgccatggtttgcggccaccgccacgaacagcgctacggtttttaactgcgtgtgttccttgtcttaatgaagcacgttgcatgatgattgcatcatagacaacactttcattaggttcgattccgaagatttcttcatttaaagtgatttcaccgttttgagttccatcttgtttgaataatgctacattcggcattccttagttcctcctttccctacacttatttag

SEQ ID NO: 36 - DNA, 243 bp, Enterococcus faecalis
ctgtcactgattttaatcctccaggatacattgagtgacggtagtaaattttgtctgtagcttttttacctgttaattttactttatcagcgttaattacgattacgaaatctccagtatccacatgtggtgtgaatgttggtttatttttaccacgtagtacagaagcaacaactgctgatagacgtcctaaaggaacatctgttgcatctactacgtaccatttacgttctacttcgccag

SEQ ID NO: 37 - DNA, 256 bp, Enterococcus faecalis; identical to SEQ ID NO: 24

SEQ ID NO: 38 - DNA, 481 bp, Enterococcus faecalis; identical to SEQ ID NO: 19

SEQ ID NO: 39 - DNA, 447 bp, Enterococcus faecalis
actattcactttacctaaacctaacgctttaactgtagcacgttggttttgaggacgtccgataacactgcgttttaaagtaatttttaattcagccattatttttgtcctccttaaccgataatttcttctacagatttaccgcgaagtgctgccacttcttcggcacgttttaattgttttagaccttcaacagttgcgcgaacaacgttaataggtgtgtttgaacctagtgatttagatgtaatatctgctacaccagctaattccaatacggcacgaactggtccaccagcagctaccccagaaccttctactgcaggtttcataaggatacggccgccaccgaatacgccaattacttcgtgcgggatagtagaaccaaccataggcacttcaactaagtttttcttcgcgtcttcgattgctttacggatagcttcaggt

SEQ ID NO: 40 - DNA, 311 bp, Enterococcus faecalis
accaacattaccagggtcttggatattatctaaaagtaaccaaccacctttaaaagaaagcgactgctcttgttgcgtttccaaggtgacaattgccaaaattccttgtgaagttggcagctccgacaaactatttaaaacctcatcacttacaaaaattaatttttctgtttcttgttcagctaaccaagttccccattcttgttgacctctttggttaaacaaaatccactggacatcggcattggccttcacagcttcttcaactaaatgaaatccttctattatatattggttcagttcttctcggt

SEQ ID NO: 41 - DNA, 413 bp, Enterococcus faecalis
acttctaaagtttcatgtttaaccatgttcgcattacgaatgcgagttagaaaatctgcaattggatctgtcatgaccattgaactatttacctcctttatgcgagtttacttgtttaccagctagctttcttcacgccgggaatttgacctttataggcaagttcgcggaagcaaatacggcaaagatgaaatttacgataaactgaatgtggacgtccacaacgttcacaacgagtataagcttgtgttgaatgtttagcaggacgtttgtttttagcaatcattgattttttagccacgtagttcgcctccttatattatttttggaatggcatacctaattgtgccaacaattcgcgagactcttcgtcagtgttcgctgttgtaacaattacgatgtccataccgcgt

SEQ ID NO: 42 - DNA, 422 bp, Enterococcus faecalis
actaagacagctccattggcttgtttggctaattggccgatttctacttctagtgggcggccgccccaagttgttttaaagacttgtttttctgtcatgattcttctcctttactcttgctctttggaaaagtcagacggctactaaacaaatgaaaaagtaacaagtcgttgctgctctttcatttggttagtagttcctaaaaactttccaaagaggaccttcaatagtgacaataagataaaaagcgagattctgattgaacctcgctttatacgtaatgattaacgacgtaatcctaaacgttggatcaattcgcggtaacgttggatgtcagttttacgtaagtaagctaacaagttacgacggtgaccgatttttttcattaaaccacggtaagaatggtgatcttttttgtgtgt

SEQ ID NO: 43 - DNA, 493 bp, Enterococcus faecalis
ccacgataagttctagttggtgcaaattcacctaatttatgtcctaccatgtcttcttgaatgtaaacagggacatgtttccgtccatcatatacagcgattgtgaaacctacgaatgatggaaaaattgtagagcggcgagaccaagttttaattacttttttcttttcggcaccttgttgtgcttcgacctttttcatcaaatgatcatcgacgaaaggtcctttttttaaactacgacccatggtgaacctcctctcaaaatgtacgacacatggtcaaaaaaattatttagtacgacgacgaacgataagtttgtctgatttagcttttttattacgtgttttgtatccaattgctggttgaccccatggagatactggcgctttacgtccaattggtgttttaccttcaccaccaccgtgtgggtgatcgttagggttcattacgctaccacgaacagttgggcgtttacgcatccaacgagagcggg

SEQ ID NO: 44 - DNA, 234 bp, Enterococcus faecalis
cccgttaatttagcagctaagcgcgcattttgaccacgtttaccaattgctaatgacaattgataatcaggtacaacgactgtacatgctttgctattttctggatcaaaaataacatctaatacttgagctggattcaaggcattactaatataaatagctggatcttcgttccattccacaatatccatattttcgccttttaattcattcacaatcgcttggacacgttgg

SEQ ID NO: 45 - DNA, 298 bp, Enterococcus faecalis
acacgaacatcttcagatacgccaacgtttgctaaaacttttttagctgtagtgttaccaataccataaatgtaagtaagagaaactactacacgtttgtcacgagggatgtctactcctgcaatacgagccattattcgttacacctcctaattatccttgacgttgtttatgttttggatttgctgggcaaataaccataacacgtcctttacggcgaattactttacaatgttcacacattggttttactgatggtcttactttcatgataatacctcctgtggttttacggagt

SEQ ID NO: 46 - DNA, 234 bp, Enterococcus faecalis; identical to SEQ ID NO: 44

SEQ ID NO: 47 - DNA, 364 bp, Enterococcus faecalis
acctcccacgtctttcatatctttaaatatgaaacgaactgagaagctacttctttgagtaagtgtggaataaaaattattctacgatgatacccatgcttcgtgcagttcctgcaaccatgcgcattgctgcttcaacgtcagcggcgtttaggtctgccattttaagttcagcgatttctttcacttgatcgcttgaaactgttgcaactttagttttgtttggttcacctgaacctttttcgatttttgcagcttttttcaataatactgcagcaggtggtgttttagtaatgaatgtaaatgaacgatcttcatatacagagattactactggaataatcaagcctgcttggtcagctgt

SEQ ID NO: 48 - DNA, 525 bp, Enterococcus faecalis
cctttacgagtacgtgcattatttttcgtgttttgtccacgagttggtaatccacgacggtgacggattccacggtatgaaccgatttccatcaagcgtttgatgtttaagttcacttcacgacgaagatccccttcaacttttaacttatcaatttccgcacgaatcgcatctgtttgttcgtttgttaaatcacgtacacgaacatcttcagatacgccaacgtttgctaaaacttttttagctgtagtgttaccaataccataaatgtaagtaagagaaactactacacgtttgtcacgagggatgtctactcctgcaatacgagccattattcgttacacctcctaattatccttgacgttgtttatgttttggatttgctgggcaaataaccataacacgtcctttacggcgaattactttacaatgttcacacattggttttactgatggtcttactttcatgataatacctcctgtggttttacggagtacaattatttaaagcgataagtaatacgg

SEQ ID NO: 49 - DNA, 361 bp, Enterococcus faecalis
acttgtgccaatgaatttccctccttaaattaagttcgtgatatctaatacttctggttgttgtgcagcatgtggatgctcagctccaccgtatacgttcaatttagtaaattgtttacgtcctaaagtgtttttaggtagcataccttttacagaagtttcgataagacggcgagagtttttgtcgcgtaattcaccagctgtcactgattttaatcctccaggatacattgagtgacggtagtaaattttgtctgtagcttttttacctgttaattttactttatcagcgttaattacgattacgaaatctccagtatccacatgtggtgtgaatgttggtttatttttaccacgtagt

SEQ ID NO: 50 - DNA, 442 bp, Enterococcus faecalis
acttgggcacggtatccgaccccgataagttcaagtgctttttggaaaccttcagaaacaccaacaaccatgttgttgaagtttgcacgagttgttccgtggattgttttcatttcttttgaatcgtttggacgagtgaatgtcacttcgtttccttcgatgttcattttgatatcagaagaaaattcgcgtgttaattcacctttaggtcctttaactgtaatgttgtttccgtcttgcttgatttcaacaccagcaggaagaacaacaactttattaccaatacggctcacttagagacacctccttgtgtattttttagaattaccatacgtaggcgattacttcgccgccgatatttttcgctctagcttctttgtcagtaattacaccctctgatgtagagatgattgcaattcctagaccgtttaatacttttggt

SEQ ID NO: 51 - DNA, 298 bp, Enterococcus faecalis; identical to SEQ ID NO: 45

SEQ ID NO: 52 - DNA, 364 bp, Enterococcus faecalis; identical to SEQ ID NO: 47

SEQ ID NO: 53 - DNA, 361 bp, Enterococcus faecalis; identical to SEQ ID NO: 49

SEQ ID NO: 54 - DNA, 538 bp, Enterococcus faecalis
acctgtaacacgacgtggtaaaattttgccacgttctgaaatgaatcgttttaacaattcagtatctttatagtcgatgtattcgatgtggtttgctgcgatatagtcgactttccgacgtttacgtccgcctcttctttgttgtgccattcttgttccctcctatcaaattcgtttagaatggtaaatcatcatctgaaatgtcgatagatgaacctgagccaccaaatggatcagaatctttatcgaaatcaggcataccgttattgttttgcgactgagaagatgatggattgaaactattgttgttgttattaaatccagaaccggcattgttattaccaaagctacgattttgtgattgataaccattttcgttgttattaaagctaccgccgccagttcctctttgttctgaagcagaacgagattctaacaattggaagttttcacaaaccacttcagttacgtagacacgttgaccttgttggttctcgtagttacgagtttgaattcttccgacaacacctaataatgt

SEQ ID NO: 55 - DNA, 361 bp, Enterococcus faecalis; identical to SEQ ID NO: 49

SEQ ID NO: 56 - DNA, 364 bp, Enterococcus faecalis; identical to SEQ ID NO: 47

SEQ ID NO: 57 - DNA, 298 bp, Enterococcus faecalis; identical to SEQ ID NO: 45

SEQ ID NO: 58 - DNA, 298 bp, Enterococcus faecalis; identical to SEQ ID NO: 45

SEQ ID NO: 59 - DNA, 298 bp, Enterococcus faecalis; identical to SEQ ID NO: 45

SEQ ID NO: 60 - DNA, 361 bp, Enterococcus faecalis; identical to SEQ ID NO: 49

SEQ ID NO: 61 - DNA, 502 bp, Enterococcus faecalis
acatcatcgcaatcgtcactgttaataaggttaaaatagcaccaactgaaatgattgtcgcgattgcgccatgattaatgaagcgcatcgcaaaagccaccggatccttgacccctaaatccgtaaatggaacaatcccagttaaaactaacgtaacaacaatatataacaatgttgaaataataatggaaccaataatcccttttggaatatcttttttcggattcttcacttcctccgcggccatgctaaccgcatcaaaccctagaaaggcaaagaaaactaaagcagcaccactgaaaacgcctgaaaaaccataaggaataaatggttgccagttcgttggtttcacataaaagattcccacgagaacaaataataaaataatcccaaacttcacgaaaaccattaagttatttaaacgtaacgctgttttcgcttctaaagatacccaaaaagttacggctacaacgaccaacatggcaatcaaatcaatatatgt

SEQ ID NO: 62 - DNA, 364 bp, Enterococcus faecalis; identical to SEQ ID NO: 47

SEQ ID NO: 63 - DNA, 298 bp, Enterococcus faecalis; identical to SEQ ID NO: 45

SEQ ID NO: 64 - DNA, 298 bp, Enterococcus faecalis; identical to SEQ ID NO: 45

SEQ ID NO: 65 - DNA, 364 bp, Enterococcus faecalis; identical to SEQ ID NO: 47

SEQ ID NO: 66 - DNA, 492 bp, Enterococcus faecalis
ccacgataagttctagttggtgcaaattcacctaatttatgtcctaccatgtcttcttgaatgtaaacagggacatgtttccgtccatcatatacagcgattgtgaaacctacgaatgatggaaaaattgtagagcggcgagaccaagttttaattacttttttcttttcggcaccttgttgtgcttcgacctttttcatcaaatgatcatcgacgaaaggtcctttttttaaactacgacccatggtgaacctcctctcaaaatgtacgacacatggtcaaaaaaattatttagtacgacgacgaacgataagtttgtctgatttagcttttttattacgtgttttgtatccaattgctggttgaccccatggagatactggcgctttacgtccaattggtgttttaccttcaccaccaccgtgtgggtgatcgttagggttcattacgctaccacgaacagttgggcgtttacgcatccaacgagagcgg

SEQ ID NO: 67 - DNA, 346 bp, Enterococcus faecalis
cgccaccgaatacgccaattacttcgtgcgggatagtagaaccaaccataggcacttcaactaagtttttcttcgcgtcttcgattgctttacggatagcttcaggtacttcttgtgctttaccagtaccgaaaccaacgtgtccgtttttgtcaccgacaacaactaaagctgcgaaacgtaaacgacgtccacctttaacaacttttgttacacggttgatcgctacaacgcggtcttctaattccaaatgttttggatcaatataaaccatgaatggtgttcctccttctcctaaaattctagtccattttcacgagcagcttcagctaaagcttgcacgcgg

SEQ ID NO: 68 - DNA, 525 bp, Enterococcus faecalis; identical to SEQ ID NO: 48

SEQ ID NO: 69 - DNA, 347 bp, Enterococcus faecalis
ccgccaccgaatacgccaattacttcgtgcgggatagtagaaccaaccataggcacttcaactaagtttttcttcgcgtcttcgattgctttacggatagcttcaggtacttcttgtgctttaccagtaccgaaaccaacgtgtccgtttttgtcaccgacaacaactaaagctgcgaaacgtaaacgacgtccacctttaacaacttttgttacacggttgatcgctacaacgcggtcttctaattccaaatgttttggatcaatataaaccatgaatggtgttcctccttctcctaaaattctagtccattttcacgagcagcttcagctaaagcttgcacgcgg

SEQ ID NO: 70 - DNA, 467 bp, Enterococcus faecalis
cctgtgccgctatattgtacttgtgccaatgaatttccctccttaaattaagttcgtgatatctaatacttctggttgttgtgcagcatgtggatgctcagctccaccgtatacgttcaatttagtaaattgtttacgtcctaaagtgtttttaggtagcataccttttacagaagtttcgataagacggcgagagtttttgtcgcgtaattcaccagctgtcactgattttaatcctccaggatacattgagtgacggtagtaaattttgtctgtagcttttttacctgttaattttactttatcagcgttaattacgattacgaaatctccagtatccacatgtggtgtgaatgttggtttatttttaccacgtagtacagaagcaacaactgctgatagacgtcctaaaggaacatctgttgcatctactacgtaccatttacgttctacttcgccagctttgg

SEQ ID NO: 71 - DNA, 467 bp, Enterococcus faecalis; identical to SEQ ID NO: 70

SEQ ID NO: 72 - DNA, 492 bp, Enterococcus faecalis; identical to SEQ ID NO: 66

SEQ ID NO: 73 - DNA, 492 bp, Enterococcus faecalis; identical to SEQ ID NO: 66

SEQ ID NO: 74 - DNA, 529 bp, Enterococcus faecalis
ccttttgcttcgacaacttctttagcgtctccaccgttttcaattaactctttgaacactttcttcgcaattttcgagctgattgtgccatcgttaatcaaagtaatcatacccgctagattttctggtgttagtttagtatcggctaattcaactttttcactgtttaagtaagcagaaacttcgcccattaaccagtttgatgcttgtttcgcatctgcaccgtttgctaaggttgcttcaaagaaatctgacatttctttcgttaaagtcaagaccattgcgtcgtattcaggtaaacctaattcactgatataacgggcacgacgtgaggctggcatttctggcaaactagcgcgaactttttcaatccattcatcatcaattgaaaaacgaggaacatctggctctgggaagtaacggtagtcacttgagccttctttaacacgcataagcaacgttgtactagttgcttcatcaaagcggcgtgtttcttgttgaatttcgccaccagataataggactttgg

SEQ ID NO: 75 - DNA, 492 bp, Enterococcus faecalis; identical to SEQ ID NO: 66

SEQ ID NO: 76 - DNA, 492 bp, Enterococcus faecalis; identical to SEQ ID NO: 66

SEQ ID NO: 77 - DNA, 492 bp, Enterococcus faecalis; identical to SEQ ID NO: 66

SEQ ID NO: 78 - DNA, 347 bp, Enterococcus faecalis; identical to SEQ ID NO: 69

SEQ ID NO: 79 - DNA, 529 bp, Enterococcus faecalis; identical to SEQ ID NO: 74

SEQ ID NO: 80 - DNA, 492 bp, Enterococcus faecalis; identical to SEQ ID NO: 66

SEQ ID NO: 81 - DNA, 562 bp, Enterococcus faecalis
ccagctgttttaccattaccagatgaagtaccacgtccaacacggttacgtacttggcgtgagccctcagcaggttttaattcatgaagtttcataggtttggcacctccttaagcaatcttctattacaaatctataaatcttaaacttcttctacgtccactaaatgtgaaatagtgttaaccatacctttgattgcttcattggcaggttttgtaacagtactattcactttacctaaacctaacgctttaactgtagcacgttggttttgaggacgtccgataacactgcgttttaaagtaatttttaattcagccattatttttgtcctccttaaccgataatttcttctacagatttaccgcgaagtgctgccacttcttcggcacgttttaattgttttagaccttcaacagttgcgcgaacaacgttaataggtgtgtttgaacctagtgatttagatgtaatatctgctacaccagctaattccaatacggcacgaactggtccaccagcagctaccccagaaccttctactgcaggtttcataaggatacgg

SEQ ID NO: 82 - DNA, 492 bp, Enterococcus faecalis; identical to SEQ ID NO: 66

SEQ ID NO: 83 - DNA, 492 bp, Enterococcus faecalis; identical to SEQ ID NO: 66

SEQ ID NO: 84 - DNA, 492 bp, Enterococcus faecalis; identical to SEQ ID NO: 66

SEQ ID NO: 85 - DNA, 146 bp, Enterococcus faecalis
tacccacggagagcgtggttgaattaacggcaccgcttgacgctgcatgttggcacccatcaaggcacggttggagtcatcgttttctaagaaaggaatacatgctgttgcgactgcgactacttgttttggtgaaacgtccatgt

SEQ ID NO: 86 - DNA, 103 bp, Enterococcus faecalis
tgaagcattccttctatgtcaatgtcatctacataaatccctgttcctaaggttttctccactgcatcgacccgttggaagtcttcccctaatttaccatttg

SEQ ID NO: 87 - DNA, 199 bp, Enterococcus faecalis
gccttttttaacaaacattactgtttcgcacctcctttaacgtgggcctcgagattataatacttctggtgctagagaaacgatcttcatgaagttgttttcacgtaattcacgtgcaacctggtccgaagatacgtgttccgcgtgggcttttatcgtcacggataattaccgcagcattttcatcaaatttgatgta

SEQ ID NO: 88 - DNA, 321 bp, Enterococcus faecalis
gcccaaacttccatttccccgaaacgttgtccaccgaattgagctttaccacccaacggttgttgcgtaacaagagagtaaggtccgattgaacgagcatgcaatttgtcatcaaccatgtgggctaatttaatcatatacatgacaccaacggaaatacggttatcaaatggttcacctgtacgtccatcgtaaagaactgttttagcatcgctagccataccagcttcacgaacagtttcccaaacgtcttcatcggttgccccatcgaaaacaggtgttgcgacgtgaatacctaattggcgagcagccatacctaag

SEQ ID NO: 89 - DNA, 575 bp, Enterococcus faecalis
actatcgtactacgtctgtcgttgtaattatcttaacacgattactacgataggtaaagtaaaaaaaagcacgtaatgcagaaatcattttaatttctgcactacgtgctgtcttcttttcagtctatagttgaatgttaaatggtatcaccattaaaaatagaattttttacaatcacataatcaactttacgaatcgcttctaaatcacgacctcccgcgtatgaaatggaagattgtaaatcttgttgcatttcgactaaagtatctgccaacttccctttatggcgtaaccagatttttttgccttcaacgtttttcttttcgcctttttggaattcagaggcgctaccaaagtattctttgtaaacaacaccatcttccactttggtttcacctggtgattcttcatgtccagcaaataatgaaccaatcatgaccatagttgccccaaaacgcacagattttgcaatgtctccatgggtccgaattccaccatctgcaataattggtttccgagcagctttggcacaccaacgtaaagccgctaactgccagccacctgtcccaaagcc

SEQ ID NO: 90 - DNA, 342 bp, Enterococcus faecalis
tgtttccgtccatcatatacagcgattgtgaaacctacgaatgatggaaaaattgtagagcggcgagaccaagttttaattacttttttcttttcggcaccttgttgtgcttcgacctttttcatcaaatgatcatcgacgaaaggtcctttttttaaactacgacccatggtgaacctcctctcaaaatgtacgacacatggtcaaaaaaattatttagtacgacgacgaacgataagtttgtctgatttagcttttttattacgtgttttgtatccaattgctggttgaccccatggagatactggcgctttacgtccaattggtgttttaccttcacca

SEQ ID NO: 91 - DNA, 529 bp, Enterococcus faecalis
tacgaaatctgcaccagcagcttcagcttctttagctttttcgcctttagcgaatactaaaacagtttgtgttttaccagttccgtttggaagcacaactgctccacggatttgttggtctgcttttttagggtcaacgttcaatttgtaagcaacttcaactgttgcgtcaaatttcgcgatgtttgtatcttttgctaaagctactgcttcttcaactgagtaagcttttgtagcatcaacttttttcaatgcttcttgcatttttttgctctttttagccattttgtttcctccttgattgtggttataacggttgtacctcccacgtctttcatatctttaaatatgaaacgaactgagaagctacttctttgagtaagtgtggaataaaaattattctacgatgatacccatgcttcgtgcagttcctgcaaccatgcgcattgctgcttcaacgtcagcggcgtttaggtctgccattttaagttcagcgatttctttcacttgatcgcttgaaactgttgca

SEQ ID NO: 92 - DNA, 373 bp, Enterococcus faecalis
aacaaatttatattgtggaattttacgacgttcgccgaataattgttcatcttcacttggtgtattgtaataaaaaccagttgctaattcacgttgtgctactttccataattcatcaatccactcttgttggcagacatagttttcagggtcttccatgtaagaatcgacggcttttttatacacattagcgactgtcgaaacatagtgaatggatttcatgcggccttcaattttaaaactatcgacaccattttcaattaattctggaatatgttcaatcatagacatatctacggcgctcattgaaaactcttcttcaacttccccttcgctggttttgctccgacgttctgtcccaaaaggcatatca

SEQ ID NO: 93 - DNA, 275 bp, Enterococcus faecalis
caatatttttttgttcctgattgacagttgttaacatctcgacataaaggtagccaccttctacatcgtcaacttccacaatcggttcaaaacctgctaaggcatcaatcccattgactgtgctaattgctaaggcagaaactgccgcgcaaaccacatcgctgccataaggacctgcttcagcatgcccggttaattcgaatgaaacgattcggccggagcctgttcgtttaaaagaacctttaatcattgataggccttctttcctgtcaaca

SEQ ID NO: 94 - DNA, 261 bp, Enterococcus faecalis
tgcttcaatgtctgaaatactataaacgttttcgctagctacgccaacttcttttggttccatgttacggtaacgagccataccagtaccagctgggatgattttaccaatgataacattttctttcaatccaagtaatggatcttttttgccacggatagcagcatctgttaacacgcgtgttgtttcttggaaggatgcagcagataagaagctgtttgtttccaatgacgctttggtaataccaagtaagactggacg

SEQ ID NO: 95 - DNA, 415 bp, Enterococcus faecalis
gccttttttaacaaacattactgtttcgcacctcctttaacgtgggctcgagattataatacttctggtgctagagaaacgatcttcatgaagttgttttcacgtaattcacgtgcaactggtccgaagatacgtgttccgcgtgggcttttatcgtcacggataattaccgcagcattttcatcaaatttgatgtaagaaccgtcagcacgacgagcgccagattttgtacgaacgataacggctttaactacttcaccttttttaacaaccccacctggcgttgcttgtttgacagtagcaacaataacgtcaccgatgttagcagttttacgaccagatccgcctaggactttgatcgttaaaatttcacgtgcgccagaattgtcagcgactcttaaacgactttcttgtt

SEQ ID NO: 96 - DNA, 375 bp, Enterococcus faecalis
gcggacttttttgccgtcgacttctttaaacgcaactttagtagcttctccgtttgaaggatcaatcaccattacattagaaacatgaattggcgcttccacttcaaggattccaccttgtggggctgcttggtttggtttttggtgttttttaacgacgttgacaccttcaacgataactttatcttgtttaggaaacgctgctaagacaacgccttctttgtttttatctttaccagtgataacttttactttatcgccttttttaacaaacattactgtttcgcacctcctttaacgtgggctcgagattataatacttctggtgctagagaaacgatcttcatgaagttgttttcacgtaattcacgtgca

SEQ ID NO: 97 - DNA, 150 bp, Enterococcus faecalis
tggtccaaagactacgccacctccacgccattgtggtgaacggattgaaccttgacgagcacgaccagttcctttttgacgccatggtttgcggccaccgccacgaacagcgctacggtttttaactgcgtgtgttccttgtcttaatga

SEQ ID NO: 98 - DNA, 202 bp, Enterococcus faecalis
ataccagcttcacgaacagtttcccaaacgtcttcatcggttgccccatcgaaaacaggtgttgcgacgtgaatacctaattggcgagcagccatacctaagtgtaattcaagtacttgtccgatattcatacgagaaggtacccctaatgggttcaacatgatatcaacaggtgttccgtcaggtaagaatggcatatctt

SEQ ID NO: 99 - DNA, 266 bp, Enterococcus faecalis
cacggagagcgtggttgaattaacggcaccgcttgacgctgcatgttggcacccatcaaggcacggttggagtcatcgttttctaagaaaggaatacatgctgttgcgactgcgactacttgttttggtgaaacgtccatgtagtcaactttgtctacggcaacttctaagttttcactttgtagacgcgccataacaacatcattggcaaatgtgccatcttcatttaaaagtgagttcgcttgcgctacgatataatggtcttc

SEQ ID NO: 100 - DNA, 343 bp, Enterococcus faecalis
catcttcagcagccatttgtgcttcaatgtctgaaatactataaacgttttcgctagctacgccaacttcttttggttccatgttacaggtaacgagccataccagtaccagctgggatgattttaccaatgataacattttctttcaatccaagtaatggatcttttttgccacggatagcagcatctgttaacacgcgtgttgtttcttggaaggatgcagcagataagaagctgtttgtttccaatgacgctttggtaataccaagtaagactggacgactagtagcagggacgccaccagcaactaatgtgtcgtagttacggtctttaaattctgcga

SEQ ID NO: 101 - DNA, 126 bp, Enterococcus faecalis
gccaaagggtttgccaagcgcgggcgctttcctgagcggcggccgcaaaagagtccctcggcgtaaacggtacctgccaactttgttcggcgtggctggcttgcacaaagacttgtttttctagcg

SEQ ID NO: 102 - DNA, 268 bp, Enterococcus faecalis
aactttttttgctgccatgaagttctaacctccttcacttaggaattattttttcttgcctgctactgttttagtagggcctttacgagtacgtgcattatttttcgtgttttgtccacgagttggtaatccacgacggtgacggattccacggtatgaaccgatttccatcaagcgtttgatgtttaagttcacttcacgacgaagatccccttcaacttttaacttatcaatttccgcacgaatcgcatctgtttgttcgtttgtt

SEQ ID NO: 103 - DNA, 365 bp, Enterococcus faecalis
tgtgatgtgactagtacgtttgttgattggtgaagctgaaccttttgcacgaggacggaaacgtttcattgttggtccttcgttaacaaatgcttcagatacgactaagctttcaacgtctaagtcaaagttgttttctgcgttagcaactgctgacattaaaactttttcaatgattccagcagacttgttcggtgtgaatttcaagattgaaattgcatccgcaacgcttttccctctgataagatcgattactaaacgtgctttacgaggtgaagtgcgaactgtttttgcagttgctttagctgatgtaatttgttctgacatttgcatatcctcccctcaaaattagcgtttagtttttt

SEQ ID NO: 104 - DNA, 220 bp, Enterococcus faecalis
catgcgtaatcaatgtccgcacgtaatgtgtgaagtggtacagttccttcagagtatccttctgaacgagcgatatccgcaccgtttagacgacctgatacttgagttttgattcctttagcgccagcacgcattgcgcgttggatggcttgtttttgagcacgacggaaagcaacacggttttctaattgacgtgcaattccttcgcctactaattttg

SEQ ID NO: 105 - DNA, 311 bp, Enterococcus faecalis
acgagtgaagctaccttctaatttttcagtgtcaaagcttacgaatgctggacgtccaacagttgcttcaaccgcttctttaattgttgagatgttttgagatttttcacgaacaccgatcacttgaccaacttcaacgtggtatgatggaatatcaacacgtttgccgtctacagtgatgtggccatggttaactaattgacgtgcttgacgacgagtagttgcaagacctaaacggtaaacaacgttatctaagcgttgttctagtaaaaccatgaagttaacaccgtgtttaccttctttgattttgc

SEQ ID NO: 106 - DNA, 532 bp, Enterococcus faecalis
taattgcaattcacccataccagagataactgtttcaccagtttcaacgtttgtttcaacgcggaatgatggatcttcttcagcaagtttttgtagagccacgcccattttatcttggtcagcttttgatttaggttcaacagcgacttggataactgggtcagggaattcaatagattcaagaataactggtgcatctaatgcacataatgtatcaccagttgttgtgtcttttagaccaacagcagcagcgatatcaccagagtacactttgtcaatttcttgacgagtgttggcgtgcatttgtaggatacgaccgatacgttcttttttgccttttgaagcgttcaatacgtatgaaccactttcaaggacaccagaataaacacggaagaaagttaaacgacctacgaatgggtcagtcataactttaaatgctaatgaagcgaaaggtgcttcgtcatcagctggacgagttgtttcttcgtctgttttagtatcgatccctttgatagcatcgatatctaatgga

SEQ ID NO: 107 - DNA, 267 bp, Enterococcus faecalis
acgttcctaattcaaactcagaatgagtggcgctcattaaacacgacggcgttttggagggcggcatccattatgaggaactggagtcacgtcacgaattgcagtcacttctaaacctgttgcttgtaatgaacgaattgctgcttcacgtccagaaccaggtcctttaactgttacgtctacagttttaagtccatgttccattgccactttagttgcggcttctgcagccatttgagcggcaaaaggagttgattttttgcttcc

SEQ ID NO: 108 - DNA, 445 bp, Enterococcus faecalis
caacgcggtaagttactttaccagctttaacttcttcaacagcttttgtaacgtccattgttacagtaccagttttagggtttggcattaaaccttttggtcctaagacacggcctaatttaccaactgtagccatcatgtcaggagtcgcaacaactacgtcaaagtcgaaccatccaccttggatttttgcaaccatgtcgtcgtcgcctacgaaatctgcaccagcagcttcagcttctttagctttttcgcctttagcgaatactaaaacagtttgtgttttaccagttccgtttggaagcacaactgctccacggatttgttggtctgcttttttagggtcaacgttcaatttgtaagcaacttcaactgttgcgtcaaatttcgcgatgtttgtatcttttgctaaagctactgcttcttcaactgagtaagcttttgt

SEQ ID NO: 109 - DNA, 532 bp, Enterococcus faecalis; identical to SEQ ID NO: 106

SEQ ID NO: 110 - DNA, 195 bp, Enterococcus faecalis
cacggagagcgtggttgaattaacggcaccgcttgacgctgcatgttggcacccatcaaggcacggttggagtcatcgttttctaagaaaggaatacatgctgttgcgactgcgactacttgttttggtgaaacgtccatgtagtcaactttgtctacggcaacttctaagttttcactttgtagacgcgccata

SEQ ID NO: 111 - DNA, 310 bp, Enterococcus faecalis
tcaataaagtattgttgaatttgcaagtcttgtggagcaaacattaacacagcatcactaggcagaccgtcacgaccagctcggccggcttcttggtaataagattcaatattccctggtacttgtgcgtgaatgacaaaacgaacattactcttattaatccccataccaaaggcatttgttgctaccatcacttgcacttgatcatacaagaatgcttcttgattttcactacgtaactgttcactcatgcccccatgatacatcccagctgcaatttttttactttctaataaatgataaattcgtt

SEQ ID NO: 112 - DNA, 558 bp, Enterococcus faecalis
agcttgttcacgcaatactgttttgatgcgtgcaatcgattgacgtacttctttaatacgtgcagtgttttctaattgacctgttgctaattggaatcttaagttgaacaattcttcttttaattgtttttctttatctagcatttcggcagtggttaattctctgatttctttaaccttcattcgattcaccacccatttcctcacgttttacgatcttagtttttaccggcaatttgtgagatgcaagacgaagagcttcacgagctacttcttcaggaacgcctgcgatttcaaacatgattttaccacgtttaactggtgatacccagccttctggtgcccctttacctttacccatacgtacgccgatagctttacttgtgtaagacttgtgagggaaaattttaatccatactttcccgccacgtttcatgtaacgagtcattgcaatacgggctgcttcgatttgacggttagtaatccagtgagattcagttgcttgtaaaccccattcaccaaatgctacttcttttccgcctttagcttcaccgcgca

SEQ ID NO: 113 - DNA, 222 bp, Enterococcus faecalis
caccagctgtcactgattttaatcctccaggatacattgagtgacggtagtaaattttgtctgtagcttttttacctgttaattttactttatcagcgttaattacgattacgaaatctccagtatccacatgtggtgtgaatgttggtttatttttaccacgtagtacagaagcaacaactgctgatagacgtcctaaaggaacatctgttgcatctacta

SEQ ID NO: 114 - DNA, 246 bp, Enterococcus faecalis
ggtgaagctgaaccttttgcacgaggacggaaacgtttcattgttggtccttcgttaacaaatgcttcagatacgactaagctttcaacgtctaagtcaaagttgttttctgcgttagcaactgctgacattaaaactttttcaatgattccagcagacttgttcggtgtgaatttcaagattgaaattgcatccgcaacgcttttccctctgataagatcgattactaaacgtgctttacgaggt

SEQ ID NO: 115 - DNA, 191 bp, Enterococcus faecalis
gcttgtttcgcatctgcaccgtttgctaaggttgcttcaaagaaatctgacatttctttcgttaaagtcaagaccattgcgtcgtattcaggtaaacctaattcactgatataacgggcacgacgtgaggctggcatttctggcaaactagcgcgaactttttcaatccattcatcatcaattgaaaaacg

SEQ ID NO: 116 - DNA, 249 bp, Enterococcus faecalis
tgcgatgctcgctcaccaaagacacgtttgatggccgttgtttccgcagcgtcattcgctggggttgacgtaccatgagcattgatatacccaatttgttccggcgtaatccctgcttccgcaatcgccatttccatcgcagccgccgcgccactaccgtcttttaaaggagcggtcatgtggctagcatcacagttgctgccatagccaacaatttcgccgtagatagttgcgccacgtttctgtgca

SEQ ID NO: 117 - DNA, 605 bp, Enterococcus faecalis
tgtctaagtttttagcatttgatactgcatcacccacacccatgttgataacgattttatcaactttaggtgtttgcataactgagctgtaattaaatttttccaccaatgatggtgttacttctttaatatatttttctttcaggcggttcattcagtaagccctccttccgcaatttttatttatctaaaacttcacctgtttttttagaaacgcggacttttttgccgtcgacttctttaaacgcaactttagtagcttctccgtttgaaggatcaatcaccattacattagaaacatgaattggcgcttccacttcaaggattccaccttgtggggctgcttggtttggtttttggtgttttttaacgacgttgacaccttcaacgataactttatcttgtttaggaaacgctgctaagacaacgccttctttgtttttatctttaccagtgataacttttactttatcgccttttttaacaaacattactgtttcgcacctcctttaacgtgggctcgagattataatacttctggtgctagagaaacgatcttcatgaagttgttttcacgtaattcacgtgcaactggtccgaagata

SEQ ID NO: 118 - DNA, 174 bp, Enterococcus faecalis
  misc_feature (1)...(174): n = A,T,C or G
tccaactttcgctgtgttgttttcatcatgcgctttatattttttagaatatttcatacgtttgccatagatagggtggtttttctttgtttcaacgacaactgtgattgttttatccattttgtctgataccacacgaccttggtaaactnnacgttgatttctttcttcagt

SEQ ID NO: 119 - DNA, 191 bp, Enterococcus faecalis
  misc_feature (1)...(191): n = A,T,C or G
gcttgtttcgcatctgcaccgtttgctaangttgcttcaaagaaatctgacatttctttcgttaaagtcaagaccattgcgtcgtattcaggtaaacctaattcactgatataacgggcacgacgtgaggctggcatttctggcaaactagcgcgaactttttcaatccattcatcatcaattgaaaaacg

SEQ ID NO: 120 - DNA, 195 bp, Enterococcus faecalis; identical to SEQ ID NO: 110

SEQ ID NO: 121 - DNA, 246 bp, Enterococcus faecalis; identical to SEQ ID NO: 114

SEQ ID NO: 122 - DNA, 402 bp, Enterococcus faecalis
tgcgcgcttgttccagctgaacggattaattgtccacctttaccaggtttcatttcaatgttgtggataactgtaccaactggaatgttttccaatggtaatgcgttacctactttaatatctgcttctggaccagatactaggcgcatgcctacttctaatccttttggtgctaagatgtatgccttaaccccgtcttcgtaatgaactaacgcgatgttagcagaacggtttggatcgtactcgatcgttttaacaaccgctgcgacgttatctttattacgtttgaagtcaatcacacggtattgacgtttgtgaccgccaccttggtgacgaaccgtaatgcgaccgttgttgttacgaccggcattgttttttaatggctgtaacaatgatttttct

SEQ ID NO: 123 - DNA, 195 bp, Enterococcus faecalis
cgttttattagataataactgcttcttcgactacctctagtaaacggaaacgttttgtagctgataatggacgagtttccatgatttttacgatgtctccaactttcgctgtgttgttttcatcatgcgctttatattttttagaatatttcatacgtttgccatagatagggtggtttttctttgtttcaacga

SEQ ID NO: 124 - DNA, 249 bp, Enterococcus faecalis
gattgcttcattggcaggttttgtaacagtactattcactttacctaaacctaacgctttaactgtagcacgttggttttgaggacgtccgataacactgcgttttaaagtaatttttaattcagccattatttttgtcctccttaaccgataatttcttctacagatttaccgcgaagtgctgccacttcttcggcacgttttaattgttttagaccttcaacagttgcgcgaacaacgttaataggt

SEQ ID NO: 125 - DNA, 375 bp, Enterococcus faecalis; identical to SEQ ID NO: 96

SEQ ID NO: 126 - DNA, 220 bp, Enterococcus faecalis; identical to SEQ ID NO: 104

SEQ ID NO: 127 - DNA, 375 bp, Enterococcus faecalis; identical to SEQ ID NO: 96

SEQ ID NO: 128 - DNA, 366 bp, Enterococcus faecalis
gaattgttacgcggtcgccacccatacggccggctagtcgtttatttttaaatacacggttaggcgctactggacccattgacccaggacgacggtgataacgagaaccatgagacataggtccgcggctttggccgtgacgtttgattgccccttggaatcctttacctttcgtagtacctgtaacatcaacaacgtctcctgcttggaaaacatctactttgatttctttacctacttcatattctcctagctcaacattcttgaattctttaatgaagcgcttaggagccgtgtttgcttttgcaacatgacctttcgcaggtttgtttgataaaacttcacgtttgtcttggtaaccaactt

SEQ ID NO: 129 - DNA, 150 bp, Enterococcus faecalis; identical to SEQ ID NO: 97

SEQ ID NO: 130 - DNA, 400 bp, Enterococcus faecalis
cacgtttaagatgtttacgtttgctactttaacatcgaatgctgattcaacagcttgttttactaaagttttgtttgcgcgagtgtccacttcgaaagtatatttcttttcgtccatagctaacatggatttttcagtgatcactgggcgtttgattacgtctagtaattccattatgcaagcacctcctcaatttgagtaagagctgtttgtgttgccaagactttgttagctgacacaacatctaacacactaacgttatcagaagttactacagaaacgtttggtaagttacgagctgataaagctgcaaagtcgttaccattttctaaaacaactaatactttagtatcgatagacaagttagcaagaacttgtttgaattcttttgtttttggtg

SEQ ID NO: 131 - DNA, 154 bp, Enterococcus faecalis
ggtgttggtccaaagactacgccacctccacgccattgtggtgaacggattgaaccttgacgagcacgaccagttcctttttgacgccatggtttgcggccaccgccacgaacagcgctacggtttttaactgcgtgtgttccttgtcttaatg

SEQ ID NO: 132 - DNA, 239 bp, Enterococcus faecalis
  misc_feature (1)...(239): n = A,T,C or G
ccaacaaccatgttgttgaagtttgcacgagttgttccgtggattgttttcatttcttttgaatcgtttggacgagtgaatgtcacttcgtttccttcgatgttcattttgatatcagaagaaaattcgcgtgttaattcacctttaggtcctttaactgtaatgttgtttccgtcttgcttgatntcaacaccagcaggaagaacaacaactttattaccaatacggctcacttagag

SEQ ID NO: 133 - DNA, 558 bp, Enterococcus faecalis; identical to SEQ ID NO: 112

SEQ ID NO: 134 - DNA, 191 bp, Enterococcus faecalis; identical to SEQ ID NO: 115

SEQ ID NO: 135 - DNA, 195 bp, Enterococcus faecalis; identical to SEQ ID NO: 110

SEQ ID NO: 136 - DNA, 222 bp, Enterococcus faecalis; identical to SEQ ID NO: 113

SEQ ID NO: 137 - DNA, 429 bp, Enterococcus faecalis
cttaggttttcgacttcagatccgcctttaccgataaccatacctggtttagctgtgtgaattgaaatgttaacacggtttgcagcgcgttcgatttcaattgtagatacagcagcatcagcaagttttgttgcgataaatttacggattcttaaatcttcgtgtaagaattcagcatactctttttcagcataccatttcgcatcccagtcgcggatgatgcctacacgcattccaattggatgtactttttgacccactgattgtccctcctcttaaatgtttaagctctgttttcataaagaaaacagcctatttcatgagacttatttctctgttacaactactgtgatgtgactagtacgtttgttgattggtgaagctgaaccttttgcacgaggacggaaacgtttcattgttggtccttcg

SEQ ID NO: 138 - DNA, 248 bp, Enterococcus faecalis
aacacaagggttctcgaacattcaaaagttgaatgaattattttactgttactgaagcgccaacttcttctaaagcagcttttaaagcttctgcttcttctttagaaacagcttctttaactggtgcaggagcgccatcaactacagctttagcttctttcaagcctaagccagttgcttcacgaactgctttgataactttaactttttgatcgccagctgctgttaattcaacagtgaattcagtt

SEQ ID NO: 139 - DNA, 230 bp, Enterococcus faecalis
atcgaaagcttttttgctgacaccgtggaagtcacgtacacgaggtaaagaaactgttactaatttatctaaaaattcgtacattctttcgccgcgtagcgttactttcgcaccgattggcattccttcacgtaaacggaatccagcgatagattttttagcttttgtgataagtggtttttgaccagtgattaatgctaattcttcaacagctttgtctaagtttttag

SEQ ID NO: 140 - DNA, 176 bp, Enterococcus faecalis
tacagcgattgtgaaacctacgaatgatggaaaaattgtagagcggcgagaccaagttttaattacttttttcttttcggcaccttgttgtgcttcgacctttttcatcaaatgatcatcgacgaaaggtcctttttttaaactacgacccatggtgaacctcctctcaaaatgta

SEQ ID NO: 141 - DNA, 246 bp, Enterococcus faecalis; identical to SEQ ID NO: 114

SEQ ID NO: 142 - DNA, 513 bp, Enterococcus faecalis
cggtgacggattccacggtatgaaccgatttccatcaagcgtttgatgtttaagttcacttcacgacgaagatccccttcaacttttaacttatcaatttccgcacgaatcgcatctgtttgttcgtttgttaaatcacgtacacgaacatcttcagatacgccaacgtttgctaaaacttttttagctgtagtgttaccaataccataaatgtaagtaagagaaactactacacgtttgtcacgagggatgtctactcctgcaatacgagccattattcgttacacctcctaattatccttgacgttgtttatgttttggatttgctgggcaaataaccataacacgtcctttacggcgaattactttacaatgttcacacattggttttactgatggtcttactttcatgataatacctcctgtggttttacggagtacaattatttaaagcgataagtaatacggccacgcgttaaatcatacggtgataattcaactgttactttgtca

SEQ ID NO: 143 - DNA, 541 bp, Enterococcus faecalis
tcacggataattaccgcagcattttcatcaaatttgatgtaagaaccgtcagcacagacgagcgccagattttgtacgaacagataacggctttaactacttcaccttttttaacaaccccacctggcgttgcttgtttgacagtagcaacaataacgtcaccgatgttagcagttttacgaccagatccgcctaggactttgatcgttaaaatttcacgtgcgccagaattgtcagcgactcttaaacgactttcttgttggatcacgatgtgtatccccctttcagattttgtgcttcaatctattaggaaattctcgttttattagataataactgcttcttcgactacctctagtaaacggaaacgttttgtagctgataatggacgagtttccatgatttttacgatgtctccaactttcgctgtgttgttttcatcatgcgctttatattttttagaatatttcatacgtttgccatagatagggtggtttttctttgtttcaacgacaactgtgattgttttatccattttgtc

SEQ ID NO: 144 - DNA, 272 bp, Enterococcus faecalis
cggcacgataatcctgatcagttaacaagtcaattaccgtttcatctcgctgatcttccgtcgcagaaatgacaccttgtggtttatgcaacatgtaataaaagaatttctgatacgtaagaatttctcccatcaaggcaatttgatctgtttcttcatttacttgtgttttggcttcttttacgacgtcaccattcaccgtaacgacttttttctttaacaattgtttgatttctttacgactaccgataccaacatcggctaaaaattta

SEQ ID NO: 145 - DNA, 156 bp, Enterococcus faecalis
tgactcctttagattactgtcgttgcttgtttttcttcaattttttcatcattgacacgttcaacgttcgcgcctaatttttgaagttttttatggaactcataatagccacgatctaaatatttcaaattagagacacgtgtaatgccatttgca

SEQ ID NO: 146 - DNA, 402 bp, Enterococcus faecalis; identical to SEQ ID NO: 122

SEQ ID NO: 147 - DNA, 583 bp, Enterococcus faecalis
agcttgttcacgcaatactgttttgatgcgtgcaatcgattgacgtacttctttaatacgtgcagtgttttctaattgacctgttgctaattggaatcttaagttgaacaattcttcttttaattgtttttctttatctagcatttcggcagtggttaattctctgatttctttaaccttcattcgattcaccacccatttcctcacgttttacgatcttagtttttaccggcaatttgtgagatgcaagacgaagagcttcacgagctacttcttcaggaacgcctgcgatttcaaacatgattttaccacgtttaactggtgatacccagccttctggtgcccctttacctttacccatacgtacgccgatagctttacttgtgtaagacttgtgagggaaaattttaatccatactttcccgccacgtttcatgtaacgagtcattgcaatacgggctgcttcgatttgacggttagtaatccagtgagattcagttgcttgtaaaccccattcaccaaatgctacttcttttccgcctttagcttcaccgcgcatttttccgcggaattcacgacggtg

SEQ ID NO: 148 - DNA, 79 bp, Enterococcus faecalis
cgattgctacgccccacacgaccacgtaattgatacaacgtagataagcccatgtagtccgcattttctacaaacaagg

SEQ ID NO: 149 - DNA, 195 bp, Enterococcus faecalis; identical to SEQ ID NO: 123

SEQ ID NO: 150 - DNA, 223 bp, Enterococcus faecalis
tgcagttgctttagctgatgtaatttgttctgacatttgcatatcctcccctcaaaattagcgtttagtttttttatcgtcagcaacgtggccacgataagttctagttggtgcaaattcacctaatttatgtcctaccatgtcttcttgaatgtaaacagggacatgtttccgtccatcatatacagcgattgtgaaacctacgaatgatggaaaaattgta

SEQ ID NO: 151 - DNA, 133 bp, Enterococcus faecalis
ggcaattaatggtgcacccatcaaatgatccactggaatatcaaagaatccttgaatttggaccgcatgtaagtccaatgtcaacattcttgttgcaccagctttttcaatcatgtttgcaacaagtttagca

SEQ ID NO: 152 - DNA, 288 bp, Enterococcus faecalis
gctaagatgataatcgtcaatgaattggcaaatttggtgtaccaaataaaaaagttatttagctgtggaaaaggacgacgaacaaaagaagtaatcgtttgatcaaagcctttgagccaggttggataaaaacgaacaacatagcctaaaaacataaatactaaaagaaaacaactacctgcaaattgataataaagtttgtttttcataaaaaatcctttcaaaaattaatcgcaacaatccgtattataccatcaaaagggtaaaaaattaaaagataatttcatt

SEQ ID NO: 153 - DNA, 262 bp, Enterococcus faecalis
ccttcaacgataactttatcttgtttaggaaacgctgctaagacaacgccttctttgtttttatctttaccagtgataacttttactttatcgccttttttaacaaacattactgtttcgcacctcctttaacgtgggctcgagattataatacttctggtgctagagaaacgatcttcatgaagttgttttcacgtaattcacgtgcaactggtccgaagatacgtgttccgcgtgggcttttatcgtcacggataattac

SEQ ID NO: 154 - DNA, 201 bp, Enterococcus faecalis
ccacctccacgccattgtggtgaacggattgaaccttgacgagcacgaccagttcctttttgacgccatggtttgcggccaccgccacgaacagcgctacggtttttaactgcgtgtgttccttgtcttaatgaagcacgttgcatgatgattgcatcatagacaacactttcattaggttcgattccgaagatttcttca

SEQ ID NO: 155 - DNA, 174 bp, Enterococcus faecalis
tccaactttcgctgtgttgttttcatcatgcgctttatattttttagaatatttcatacgtttgccatagatagggtggtttttctttgtttcaacgacaactgtgattgttttatccattttgtctgataccacacgaccttggtaaactttacgttgatttctttcttcagt

SEQ ID NO: 156 - DNA, 289 bp, Enterococcus faecalis
tgaccgccaccttggtgacgaaccgtaatgcgaccgttgttgttacgaccggcattgttttttaatggctgtaacaatgatttttctggtgttgaagttgtgatttcagcgaaatcagaacttgtcatgttacgacggccatttgtggtaggtttgtactttttaatcgccacgtcttatttccctcctacgttgatattgttcaggactgcttattcagcagcttcgaataattgaatttcttttgaatcttcagttaatgtaacgatcgctttgcgacgtttttttg

SEQ ID NO: 157 - DNA, 272 bp, Enterococcus faecalis
aaactgttactaatttatctaaaaattcgtacattctttcgccgcgtagcgttactttcgcaccgattggcattccttcacgtaaacggaatccagcgatagattttttagcttttgtgataagtggtttttgaccagtgattaatgctaattcttcaacagctttgtctaagtttttagcatttgatactgcatcacccacacccatgttgataacgattttatcaactttaggtgtttgcataactgagctgtaattaaatttttccacc

SEQ ID NO: 158 - DNA, 550 bp, Enterococcus faecalis
cacgtttcatacggtctactaaaacgtctaattgcaattcacccataccagagataactgtttcaccagtttcaacgtttgtttcaacgcggaatgatggatcttcttcagcaagtttttgtagagccacgcccattttatcttggtcagcttttgatttaggttcaacagcgacttggataactgggtcagggaattcaatagattcaagaataactggtgcatctaatgcacataatgtatcaccagttgttgtgtcttttagaccaacagcagcagcgatatcaccagagtacactttgtcaatttcttgacgagtgttggcgtgcatttgtaggatacgaccgatacgttcttttttgccttttgaagcgttcaatacgtatgaaccactttcaaggacaccagaataaacacggaagaaagttaaacgacctacgaatgggtcagtcataactttaaatgctaatgaagcgaaaggtgcttcgtcatcagctggacgagttgtttcttcgtctgttttagtatcgatccctttgatagcatcgat

SEQ ID NO: 159 - DNA, 191 bp, Enterococcus faecalis; identical to SEQ ID NO: 115

SEQ ID NO: 160 - DNA, 237 bp, Enterococcus faecalis
gctgtacgagcattgaattctttagtgaatcccatgatgttgatacctgcttgacctaacgctggacctactggtggagctggtgttgctttccccgcaggaatttgtaatttaacgattttttctacttttttagccacgaaaatacctccttaagttctcgtgcgtggttaatggggttgagatttcccctcccactcaacgtacatttaaaacataccctattactatacagga

SEQ ID NO: 161 - DNA, 160 bp, Enterococcus faecalis
accatgttgctgcgtgttgctagaaatggcgactttgccaaaatcaaaagttggtgtgctgataaaaccttcctcatctggtgccacaatttcttgatttttaggttggattctgacagtatcagctgcgtgaacagcagaaaaatttccattcatttca

SEQ ID NO: 162 - DNA, 217 bp, Enterococcus faecalis
gctaccccagaaccttctactgcaggtttcataaggatacggccgccaccgaatacgccaattacttcgtgcgggatagtagaaccaaccataggcacttcaactaagtttttcttcgcgtcttcgattgctttacggatagcttcaggtacttcttgtgctttaccagtaccgaaaccaacgtgtccgtttttgtcaccgacaacaactaaagctg

SEQ ID NO: 163 - DNA, 249 bp, Enterococcus faecalis; identical to SEQ ID NO: 116

SEQ ID NO: 164 - DNA, 160 bp, Enterococcus faecalis
ggatcaattcgcggtaacgttggatgtcagttttacgtaagtaagctaacaagttacgacggtgaccgatttttttcattaaaccacggtaagaatggtgatcttttttgtgtgtacgcgcatgttcgttcaattggttaatgtcttcagttaagacagc

SEQ ID NO: 165 - DNA, 293 bp, Enterococcus faecalis
cacctggatccattacgcggattttacgtaacatttgacgaaccattacttcgatatgtttgtcgccgatttctaccccttgcatacggtaaacacgttgtacttcacgtaataggtagttttcaacagataaaacatcacgaacttgtaataattgttttggatcaattgaaccttctgtcaacggtgcaccacggtggatgatgtcgccttcagcaactttcatacgtgcagtgtaagggacagtataggtacgtgtatctgtttttcctttgatggttacttctttttga

SEQ ID NO: 166 - DNA, 195 bp, Enterococcus faecalis; identical to SEQ ID NO: 110

SEQ ID NO: 167 - DNA, 407 bp, Enterococcus faecalis
gatcttttttgccacggatagcagcatctgttaacacgcgtgttgtttcttggaaggatgcagcagataagaagctgtttgtttccaatgacgctttggtaataccaagtaagactggacgactagtagcagggacgccaccagcaactaatgtgtcgtagttacggtctttaaattctgcgatgtccattaatgttcctggaaggatttcagtgtcacctggatccattacgcggattttacgtaacatttgacgaaccattacttcgatatgtttgtcgccgatttctaccccttgcatacggtaaacacgttgtacttcacgtaataggtagttttcaacagataaaacatcacgaacttgtaataattgttttggatcaattgaaccttctgtcaacggtgca

SEQ ID NO: 168 - DNA, 445 bp, Enterococcus faecalis; identical to SEQ ID NO: 108

SEQ ID NO: 169 - DNA, 227 bp, Enterococcus faecalis
aatgatggaaaaattgtagagcggcgagaccaagttttaattacttttttcttttcggcaccttgttgtgcttcgacctttttcatcaaatgatcatcgacgaaaggtcctttttttaaactacgacccatggtgaacctcctctcaaaatgtacgacacatggtcaaaaaaattatttagtacgacgacgaacgataagtttgtctgatttagcttttttattacg

SEQ ID NO: 170 - DNA, 234 bp, Enterococcus faecalis
gcgaagtgctgccacttcttcggcacgttttaattgttttagaccttcaacagttgcgcgaacaacgttaataggtgtgtttgaacctagtgatttagatgtaatatctgctacaccagctaattccaatacggcacgaactggtccaccagcagctaccccagaaccttctactgcaggtttcataaggatacggccgccaccgaatacgccaattacttcgtgcgggatagt

SEQ ID NO: 171 - DNA, 198 bp, Enterococcus faecalis
tgcaaattcacctaatttatgtcctaccatgtcttcttgaatgtaaacagggacatgtttccgtccatcatatacagcgattgtgaaacctacgaatgatggaaaaattgtagagcggcgagaccaagttttaattacttttttcttttcggcaccttgttgtgcttcgacctttttcatcaaatgatcatcgacgaa

SEQ ID NO: 172 - DNA, 198 bp, Enterococcus faecalis
aggtgttccgtcaggtaagaatggcatatcttcttccggcataatacgggaaacaacccctttatttccgtgacgtcccgccattttatctccttcgtgaattttacgtttttgaacgatatagacacgaactaacatgttgacacctggtgataattcatcgccagcttcacgagtaaagattttcacatcatgaac

SEQ ID NO: 173 - DNA, 135 bp, Enterococcus faecalis
taacctgcatatttacccatgcgtttgaattttggacgcacgtttaagatgtttacgtttgctactttaacatcgaatgctgattcaacagcttgttttactaaagttttgtttgcgcgagtgtccacttcgaaa

SEQ ID NO: 174 - DNA, 253 bp, Enterococcus faecalis
aagttattttcagcaactttatctgataatacagatttcattgctaagcgacgaacttttttaggaagtttgtagctgtatgaacgcggtgttggtccaaagactacgccacctccacgccattgtggtgaacggattgaaccttgacgagcacgaccagttcctttttgacgccatggtttgcggccaccgccacgaacagcgctacggtttttaactgcgtgtgttccttgtcttaatgaagcacgttgca

SEQ ID NO: 175 - DNA, 398 bp, Enterococcus faecalis
tgtcgtagttacggtctttaaattctgcgatgtccattaatgttcctggaaggatttcagtgtcacctggatccattacgcggattttacgtaacatttgacgaaccattacttcgatatgtttgtcgccgatttctaccccttgcatacggtaaacacgttgtacttcacgtaataggtagttttcaacagataaaacatcacgaacttgtaataattgttttggatcaattgaaccttctgtcaacggtgcaccacggtggatgatgtcgccttcagcaactttcatacgtgcagtgtaagggacagtataggtacgtgtatctgtttttcctttgatggttacttctttttgacgtgtggcaggatcttcagaaatatcgataacttcaccggtt

SEQ ID NO: 176 - DNA, 202 bp, Enterococcus faecalis
taataagatatgttcacgtgtttgaggcataggaccatcagcagcagaaactactaagatagctccgtccatttgagcagcaccagtgatcatgtttttaacgtagtccgcgtgtcctgggcagtcaacgtgtgcatagtgacgagtttcagtttcatattcgatatgagaagtgttgattgtgattccacgttctttttct

SEQ ID NO: 177 - DNA, 244 bp, Enterococcus faecalis
caaattcgataactaccattggtgctgcatcgccgcgtcttggttctgtcttcaagatacgagtgtaaccaccttggcgttccgcgaaacgaggtcctaaatcgttaaatagcttttgtaaagctgattcaacaacgatagactcatcttcttcacgaacactagcaacttcattacgaacgaaagtagctgcttgacgacgtgcatgaagatctccacgtttacctaaagtaatcattttttc

SEQ ID NO: 178 - DNA, 286 bp, Enterococcus faecalis
tcactgtttaagtaagcagaaacttcgcccattaaccagtttgatgcttgtttcgcatctgcaccgtttgctaaggttgcttcaaagaaatctgacatttctttcgttaaagtcaagaccattgcgtcgtattcaggtaaacctaattcactgatataacgggcacgacgtgaggctggcatttctggcaaactagcgcgaactttttcaatccattcatcatcaattgaaaaacgaggaacatctggctctgggaagtaacggtagtcacttgagccttctttaa

SEQ ID NO: 179 - DNA, 198 bp, Enterococcus faecalis; identical to SEQ ID NO: 171

SEQ ID NO: 180 - DNA, 163 bp, Enterococcus faecalis
tgtcttcttgaatgtaaacagggacatgtttccgtccatcatatacagcgattgtgaaacctacgaatgatggaaaaattgtagagcggcgagaccaagttttaattacttttttcttttcggcaccttgttgtgcttcgacctttttcatcaaatgatcatc

SEQ ID NO: 181 - DNA, 296 bp, Enterococcus faecalis
tcctttaacgtgggctcgagattataatacttctggtgctagagaaacgatcttcatgaagttgttttcacgtaattcacagtgcaactggtccgaagatacgtgttccgcgtgggcttttatcgtcacggataattaccgcagcattttcatcaaatttgatgtaagaaccgtcagcacgacgagcgccagattttgtacgaacgataacggctttaactacttcaccttttttaacaaccccacctggcgttgcttgtttgacagtagcaacaataacgtcaccgatgttagca

SEQ ID NO: 182 - DNA, 182 bp, Enterococcus faecalis
gaccttcaacagttgcgcgaacaacgttaataggtgtgtttgaacctagtgatttagatgtaatatctgctacaccagctaattccaatacggcacgaactggtccaccagcagctaccccagaaccttctactgcaggtttcataaggatacggccgccaccgaatacgccaattacttcg

SEQ ID NO: 183 - DNA, 295 bp, Enterococcus faecalis
tcctttaacgtgggctcgagattataatacttctggtgctagagaaacgatcttcatgaagttgttttcacgtaattcacgtgcaactggtccgaagatacgtgttccgcgtgggcttttatcgtcacggataattaccgcagcattttcatcaaatttgatgtaagaaccgtcagcacgacgagcgccagattttgtacgaacgataacggctttaactacttcaccttttttaacaaccccacctggcgttgcttgtttgacagtagcaacaataacgtcaccgatgttagca

SEQ ID NO: 184 - DNA, 207 bp, Enterococcus faecalis
caccttcaacgataactttatcttgtttaggaaacgctgctaagacaacgccttctttgtttttatctttaccagtgataacttttactttatcgccttttttaacaaacattactgtttcgcacctcctttaacgtgggctcgagattataatacttctggtgctagagaaacgatcttcatgaagttgttttcacgtaattcacg

SEQ ID NO: 185 - DNA, 208 bp, Enterococcus faecalis
tcgaccttttgaaatcttaaagtttttggttgtagtattcaacgacaagtgcttcgtcgatttctgggtaaagttcatcacgttctggtaaacgagtgaagctaccttctaatttttcagtgtcaaagcttacgaatgctggacgtccaacagttgcttcaaccgcttctttaattgttgagatgttttgagatttttcacgaacacc

SEQ ID NO: 186 - DNA, 181 bp, Enterococcus faecalis
ttgttttactaaagttttgtttgcgcgagtgtccacttcgaaagtatatttcttttcgtccatagctaacatggatttttcagtgatcactgggcgtttgattacgtctagtaattccattatgcaagcacctcctcaatttgagtaagagctgtttgtgttgccaagactttgttagctg

SEQ ID NO: 187 - DNA, 245 bp, Enterococcus faecalis
gataactaaatctttatttaggatctcaacatcactgtccacgataatatcgccggcagtcacggtagcgggtcctgtaatatcgatctcaagggttttctcttcttcagcatataatttcaatgctaagcctttaatattcaaaataatttgtgttacgtcttctcgtacacctggaatggttgagaattcgtgtaaaacaccatcgatttgaatattcgtaattgcagctcctggtaaagaag

SEQ ID NO: 188 - DNA, 74 bp, Enterococcus faecalis
aaaatgtacgacacatggtcaaaaaaattatttagtacgacgacgaacgataagtttgtctgatttagcttttt

SEQ ID NO: 189 - DNA, 218 bp, Enterococcus faecalis
gacaccgtggaagtcacgtacacgaggtaaagaaactgttactaatttatctaaaaattcgtacattctttcgccgcgtagcgttactttcgcaccgattggcattccttcacgtaaacggaatccagcgatagattttttagcttttgtgataagtggtttttgaccagtgattaatgctaattcttcaacagctttgtctaagtttttagcatttg

SEQ ID NO: 190 - DNA, 198 bp, Enterococcus faecalis; identical to SEQ ID NO: 172

SEQ ID NO: 191 - DNA, 309 bp, Enterococcus faecalis
  misc_feature (1)...(309): n = A,T,C or G
tcacacggtattgacgtttgtgaccgccaccttggtgacgaaccgtaatgcgaccgttgttgttacgaccggcattgttttttaatggctgtaacaatgatttttctggtgttgaagttgtgatttcagcgaaatcagaacttgtcatgttacgacggccatttgtggtaggtttgtactttttaatcgccacgtcttatttccctcctacgttgatattgttcaggactgcttattcagcagcttcgaataattgaatttcttttgaancttcagttaatgtaacgatcgctttgcgacgtttttttg

SEQ ID NO: 192 - DNA, 155 bp, Enterococcus faecalis
tccgcgtgggcttttatcgtcacggataattaccgcagcattttcatcaaatttgatgtaagaaccgtcagcacgacgagcgccagattttgtacgaacgataacggctttaactacttcaccttttttaacaaccccacctggcgttgcttgtt

SEQ ID NO: 193 - DNA, 164 bp, Enterococcus faecalis
cttttccgtgtaatgcgcgtaagtagtaaagttttgcacgacgtactttaccgtagcgaaccacttcaatttgagcaacacgtggtgtgtgtaatgggaatgtacgttccacaccaacaccatttgaaactttacgtactgtgtaagtttcgctgattccagca

SEQ ID NO: 194 - DNA, 187 bp, Enterococcus faecalis
accatcagcagcagaaactactaagatagctccgtccatttgagcagcaccagtgatcatgtttttaacgtagtccgcgtgtcctgggcagtcaacgtgtgcatagtgacgagtttcagtttcatattcgatatgagaagtgttgattgtgattccacgttctttttcttctggagcgttatcgata

SEQ ID NO: 195 - DNA, 205 bp, Enterococcus faecalis
tgaccattgaactatttacctcctttatgcgagtttacttgtttaccagctagctttcttcacgccgggaatttgacctttataggcaagttcgcggaagcaaatacggcaaagatgaaatttacgataaactgaatgtggacgtccacaacgttcacaacgagtataagcttgtgttgaatgtttagcaggacgtttgttttta

SEQ ID NO: 196 - DNA, 255 bp, Enterococcus faecalis
agcaacactacagataactaaatctttatttaggatctcaacatcactgtccacgataatatcgccggcagtcacggtagcgggtcctgtaatatcgatctcaagggttttctcttcttcagcatataatttcaatgctaagcctttaatattcaaaataatttgtgttacgtcttctcgtacacctggaatggttgagaattcgtgtaaaacaccatcgatttgaatattcgtaattgcagctcctggtaaaga

SEQ ID NO: 197 - DNA, 181 bp, Enterococcus faecalis
cccgtgagttgagataaacatttctaagacagaaagtccttcacggaagtttgagatgattggtaattccatgattcgtccattcggagcggccatcaaaccacgcataccagctaactgtgtaaagttggagatgttaccacgggctccagagtcagacatcatgaagattgggttacga

SEQ ID NO: 198 - DNA, 187 bp, Enterococcus faecalis; identical to SEQ ID NO: 194

SEQ ID NO: 199 - DNA, 184 bp, Enterococcus faecalis
aacactttcattaggttcgattccgaagatttcttcatttaaagtgatttcaccgttttgagttccatcttgtttgaataatgctacattcggcattccttagttcctcctttccctacacttatttagctttcacagctgatttgattgtgattaaagattttttcgctccaggaatgtttcc

SEQ ID NO: 200 - DNA, 286 bp, Enterococcus faecalis
tgtgccaatgaatttccctccttaaattaagttcgtgatatctaatacttctggttgttgtgcagcatgtggatgctcagctccaccgtatacgttcaatttagtaaattgtttacgtcctaaagtgtttttaggtagcataccttttacagaagtttcgataagacggcgagagtttttgtcgcgtaattcaccagctgtcactgattttaatcctccaggatacattgagtgacggtagtaaattttgtctgtagcttttttacctgttaattttactttatca

SEQ ID NO: 201 - DNA, 370 bp, Enterococcus faecalis
gtagcaacaataacgtcaccgatgttagcagttttacgaccagatccgcctaggactttgatcgttaaaatttcacgtgcgccagaattgtcagcgactcttaaacgactttcttgttggatcacgatgtgtatccccctttcagattttgtgcttcaatctattaggaaattctcgttttattagataataactgcttcttcgactacctctagtaaacggaaacgttttgtagctgataatggacgagtttccatgatttttacgatgtctccaactttcgctgtgttgttttcatcatgcgctttatattttttagaatatttcatacgtttgccatagatagggtggtttttctttgtttcaacga

SEQ ID NO: 202 - DNA, 256 bp, Enterococcus faecalis
caatttagtaaattgtttacgtcctaaagtgtttttaggtagcataccttttacagaagtttcgataagacggcgagagtttttgtcgcgtaattcaccagctgtcactgattttaatcctccaggatacattgagtgacggtagtaaattttgtctgtagcttttttacctgttaattttactttatcagcgttaattacgattacgaaatctccagtatccacatgtggtgtgaatgttggtttatttttacca

SEQ ID NO: 203 - DNA, 205 bp, Enterococcus faecalis; identical to SEQ ID NO: 195

SEQ ID NO: 204 - DNA, 163 bp, Enterococcus faecalis
tgcgttcgttgatgattaaatcagttgtaatatcacgtagcatagctttacgttggcttgatgtgcgtcctaatttacggtaactcacgttgggttccctccttcgtttctgttctcacgagccactgctgttaagcaggactggaaacttcgtaaaagtctt

SEQ ID NO: 205 - DNA, 128 bp, Enterococcus faecalis
taaagtgatttcaccgttttgagttccatcttgtttgaataatgctacattcggcattccttagttcctcctttccctacacttatttagctttcacagctgatttgattgtgattaaagattttttc

SEQ ID NO: 206 - DNA, 198 bp, Enterococcus faecalis; identical to SEQ ID NO: 172

SEQ ID NO: 207 - DNA, 276 bp, Enterococcus faecalis
taaaccttctactgctaccaagttattttcagcaactttatctgataatacagatttcattgctaagcgacgaacttttttaggaagtttgtagctgtatgaacgcggtgttggtccaaagactacgccacctccacgccattgtggtgaacggattgaaccttgacgagcacgaccagttcctttttgacgccatggtttgcggccaccgccacgaacagcgctacggtttttaactgcgtgtgttccttgtcttaatgaagcacgttgcatgat

SEQ ID NO: 208 - DNA, 184 bp, Enterococcus faecalis
tacctcctttatgcgagtttacttgtttaccagctagctttcttcacgccgggaatttgacctttataggcaagttcgcggaagcaaatacggcaaagatgaaatttacgataaactgaatgtggacgtccacaacgttcacaacgagtataagcttgtgttgaatgtttagcaggacgtttgt

SEQ ID NO: 209 - DNA, 218 bp, Enterococcus faecalis; identical to SEQ ID NO: 189

SEQ ID NO: 210 - DNA, 279 bp, Enterococcus faecalis
gcgacgttatctttattacgtttgaagtcaatcacacggtattgacgtttgtgaccgccaccttggtgacgaaccgtaatgcgaccgttgttgttacgaccggcattgttttttaatggctgtaacaatgatttttctggtgttgaagttgtgatttcagcgaaatcagaacttgtcatgttacgacggccatttgtggtaggtttgtactttttaatcgccacgtcttatttccctcctacgttgatattgttcaggactgcttattcagcagcttcg

SEQ ID NO: 211 - DNA, 140 bp, Enterococcus faecalis
gaccaacgtttgccaaatcataacgttttggatcaaagaaacgtgcagttaacaagctacgtgagctatctgctgtttttggttcgcctgggcgaagacgttcataaatgtctttcaagccttcttctgtacgagaatca

SEQ ID NO: 212 - DNA, 186 bp, Enterococcus faecalis
aaactgttactaatttatctaaaaattcgtacattctttcgccgcgtagcgttactttcgcaccgattggcattccttcacgtaaacggaatccagcgatagattttttagcttttgtgataagtggtttttgaccagtgattaatgctaattcttcaacagctttgtctaagtttttagcatttg

SEQ ID NO: 213 - DNA, 168 bp, Enterococcus faecalis
ggtaatccacgacggtgacggattccacggtatgaaccgatttccatcaagcgtttgatgtttaagttcacttcacgacgaagatccccttcaacttttaacttatcaatttccgcacgaatcgcatctgtttgttcgtttgttaaatcacgtacacgaacatcttca

SEQ ID NO: 214 - DNA, 275 bp, Enterococcus faecalis
agttagcaagaacttgtttgaattcttttgtttttggtgcatcgaagcttaaaccttctactgctaccaagttattttcagcaactttatctgataatacagatttcattgctaagcgacgaacttttttaggaagtttgtagctgtatgaacgcggtgttggtccaaagactacgccacctccacgccattgtggtgaacggattgaaccttgacgagcacgaccagttcctttttgacgccatggtttgcggccaccgccacgaacagcgcta

SEQ ID NO: 215 - DNA, 209 bp, Enterococcus faecalis
tattctacgtcgcggataaatccttcacgtttcaggatttctgcgatatcacgtttgatttttgaagcaggtacttctaaagtttcatgtttaaccatgttcgcattacgaatgcgagttagaaaatctgcaattggatctgtcatgaccattgaactatttacctcctttatgcgagtttacttgtttaccagctagctttcttcacg

SEQ ID NO: 216 - DNA, 214 bp, Enterococcus faecalis
taaacgcaactttagtagcttctccgtttgaaggatcaatcaccattacattagaaacatgaattggcgcttccacttcaaggattccaccttgtggggctgcttggtttggtttttggtgttttttaacgacgttgacaccttcaacgataactttatcttgtttaggaaacgctgctaagacaacgccttctttgtttttatctttaccagt

SEQ ID NO: 217 - DNA, 298 bp, Enterococcus faecalis
caacggtgcaccacggtggatgatgtcgccttcagcaactttcatacgtgcagtgtaagggacagtataggtacgtgtatctgtttttcctttgatggttacttctttttgacgtgtggcaggatcttcagaaatatcgataacttcaccggttacttctgtaatcactgcttgtcctttcggattacgtgcttcaaagatttcttggatacgaggtaaaccttgagtgatatcgtcaccggcaaccccaccggtatggaacgtacgcatggttaactgtgtaccaggttccccgata

SEQ ID NO: 218 - DNA, 135 bp, Enterococcus faecalis; identical to SEQ ID NO: 173

SEQ ID NO: 219 - DNA, 155 bp, Enterococcus faecalis
gagtcacagataatgtttgcagtaagtcttcccagacattttttacattcattaaatgtgttctagtcgcttcgtttaggacttgatatacgcgttctgtgggtacgcggaacgaactttttggcgcttgtggtcgtgcttgttgacgtggcgca

SEQ ID NO: 220 - DNA, 181 bp, Enterococcus faecalis; identical to SEQ ID NO: 186

SEQ ID NO: 221 - DNA, 198 bp, Enterococcus faecalis; identical to SEQ ID NO: 172

SEQ ID NO: 222 - DNA, 258 bp, Enterococcus faecalis
gctgtatgaacgcggtgttggtccaaagactacgccacctccacgccattgtggtgaacggattgaaccttgacgagcacgaccagttcctttttgacgccatggtttgcggccaccgccacgaacagcgctacggtttttaactgcgtgtgttccttgtcttaatgaagcacgttgcatgatgattgcatcatagacaacactttcattaggttcgattccgaagatttcttcatttaaagtgatttcaccgttttg

SEQ ID NO: 223 - DNA, 422 bp, Enterococcus faecalis
aatggttcaacgacgaacttaccataatctctattttcatcaattttttcgattcttggtttttcaaattcaatcattcttatctatacccctttcaaaacgaaaagtgtcttgttcaatgacgttcctaattcaaactcagaatgagtggcgctcattaaacacgacggcgttttggagggcggcatccattatgaggaactggagtcacgtcacgaattgcagtcacttctaaacctgttgcttgtaatgaacgaattgctgcttcacgtccagaaccaggtcctttaactgttacgtctacagttttaagtccatgttccattgccactttagttgcggcttctgcagccatttgagcggcaaaaggagttgattttttgcttcctttaaagcctaatgatcctgctgatgaccatgct

SEQ ID NO: 224 - DNA, 460 bp, Enterococcus faecalis
cttcacgtaaacggaatccagcgatagattttttagcttttgtgataagtggtttttgaccagtgattaatgctaattcttcaacagctttgtctaagtttttagcatttgatactgcatcacccacacccatgttgataacgattttatcaactttaggtgtttgcataactgagctgtaattaaatttttccaccaatgatggtgttacttctttaatatatttttctttcaggcggttcattcagtaagccctccttccgcaatttttatttatctaaaacttcacctgtttttttagaaacgcggacttttttgccgtcgacttctttaaacgcaactttagtagcttctccgtttgaaggatcaatcaccattacattagaaacatgaattggcgcttccacttcaaggattccaccttgtggggctgcttggtttggtttttggtgttttttaa

SEQ ID NO: 225 - DNA, 266 bp, Enterococcus faecalis
aaaacaccatcgatttgaatattcgtaattgcagctcctggtaaagaagacaataaaatacgacgtagagagttacctaaagtagttccgtaaccgcgttctaatggttcaacgacgaacttaccataatctctattttcatcaattttttcgattcttggtttttcaaattcaatcattcttatctatacccctttcaaaacgaaaagtgtcttgttcaatgacgttcctaattcaaactcagaatgagtggcgctcattaaaca

SEQ ID NO: 226 - DNA, 198 bp, Enterococcus faecalis
acacatggtcaaaaaaattatttagtacgacgacgaacgataagtttgtctgatttagcttttttattacgtgttttgtatccaattgctggttgaccccatggagatactggcgctttacgtccaattggtgttttaccttcaccaccaccgtgtgggtgatcgttagggttcattacgctaccacgaacagttggg

SEQ ID NO: 227 - DNA, 405 bp, Enterococcus faecalis
tcacgaacttgtaataattgttttggatcaattgaaccttctgtcaacggtgcaccacggtggatgatgtcgccttcagcaactttcatacgtgcagtgtaagggacagtataggtacgtgtatctgtttttcctttgatggttacttctttttgacgtgtggcaggatcttcagaaatatcgataacttcaccggttacttctgtaatcactgcttgtcctttcggattacgtgcttcaaagatttcttggatacgaggtaaaccttgagtgatatcgtcaccggcaaccccaccggtatggaacgtacgcatggttaactgtgtaccaggttccccgatagattgagcggcgattgtaccaactgcttctccgacttcaacgtcagaaccagttgccaagtta

SEQ ID NO: 228 - DNA, 550 bp, Enterococcus faecalis
tcctttccctacacttatttagctttcacagctgatttgattgtgattaaagattttttcgctccaggaatgtttcctttgattaagataacatttctttctacgtccactttaacaacttcaaggttttgaattgttacgcggtcgccacccatacggccggctagtcgtttatttttaaatacacggttaggcgctactggacccattgacccaggacgacggtgataacgagaaccatgagacataggtccgcggctttggccgtgacgtttgattgccccttggaatcctttacctttcgtagtacctgtaacatcaacaacgtctcctgcttggaaaacatctactttgatttctttacctacttcatattctcctagctcaacattcttgaattctttaatgaagcgcttaggagccgtgtttgcttttgcaacatgacctttcgcaggtttgtttgataaaacttcacgtttgtcttggtaaccaacttggatagcttcgtatccgtcagtttcaacagtttttacttgtaaactacgtttgg

SEQ ID NO: 229 - DNA, 245 bp, Enterococcus faecalis
gtagtgttaccaataccataaatgtaagtaagagaaactactacacgtttgtcacgagggatgtctactcctgcaatacgagccattattcgttacacctcctaattatccttgacgttgtttatgttttggatttgctgggcaaataaccataacacgtcctttacggcgaattactttacaatgttcacacattggttttactgatggtcttactttcatgataatacctcctgtggttttac

SEQ ID NO: 230 - DNA, 334 bp, Enterococcus faecalis
caggtaaacctaattcactgatataacgggcacgacgtgaggctggcatttctggcaaactagcgcgaactttttcaatccattcatcatcaattgaaaaacgaggaacatctggctctgggaagtaacggtagtcacttgagccttctttaacacgcataagcaacgttgtactagttgcttcatcaaagcggcgtgtttcttgttgaatttcgccaccagataataggactttggcctggcgtttttcttcataagctaaacctttttttacaaagttcatagagttcaagttctttaattccgctttagtaccaaattcttcttgaccata

SEQ ID NO: 231 - DNA, 301 bp, Enterococcus faecalis
tgtttcttggaaggatgcagcagataagaagctgtttgtttccaatgacgctttggtaataccaagtaagactggacgactagtagcagggacgccaccagcaactaatgtgtcgtagttacggtctttaaattctgcgatgtccattaatgttcctggaaggatttcagtgtcacctggatccattacgcggattttacgtaacatttgacgaaccattacttcgatatgtttgtcgccgatttctaccccttgcatacggtaaacacgttgtacttcacgtaataggtagttttcaaca

SEQ ID NO: 232 - DNA, 260 bp, Enterococcus faecalis
tgacaccaacggaaatacggttatcaaatggttcacctgtacgtccatcgtaaagaactgttttagcatcgctagccataccagcttcacgaacagtttcccaaacgtcttcatcggttgccccatcgaaaacaggtgttgcgacgtgaatacctaattggcgagcagccatacctaagtgtaattcaagtacttgtccgatattcatacgagaaggtacccctaatgggttcaacatgatatcaacaggtgttccgtca

SEQ ID NO: 233 - DNA, 75 bp, Enterococcus faecalis
aaaatgtacgacacatggtcaaaaaaattatttagtacgacgacgaacgataagtttgtctgatttagctttttt

SEQ ID NO: 234 - DNA, 257 bp, Enterococcus faecalis
ttaacatcgaatgctgattcaacagcttgttttactaaagttttgtttgcgcgagtgtccacttcgaaagtatatttcttttcgtccatagctaacatggatttttcagtgatcactgggcgtttgattacgtctagtaattccattatgcaagcacctcctcaatttgagtaagagctgtttgtgttgccaagactttgttagctgacacaacatctaacacactaacgttatcagaagttactacagaaacgttt

SEQ ID NO: 235 - DNA, 198 bp, Enterococcus faecalis; identical to SEQ ID NO: 172

SEQ ID NO: 236 - DNA, 274 bp, Enterococcus faecalis
acctgatacttgagttttgattcctttagcgccagcacgcattgcgcgttggatggcttgtttttgagcacgacggaaagcaacacggttttctaattgacgtgcaattccttcgcctactaattttgcatctaaatctggttttttgatttcaacgatgttgatgtgaactcgtttgccagttaatttgtttaattcttttcttaggttttcgacttcagatccgcctttaccgataaccatacctggtttagctgtgtgaattgaaatgtta

SEQ ID NO: 237 - DNA, 244 bp, Enterococcus faecalis; identical to SEQ ID NO: 177

SEQ ID NO: 238 - DNA, 224 bp, Enterococcus faecalis
aatggtaataatcccatgatacgtgcgcgtttaatagcaatcgttaatttacgttggtttttagcgccagtacctgtaacacgacgtggtaaaattttgccacgttctgaaatgaatcgttttaacaattcagtatctttatagtcgatgtattcgatgtggtttgctgcgatatagtcgactttccgacgtttacgtccgcctcttctttgttgtgccattct

SEQ ID NO: 239 - DNA, 257 bp, Enterococcus faecalis; identical to SEQ ID NO: 234

SEQ ID NO: 240 - DNA, 582 bp, Enterococcus faecalis
tctttaatatatttttctttcaggcggttcattcagtaagccctccttccgcaatttttatttatctaaaacttcacctgtttttttagaaacgcggacttttttgccgtcgacttctttaaacgcaactttagtagcttctccgtttgaaggatcaatcaccattacattagaaacatgaattggcgcttccacttcaaggattccaccttgtggggctgcttggtttggtttttggtgttttttaacgacgttgacaccttcaacgataactttatcttgtttaggaaacgctgctaagacaacgccttctttgtttttatctttaccagtgataacttttactttatcgccttttttaacaaacattactgtttcgcacctcctttaacgtgggctcgagattataatacttctggtgctagagaaacgatcttcatgaagttgttttcacgtaattcacgtgcaactggtccgaagatacgtgttccgcgtgggcttttatcgtcacggataattaccgcagcattttcatcaaatttgatgtaagaaccgtcagcacgacgagcgccagattttgta

SEQ ID NO: 241 - DNA, 201 bp, Enterococcus faecalis
agctttgtcaacgcggtaagttactttaccagctttaacttcttcaacagcttttgtaacgtccattgttacagtaccagttttagggtttggcattaaaccttttggtcctaagacacggcctaatttaccaactgtagccatcatgtcaggagtcgcaacaactacgtcaaagtcgaaccatccaccttggatttttgc

SEQ ID NO: 242 - DNA, 269 bp, Enterococcus faecalis
tgtttgaggcataggaccatcagcagcagaaactactaagatagctccgtccatttgagcagcaccagtgatcatgtttttaacgtagtccgcgtgtcctgggcagtcaacgtgtgcatagtgacgagtttcagtttcatattcgatatgagaagtgttgattgtgattccacgttctttttcttctggagcgttatcgatagaatcgtagctttgtgcttccccgccaccgtgttttgataatacagtagcaattgcagctgttaatg

SEQ ID NO: 243 - DNA, 135 bp, Enterococcus faecalis; identical to SEQ ID NO: 173

SEQ ID NO: 244 - DNA, 244 bp, Enterococcus faecalis; identical to SEQ ID NO: 177

SEQ ID NO: 245 - DNA, 198 bp, Enterococcus faecalis; identical to SEQ ID NO: 171

SEQ ID NO: 246 - DNA, 153 bp, Enterococcus faecalis
tctaagtcaaagttgttttctgcgttagcaactgctgacattaaaactttttcaatgattccagcagacttgttcggtgtgaatttcaagattgaaattgcatccgcaacgcttttccctctgataagatcgattactaaacgtgctttacga

SEQ ID NO: 247 - DNA, 195 bp, Enterococcus faecalis
cggttaggcgctactggacccattgacccaggacgacggtgataacgagaaccatgagacataggtccgcggctttggccgtgacgtttgattgccccttggaatcctttacctttcgtagtacctgtaacatcaacaacgtctcctgcttggaaaacatctactttgatttctttacctacttcatattctcct

SEQ ID NO: 248 - DNA, 292 bp, Enterococcus faecalis
tcattcaaaacatctcctttcgtcaataaatgtttcatgtgaaacaaattatgcttctaccttcacgatcatatgacggataatatcgtcattgatttttgctaaacgatcaaactcgttgattgcgccagctgttgatggagaagtaacattaacgatatgatagatgccttcacggaatccgttcatttcatatgctaagcggcgtttttcccaatctttagattcgataacttctgctccgttatcttttaagattgtgtcgaaacgttctactaaagcagtttttgct

SEQ ID NO: 249 - DNA, 299 bp, Enterococcus faecalis
ttggatcaatataaaccatgaatggtgttcctccttctcctaaaattctagtccattttcacgagcagcttcagctaaagcttgcacgcggccatggtaaaggtatccaccacggtcgaagactacttttttgatgcctttttcagcggcacgttcagcaactagtttaccaacagctgcagctgtttctgtttttgttccacctgaaatttctttatccaaggcagaggcacttgctagcgtcacacccgctacgtcatcaatgacttgcgcgtagatgtttttgttagaacggaaaa

SEQ ID NO: 250 - DNA, 236 bp, Enterococcus faecalis
ttatctgataatacagatttcattgctaagcgacgaacttttttaggaagtttgtagctgtatgaacgcggtgttggtccaaagactacgccacctccacgccattgtggtgaacggattgaaccttgacgagcacgaccagttcctttttgacgccatggtttgcggccaccgccacgaacagcgctacggtttttaactgcgtgtgttccttgtcttaatgaagcacgttgcat

SEQ ID NO: 251 - DNA, 351 bp, Enterococcus faecalis
tattctacgtcgcggataaatccttcacgtttcaggatttctgcgatatcacgtttgatttttgaagcaggtacttctaaagtttcatgtttaaccatgttcgcattacgaatgcgagttagaaaatctgcaattggatctgtcatgaccattgaactatttacctcctttatgcgagtttacttgtttaccagctagctttcttcacgccgggaatttgacctttataggcaagttcgcggaagcaaatacggcaaagatgaaatttacgataaactgaatgtggacgtccacaacgttcacaacgagtataagcttgtgttgaatgtttagcaggacgtttgtttttag

SEQ ID NO: 252 - DNA, 181 bp, Enterococcus faecalis
tgtttccgtccatcatatacagcgattgtgaaacctacgaatgatggaaaaattgtagagcggcgagaccaagttttaattacttttttcttttcggcaccttgttgtgcttcgacctttttcatcaaatgatcatcgacgaaaggtcctttttttaaactacgacccatggtgaacctcc

SEQ ID NO: 253 - DNA, 137 bp, Enterococcus faecalis
cacctccacgccattgtggtgaacggattgaaccttgacgagcacgaccagttcctttttgacgccatggtttgcggccaccgccacgaacagcgctacggtttttaactgcgtgtgttccttgtcttaatgaagca

SEQ ID NO: 254 - DNA, 340 bp, Enterococcus faecalis
taacatttgacgaaccattacttcgatatgtttgtcgccgatttctaccccttgcatacggtaaacacgttgtacttcacgtaataggtagttttcaacagataaaacatcacgaacttgtaataattgttttggatcaattgaaccttctgtcaacggtgcaccacggtggatgatgtcgccttcagcaactttcatacgtgcagtgtaagggacagtataggtacgtgtatctgtttttcctttgatggttacttctttttgacgtgtggcaggatcttcagaaatatcgataacttcaccggttacttctgtaatcactgcttgtcctttcggatta

SEQ ID NO: 255 - DNA, 199 bp, Enterococcus faecalis
agctttagcttctttcaagcctaagccagttgcttcacgaactgctttgataactttaactttttgatcgccagctgctgttaattcaacagtgaattcagtttgttcttctgctgctccacctgctgctggtccagctactgctacaggagctgctgctgatacgtcaaatttttcttcgatagctttaactaattcg

SEQ ID NO: 256 - DNA, 216 bp, Enterococcus faecalis
taattccattatgcaagcacctcctcaatttgagtaagagctgtttgtgttgccaagactttgttagctgacacaacatctaacacactaacgttatcagaagttactacagaaacgtttggtaagttacgagctgataaagctgcaaagtcgttaccattttctaaaacaactaatactttagtatcgatagacaagttagcaagaacttgtttg

SEQ ID NO: 257 - DNA, 342 bp, Enterococcus faecalis
tgtccgcttcttcccatgcgtaatcaatgtccgcacgtaatgtgtgaagtggtacagttccttcagagtatccttctgaacgagcgatatccgcaccgtttagacgacctgatacttgagttttgattcctttagcgccagcacgcattgcgcgttggatggcttgtttttgagcacgacggaaagcaacacggttttctaattgacgtgcaattccttcgcctactaattttgcatctaaatctggttttttgatttcaacgatgttgatgtgaactcgtttgccagttaatttgtttaattcttttcttaggttttcgacttcagatccgcctttaccga

SEQ ID NO: 258 - DNA, 615 bp, Enterococcus faecalis
tgtttcttggaaggatgcagcagataagaagctgtttgtttccaatgacgctttggtaataccaagtaagactggacgactagtagcagggacgccaccagcaactaatgtgtcgtagttacggtctttaaattctgcgatgtccattaatgttcctggaaggatttcagtgtcacctggatccattacgcggattttacgtaacatttgacgaaccattacttcgatatgtttgtcgccgatttctaccccttgcatacggtaaacacgttgtacttcacgtaataggtagttttcaacagataaaacatcacgaacttgtaataattgttttggatcaattgaaccttctgtcaacggtgcaccacggtggatgatgtcgccttcagcaactttcatacgtgcagtgtaagggacagtataggtacgtgtatctgtttttcctttgatggttacttctttttgacgtgtggcaggatcttcagaaatatcgataacttcaccggttacttctgtaatcactgcttgtcctttcggattacgtgcttcaaagatttcttggatacgaggtaaaccttgagtgatatcgtcaccggcaaccccaccggtatggaa

SEQ ID NO: 259 - DNA, 312 bp, Enterococcus faecalis
tggtgctaagatgtatgccttaaccccgtcttcgtaatgaactaacgcgatgttagcagaacggtttggatcgtactcgatcgttttaacaaccgctgcgacgttatctttattacgtttgaagtcaatcacacggtattgacgtttgtgaccgccaccttggtgacgaaccgtaatgcgaccgttgttgttacgaccggcattgttttttaatggctgtaacaatgatttttctggtgttgaagttgtgatttcagcgaaatcagaacttgtcatgttacgacggccatttgtggtaggtttgtacttttt

SEQ ID NO: 260 - DNA, 309 bp, Enterococcus faecalis
tacttcaactttcacttgtttaccaccagttttgataattgcgtacatgctatacagcacctccttcttctagacttagactcgccatcccaagtgatgattgctcatgcttaaaaacttgttctgtgcggttgtagctgtggagaccacaattacaacactaactataataacagaaccagaaaacctcgtcaatataaactctctattttcttcactttctctctccaaaaaaacttcttctgttatttaaatttccgattgactttctaacactacttccattataattagctttgttgtgttaca

SEQ ID NO: 261 - DNA, 163 bp, Enterococcus faecalis
cataggaccatcagcagcagaaactactaagatagctccgtccatttgagcagcaccagtgatcatgtttttaacgtagtccgcgtgtcctgggcagtcaacgtgtgcatagtgacgagtttcagtttcatattcgatatgagaagtgttgattgtgattcca

SEQ ID NO: 262 - DNA, 329 bp, Enterococcus faecalis
cattcttgttccctcctatcaaattcgtttagaatggtaaatcatcatctgaaatgtcgatagatgaacctgagccaccaaatggatcagaatctttatcgaaatcaggcataccgttattgttttgcgactgagaagatgatggattgaaactattgttgttgttattaaatccagaaccggcattgttattaccaaagctacgattttgtgattgataaccattttcgttgttattaaagctaccgccgccagttcctctttgttctgaagcagaacgagattctaacaattggaagttttcacaaaccacttcagttacgtagaca

SEQ ID NO: 263 - DNA, 245 bp, Enterococcus faecalis; identical to SEQ ID NO: 8

SEQ ID NO: 264 - DNA, 273 bp, Enterococcus faecalis
accaagttattttcagcaactttatctgataatacagatttcattgctaagcgacgaacttttttaggaagtttgtagctgtatgaacgcggtgttggtccaaagactacgccacctccacgccattgtggtgaacggattgaaccttgacgagcacgaccagttcctttttgacgccatggtttgcggccaccgccacgaacagcgctacggtttttaactgcgtgtgttccttgtcttaatgaagcacgttgcatgatgattgcatcatag

SEQ ID NO: 265 - DNA, 309 bp, Enterococcus faecalis
tcacacggtattgacgtttgtgaccgccaccttggtgacgaaccgtaatgcgaccgttgttgttacgaccggcattgttttttaatggctgtaacaatgatttttctggtgttgaagttgtgatttcagcgaaatcagaacttgtcatgttacgacggccatttgtggtaggtttgtactttttaatcgccacgtcttatttccctcctacgttgatattgttcaggactgcttattcagcagcttcgaataattgaatttcttttgaatcttcagttaatgtaacgatcgctttgcgacgtttttttg

SEQ ID NO: 266 - DNA, 94 bp, Enterococcus faecalis
  misc_feature (1)...(94): n = A,T,C or G
tacctaaacctancgctttanctgtancacgttggttttgaggacgtccgataacactgcgttttaaagtaatttttaattcagccattatttt

SEQ ID NO: 267 - DNA, 221 bp, Enterococcus faecalis
  misc_feature (1)...(221): n = A,T,C or G
tctaacctccttcacttatganttattttttcttgcctgctactgttttagtagggcctttacgagtacagtgcattatttttcgtgttttgtccacgagttggtaatccacgacggtgacggattccacggtatgaaccgatttccatcaagcgtttgatgtttaagttcacttcacgacgaagatccccttcaacttttaacttatcaatttccgcacg

SEQ ID NO: 268 - DNA, 264 bp, Enterococcus faecalis
  misc_feature (1)...(264): n = A,T,C or G
gaaacatgaattggcagcttccacttcaaggattccaccttgtggggctgcttggtttggtttttggtgttttttaacgacgttgacacctttcaacgataacntttatcttgtttaggaaacgctgctaagacaacgccttctttgtttttatctttaccagtgataacttttactttatcgccttttttaacaaacattactgtttcgcacctcctttaacgtgggctcgagattataatacttctggtgctagagaaacga

SEQ ID NO: 269 - DNA, 288 bp, Enterococcus faecalis
  misc_feature (1)...(288): n = A,T,C or G
cggttttcagctaaattctggacaccaagctgaacaagctctgctgcttcctcaattcctactgatttagtgacgccaatcattgtcacatcagcaacagancgctgtgagcttttgcatgctagctgaagttgattattaatatttgttaagttttcagctatcatttctaatcgatgctccttatcgttttctgcggaaaaatggtggcgtacttaattcgtcatcattgtgatttggttcttcacggtggaatgtgtcaaattcttttttgtctacttgttctaa

SEQ ID NO: 270 - DNA, 258 bp, Enterococcus faecalis
tgcttgcagcgatttgaatttcttgtccagtttgtgggttacagtcctttacgagctgcgcgttcgcagaacttcaaagttaccaaaaccgattaattgaactttttcacctttagcaagagtttcttgaattgttgaaaagacagcgtctactgctgcagtagcatcttttttagttaaaccagttgaagatgcaacgttttcgattaattctgctttatttgccatggatcatttcacctcctctataagagatac

SEQ ID NO: 271 - DNA, 225 bp, Enterococcus faecalis
  misc_feature (1)...(225): n = A,T,C or G
gcatcgtctaagcgagttgcttctgcatcagtatcttctacggaagttttgttgaaagacaagtcaggttgaactagcaggtaagctttancaacagcaacgccatcacttgcggcaatcccttttagcatctcagacattattcagccaatccttctttttgtaatgtttcaacgattgctgccattccttcagcttcgtcagcaccatcaacagtgattgtta

SEQ ID NO: 272 - DNA, 362 bp, Enterococcus faecalis
cacctgaacctttttcgatttttgcagcttttttcaataatactgcagcaggtggtgttttagtaatgaatgtaaatgaacgatcttcatatacagagattactactggaataatcaagcctgcttggtcagctgtacgagcattgaattctttagtgaatcccatgatgttgatacctgcttgacctaacgctggacctactggtggagctggtgttgctttccccgcaggaatttgtaatttaacgattttttctacttttttagccacgaaaatacctccttaagttctcgtgcgtggttaatggggttgagatttcccctcccactcaacgtacatttaaaacataccctattactat

SEQ ID NO: 273 - DNA, 468 bp, Enterococcus faecalis
  misc_feature (1)...(468): n = A,T,C or G
cctgtgccgctatattgtacttgtgccaatgaatttccctccttaaattaagttcgtgatatctaataccttctggttgttgtgcagcatgtggatgctcagctccaccgtatacgttcaatttagtaaattgtttacgtcctaaagtgtttttaggtagcataccttttacagaagtttcgataagacggcgagagtttttgtcgcgtaattcaccagctgtcactgattttaatcctccaggatacattgagtgacggtagtaaattttgtctgtagcttttttacctgttaattttaccttatcagcgttaattacgattacgaaatctccagtatccacatgtggtgngaatgntggtttatttttaccacgtagtacagaagcaacaactgctgatagacgtcctaaaggaacatctgttgcatctactncgtaccatttacgttctacttcgccagctttgg

SEQ ID NO: 274 - DNA, 294 bp, Enterococcus faecalis
  misc_feature (1)...(294): n = A,T,C or G
cgatagacaagttagcaagancttgtttgaattcttttgtttttggtgcatcgaancttaaaccttctactgctaccaagttattttcagcaacctttatctgataatacagatttcattgctaagcgacgaacttttttaggaagtttgtagctgtatgaacgcggtgttggtccaaagactacgccacctccacgccattgtggtgaacggattgaaccttgacgagcacgaccagttcctttttgacgccatggtttgcggccaccgccacgaacagcgctacggttttta

SEQ ID NO: 275 - DNA, 284 bp, Enterococcus faecalis
  misc_feature (1)...(284): n = A,T,C or G
cgaataattgaatttcttttgaatcttcagttaatgtaacagatcgctttgcgacgtttttttgtataacctgcatatttacccatgcgtttgaattttggacgcacgtttaagatgtttacgtttgctactttaacatcgaatgctgattcaacagcttgttttactaaagttttgtttgcgcgagtgtccacttcgaaagtatatttcttttcgtncatagctaacatggatttttcagtgatcactgggcgtttgattacgtctagtaattccattatgca

SEQ ID NO: 276 - DNA, 225 bp, Enterococcus faecalis
  misc_feature (1)...(225): n = A,T,C or G
gcatcgtctaancgagttgcttctgcatcagtatcttctacggaagttttgttgaaagacaagtcaggttgaactagcaggtaagctttancaacagcaacgccatcacttgcggcaatcccttttagcatctcagacattattcagccaatccttctttttgtaatgtttcaacgattgctgccattccttcagcttcgtcagcaccatcaacagtgattgtta

SEQ ID NO: 277 - DNA, 123 bp, Enterococcus faecalis
aaatgaaactttaccgattggtacagtggatgttaccagctttgtcaacgcggtaagttactttaccagctttaacttcttcaacagcttttgtaacgtccattgttacagtaccagttttag

SEQ ID NO: 278 - DNA, 317 bp, Enterococcus faecalis
  misc_feature (1)...(317): n = A,T,C or G
canatttcattgctaagcgacgaacttttttaggaagtttgtagctgtatgaacgcggtgttggtccaaagactacgccacctccacgccattgtggtgaacggattgaaccttgacgagcacgaccagttcctttttgacgccatggtttgcggccaccgccacgaacagcgctacggtttttaactgcgtgtgttccttgtcttaatgaagcacgttgcatgatgattgcatcatagacaacactttcattaggttcgattccgaagatttcttcatttaaagtgatttcaccgttttgagttccatcttgtttg

SEQ ID NO: 279 - DNA, 237 bp, Enterococcus faecalis
caactaagtttttcttcgcgtcttcgattgctttacggatagcttcaggtacttcttgtgctttaccagtaccgaaaccaacgtgtccagtttttgtcaccgacaacaactaaagctgcgaaacgtaaacgacgtccacctttaacaacttttgttacacggttgatcgctacaacgcggtcttctaattccaaatgttttggatcaatataaaccatgaatggtgttcctccttct

SEQ ID NO: 280 - DNA, 222 bp, Enterococcus faecalis
  misc_feature (1)...(222): n = A,T,C or G
cctgtgccgctatattgtacttgtgccaatgaatttccctccttaaattaagttcgtgatatctaatacttctggttgttgtgcagcatgtggatgctcanctccaccgtatacgttcaatttagtaaattgtttacgtcctaaagtgtttttaggtagcataccttttacagaagtttcgataagacggcgagagtttttgtcgcgtaatttcaccagctg

SEQ ID NO: 281 - DNA, 468 bp, Enterococcus faecalis
cctgtgccgctatattgtacttgtgccaatgaatttccctccttaaattaagttcgtgatatctaatacttctggttgttgtgcagcatgtggatgctcagctccaccgtatacgttcaatttagtaaattgtttacgtcctaaagtgtttttaggtagcataccttttacagaagtttcgataagacggcgagagtttttgtcgcgtaattcaccagctgtcactgattttaatcctccaggatacattgagtgacggtagtaaattttgtctgtagcttttttacctgttaattttactttatcagcgttaattacgattacgaaatctccagtatccacatgtggtgtgaatgttggtttatttttaccacgtagtacagaagcaacaactgctgatagacgtcctaaaggaacatctgttgcatctactacgtaccattttacgttctacttcgccagctttgg

SEQ ID NO: 282 - DNA, 120 bp, Enterococcus faecalis
ttcttcacgaatagatgacatttcttcatctaataaataggctgcctctgccgctcgctgaaggcgttctttcatttcttcaggaaagacaccttgatatttataattcaaagaatgttc

SEQ ID NO: 283 - DNA, 150 bp, Enterococcus faecalis
  misc_feature (1)...(150): n = A,T,C or G
cactaacgttatcagangttactacaganacgtttggtaagttacgagctgataaagctgcaaagtcgttaccattttctaaaacaactaatactttagtatcgatagacaagttagcaagaacttgtttgaattcttttgtttttggtg

SEQ ID NO: 284 - DNA, 264 bp, Enterococcus faecalis
gccaacaatttcgccgtatatagttgcgccacgtttctgtgcatgctcgagttcttctaaaaccagcattcctgcgccttcacccatcacaaaaccttttcgttctttatcaaaaggaatcgaagcccgagtcgcatcttctgttgtatttaaagcattcaatgctgcaaagcctgcaatcccaatttcacatactgtggcttctgtcccaccagttaccatcatgtccgctaaaccatatttaatcgtgcgaaaagcttcacc

SEQ ID NO: 285 - DNA, 251 bp, Enterococcus faecalis
  misc_feature (1)...(251): n = A,T,C or G
tgcttttccgtgtaatgcgcagtaagtagtaaagttttgcacgacgtactttaccagtatcgaaccanttcaatttgagcaacacagtggtgtgtgtaatgggaatgtacgttccacaccaacaccatttgaaactttacgtactgtgtaagtttcgctgattccagcaccacggcgtttaattacaacaccttcgaataactggatacgttcacgagtaccttcgactactttcgcatgaacgcgaacag

SEQ ID NO: 286 - DNA, 468 bp, Enterococcus faecalis
cctgtgccgctatattgtacttgtgccaatgaatttccctccttaaattaagttcgtgatatctaataccttctggttgttgtgcagcatgtggatgctcagctccaccgtatacgttcaatttagtaaattgtttacgtcctaaagtgtttttaggtagcataccttttacagaagtttcgataagacggcgagagtttttgtcgcgtaattcaccagctgtcactgattttaatcctccaggatacattgagtgacggtagtaaattttgtctgtagcttttttacctgttaattttactttatcagcgttaattacgattacgaaatctccagtatccacatgtggtgtgaatgttggtttatttttaccacgtagtacagaagcaacaactgctgatagacgtcctaaaggaacatctgttgcatctactacgtaccatttacgttctacttcgccagctttgg

SEQ ID NO: 287 - DNA, 310 bp, Enterococcus faecalis
  misc_feature (1)...(310): n = A,T,C or G
tacctaaagtagttccgtanccgcgttctaatggttcancgacgaacttaccatantctctattttcatcaattttttcgattcttggtttttcaaattcaatcattcttatctatacccctttcaaaacgaaaagtgtcttgttcaatgacgttcctaattcaaactcagaatgagtggcgctcattaaacacgacggcgttttggagggcggcatccattatgaggaactggagtcacgtcacgaattgcagtcacttctaaacctgttgcttgtaatgaacgaattgctgcttcacgtccagaacca

SEQ ID NO: 288 - DNA, 250 bp, Enterococcus faecalis
tgcttttccgtgtaatgcgcagtaagtagtaaagttttgcacgacgtactttaccgtatcgaaccaccttcaatttgagcaacacgtggtgtgtgtaatgggaatgtacgttccacaccaacaccatttgaaactttacgtactgtgtaagtttcgctgattccagcaccacggcgtttaattacaacaccttcgaataactggatacgttcacgagtaccttcgactactttcgcatgaacgcgaacag

SEQ ID NO: 289 - DNA, 525 bp, Enterococcus faecalis
gtctaagccaccagtaatgtttaataagacttgttccgcaccatcgattgatgtttctaacaatggtgaagaaatagccttttttcgttgcttcaattacacagttcttcgccgctcgctacaccaattcccattaaagctgttccttggttttccatcactgttttcacgtcagcaaagtccaagtttacgtaacctggtgcagtgattaaatctgaaattccttgaacaccttgacgtaatacattatcagcttctctaaatgcttcaagcattggcgttttcttgtcaacgacttctaataagcggttgtttgagataattagtagtgtatcaacgttttcttttaataaggcaattccttcagcggcaaaacgaccacgttttggaccttcaaaactaaatggacgagttactacaccaactgttaaagcgcctaattctttagcgatttttgcaactactggggcagcacctgtaccagttccgccacccataccagcagtaatgaaaatcatatccgcg

SEQ ID NO: 290 - DNA, 156 bp, Enterococcus faecalis
  misc_feature (1)...(156): n = A,T,C or G
ggtgganctggtgttgctttccccgcaggaatttgtaatttaacgattttttctacttttttagccacgaaaatacctccttaagttctcgtgcgtggttaatggggttgagatttcccctcccactcaacgtacatttaaaacataccctattac

SEQ ID NO: 291 - DNA, 483 bp, Enterococcus faecalis
  misc_feature (1)...(483): n = A,T,C or G
ccggcagtatcaagcgcaccangaacgatatggtaacagtacccctggtaagtcttttacacagtccaccacgtaataataccacgcctgtgttcttgtaagttgtgaccgatacctgggatataagctgtaacttcgattaagtttgacaaacgaacacgggcatatttacgtaaagctgagttcggttttttaggtgtcatcgtacccacacgtgtacaaactccacgtttttgcggagagttaacgtttgtttgagttttcttaaaactgttatatcctttgtttaaggctggtgaatcagatttttctactttagatttacgaggtttacgtactaattggttaattgtaggcattccttgttctcctccttccttacttcgcttctagttccacacatccaggtggttcttttttcgcgataaaaaataatgcaatctctgcactctttatcaaatatgctttgatagacagtcagca

SEQ ID NO: 292 - DNA, 206 bp, Enterococcus faecalis
  misc_feature (1)...(206): n = A,T,C or G
ccctanccatttgcctggtgtttcttctaagacggctaaaaggtcttttcctgttatggccaattcatgtctttgatggatgggtaatgccttaactaactcttttgttacttgtacttgactctcttgttggtaataatataaaagcctttcaacaagtactgctgattcttcgcctaattcataaagcatcattggctgccagt

SEQ ID NO: 293 - DNA, 82 bp, Enterococcus faecalis
  misc_feature (1)...(82): n = A,T,C or G
gctcgattcacgtgaganttcccattcatgttcaatttgaaataanggtttcattgctttctttgtcgctgcttcatccaag

SEQ ID NO: 294 - DNA, 158 bp, Enterococcus faecalis
  misc_feature (1)...(158): n = A,T,C or G
tacagaagtttcgataagacggcgagagtttttgtcgcgtanttcaccagctgtcactgattttaatcctccaggatacattgagtgacaggtagtaaattttgtctgtagcttttttacctgttaattttactttatcagcgttaattacgattacg

SEQ ID NO: 295 - DNA, 214 bp, Enterococcus faecalis
atcgctttgcgacgtttttttgtataacctgcatatttacccatgcagtttgaattttggacgcacgtttaagatgtttacgtttgcctacctttaacatcgaatgctgattcaacagccttgttttactaaagtttggtttgcgcgagtgtccacttcgaaagtatatttcttttcgtccatagctaacatggatttttcagtgatcactggg

SEQ ID NO: 296 - DNA, 568 bp, Enterococcus faecalis
  misc_feature (1)...(568): n = A,T,C or G
ccanctgttttaccattaccagatgaagtaccacagtccaacacaggttacgtacttggcagtgagccctcagcaggttttaattcatgaagtttcataggtttggcacctccttaagcaatcttctattacaaatctataaatcttaaacttcttctacgtccactaaatgtgaaatagtgttaaccatacctttgattgcttcattggcaggttttgtaacagtactattcactttacctaaacctaacgctttaactgtagcacgttggttttgaggacgtccgataacactgcgttttaaagtaatttttaattcagccattatttttgtcctccttaaccgataatttcttctacagatttaccgcgaagtgctgccacttcttcggcacgttttaattgttttagaccttcaacagtttgcgcgaacaacgttaataggtgtgtttgaacctagtgattttagatgtaatatctgctacaccagctnattccaatacggcacgaactggtccacccnncagctaccccananccttctactgcangtttcatatggataccg

SEQ ID NO: 297 - DNA, 380 bp, Enterococcus faecalis
gacattaaaactttttcaatgattccagcagacttgttcggtgtgaatttcaagattgaaattgcatccgcaacgcttttccctctgataagatcgattactaaacgtgctttacgaggtgaagtgcgaactgtttttgcagttgctttagctgatgtaatttgttctgacatttgcatatcctcccctcaaaattagcgtttagtttttttatcgtcagcaacgtggccacgataagttctagttggtgcaaattcacctaatttatgtcctaccatgtcttcttgaatgtaaacagggacatgtttccgtccatcatatacagcgattgtgaaacctacgaatgatggaaaaattgtagagcggcgagaccaagtttt

SEQ ID NO: 298 - DNA, 276 bp, Enterococcus faecalis
tcacgaatagagaaacgagttccgtcttcgatagcgattgggtgaattaattcaacgtccatagcaacagttatcaccaggcattaccatttcagtaccttctggcaattctacaacaccagtaacgtctgttgtacggaagtagaattgaggacggtagttagtgaagaatggagtgtgacgtccgccttcttcttttgataatacgtatacttcagctttgaattttgtgtgtggagtgattgtagctggtttagctaatacttgtccacgttc

SEQ ID NO: 299 - DNA, 287 bp, Enterococcus faecalis
tgcacgaggacggaaacgtttcattgttggtccttcgttaacaaatgcttcagatacgactaagctttcaacgtctaagtcaaagttgttttctgcgttagcaactgctgacattaaaactttttcaatgattccagcagacttgttcggtgtgaatttcaagattgaaattgcatccgcaacgcttttccctctgataagatcgattactaaacgtgctttacgaggtgaagtgcgaactgtttttgcagttgctttagctgatgtaatttgttctgacatttgca

SEQ ID NO: 300 - DNA, 176 bp, Enterococcus faecalis
tcgttaaagtcaagaccattgcgtcgtattcaggtaaacctaattcactgatataacgggcacgacgtgaggctggcatttctggcaaactagcgcgaactttttcaatccattcatcatcaattgaaaaacgaggaacatctggctctgggaagtaacggtagtcacttgagcct

SEQ ID NO: 301 - DNA, 236 bp, Enterococcus faecalis
  misc_feature (1)...(236): n = A,T,C or G
ggcatangaccatcagcagcaganactactaagatagctccgtccatttgagcagcaccagtgatcatgtttttaacgtagtccgcgtgtcctgggcagtcaacagtgtgcatagtgacgagtttcagtttcatattcgatatgagaagtgttgattgtgattccacgttctttttcttctggagcgttatcgatagaatcgtagctttgtgcttccccgccaccgtgttttgata

SEQ ID NO: 302 - DNA, 133 bp, Enterococcus faecalis
  misc_feature (1)...(133): n = A,T,C or G
ccaagantgcaggccttgttcttgtaaaaaggctacagtatttttttaaatctcgttcgtaactccgccgtgtgttatttgataagccccgctctatttgtaaatagtgtaaataatcgactaattgttcttc

SEQ ID NO: 303 - DNA, 262 bp, Enterococcus faecalis
gaaacatgaattggcgcttccacttcaaggattccaccttgtggggctgcttggtttggtttttggtgttttttaacgacgttgacaccttcaacgataacttttatcttgtttaggaaacgctgctaagacaacgccttctttgtttttatctttaccagtgataacttttactttatcgccttttttaacaaacattactgtttcgcacctcctttaacgtgggctcgagattataatacttctggtgctagagaaacga

SEQ ID NO: 304 - DNA, 237 bp, Enterococcus faecalis
cccctttcagattttgtgcttcaatctattaggaaattctcgttttattagataataacctgcttcttcgactacctctagtaaacaggaaacgttttgtagcctgataatggacgagtttccatgatttttacgatgtctccaactttcgctgtgttgttttcatcatgcgctttatattttttagaatatttcatacgtttgccatagatagggtggtttttctttgtttcaacg

SEQ ID NO: 305 - DNA, 202 bp, Enterococcus faecalis
ccagctgctgttaattcaacagtgaattcagtttgttcttctgctgctccacctgctgctggtccagctactgctacaggagctgctgctgatacgtcaaatttttcttcgatagctttaactaattcgcttagttctaagatagttgctgtttctaactcagcaacgatgttttcaatgtttaatgccattttgaatttcc

SEQ ID NO: 306 - DNA, 97 bp, Enterococcus faecalis
  misc_feature (1)...(97): n = A,T,C or G
ccattatgcaagcacctcctcaatttgagtaaganctgtttgtgttgccaagactttgttagcctgacacaacatctaacacacctaacgttatcag

SEQ ID NO: 307 - DNA, 184 bp, Enterococcus faecalis
ggtgatacccagccttctggtgcccctttacctttacccatacgtacgccgatagcctttacttgtgtaagacttgtgagggaaaattttaatccatactttcccgccacgtttcatgtaacgagtcattgcaatacgggctgcttcgatttgacggttagtaatccagtgagattcagttgct

SEQ ID NO: 308 - DNA, 137 bp, Enterococcus faecalis
gaaccttcttccattttcacatcagaaacttctgtaaattggataattgaacgcaacgccttctaaataagcatacagccttcttctggtgaacagcatgtctgccttcagaaacgatttcaattaaaggcgtgcct

SEQ ID NO: 309 - DNA, 211 bp, Enterococcus faecalis
tttaccaccagactgacgaacgaatttaccttctgctttagtcgcagcacggaatgtttcgcggtaagataccttgaggagcacctacgttagcttcaactttgaattcacgtttcatacttttttactaaaacgtctaattgcaattcacccataccagagataacttgtttcaccagtttcaacgtttgtttcaacgcggaatgatgga

SEQ ID NO: 310 - DNA, 122 bp, Enterococcus faecalis
tcctttatgcgagtttacttgtttaccagctagctttcttcacgccgggaatttgacctttataggcaagttcgcggaagcaaatacggcaaagatgaaatttacgataaactgaatgtgga

SEQ ID NO: 311 - DNA, 110 bp, Enterococcus faecalis
tatgcaagacaaaaaaagctgaatccggagattcagctttttaatcgtattagttagctacctggataaactgatacttgttttttgtcgcggcctttacgttcgaaacg

SEQ ID NO: 312 - DNA, 81 bp, Enterococcus faecalis
tgcaagcacctcctcaatttgagtaagagctgtttgtgttgccaagactttgttagctgacacaacatctaacacactaac

SEQ ID NO: 313 - DNA, 69 bp, Enterococcus faecalis
tcctaagacacaggcctaatttaccaactgtagccatcatgtcaggagtcgcaacaactacgtcaaagt

SEQ ID NO: 314 - DNA, 320 bp, Enterococcus faecalis
cgtccgcttcacgtgataatgttgagccagcaacatttgttaatgtaagtgatggatgccctaattcattaacctgtaccagtaccttggcagacctatctgccgtttcaccactttgacttaagaaaatgaagaacggtttttcagataaaataggcatgttgtagccaaattcgcttgataaatgaacttccacaggaatacctggcaatcgtttcaattaaagattttccgacccaacctgcattataacttgtcccacaagcaataatgtaaattcggttacattgattaattttttccagtaacgcctcatctaa

SEQ ID NO: 315 - DNA, 113 bp, Enterococcus faecalis
gtttgggataacgaggcaacctgttgtttaggcccttcaaaaagtccttcttttcctagtttttctcttaattctgccaatgcttgataaagtgcacctacaccatctggttc

SEQ ID NO: 316 - DNA, 288 bp, Enterococcus faecalis
cacatgggcttcgccaatcattgtgatggcagcaacttctggctgagccagattggaaaggaaagaaatttcctgagcatgatccatgcccatttctaaaatcagtttttctgtttcatcaggcatgtgtaaaatagtatagggtaagccaatttgattattgtaattgccttgcgttttgtaagtcacaaacttttcagataaaacagcagcaattaaatctttagtggtagtttttccattactgccagtcacagcgatgacattcggttgcattttatttaaata

SEQ ID NO: 317 - DNA, 150 bp, Enterococcus faecalis
taaaaatagtttttacggtcaaaatgagtttcttttgaaatttcacagttcaacgcaagagcctgctttcatcccaaattctaaagcacctttattcataaccggtaaaacacctgggtaactccagtcaaccacatttgtgttgctgtt

SEQ ID NO: 318 - DNA, 173 bp, Enterococcus faecalis
actgctgatagacgtcctaaaggaacatctgttgcatctactacgtaccatttacagttctacttcgccagcctttggccatatatgttgtacagcacagtttctttcctccaattttgttttcgatgtttgacatacaccttgagtttccggggctcattgtggggcaaaca

SEQ ID NO: 319 - DNA, 195 bp, Enterococcus faecalis
  misc_feature (1)...(195): n = A,T,C or G
taagtcagctaacattttgcggttgatatcaatctctgccaatttcaaaccgtgcattantttanaatagcttaagccattcatgcngagcctgccgcgttgatacngtgcaatccataatttacggaagtcacgtttcttttgacgacggtctctgaatgcatagtaataagagttcattacttgttcttttgc

SEQ ID NO: 320 - DNA, 99 bp, Enterococcus faecalis
acgatgacggtgacgttcttggacaacatcttcatttccgtatgctgccgcagttttcgttccttttttcaatttacatggatataaacctaaacgtag

SEQ ID NO: 321 - DNA, 103 bp, Enterococcus faecalis
acggccacaaagtgttggtaatttttcatctgagccgacatcttgacgaacggaacgacaacggtcacacgtttcgccttctgctttttcaactaaaatagcc

SEQ ID NO: 322 - DNA, 292 bp, Enterococcus faecalis
aactttggttgcatcttttccagaaaaagcaccagccgccatgacgagcataaccagccataagtatcaacgataattttacgaccagttaagccggcatctccttgagggccaccgattacaaagcgaccagttgggttgataaagtattttgtttcatcatctaaaagttcatgagggatcacctcattgattacttgttctttaatgtctttttcgatttgttctaaggttgtttcatcatcatgttgtgtactgatgacaatcgtatccacacgttgtggttgacctt

SEQ ID NO: 323 - DNA, 238 bp, Enterococcus faecalis
ttcattttgatatcagaagaaaattcgcagtgttaattcacctttaggtcctttaactgtaatgttgtttccgtcttgcttgatttcaacaccagcaggaagaacaacaactttattaccaatacggctcacttagagacacctccttgtgtattttttagaattaccatacgtaggcgattacttcgccgccgatatttttcgctctagcttctttgtcagtaattacaccctctga

SEQ ID NO: 324 - DNA, 211 bp, Enterococcus faecalis
ctgcgctgacaccacttttagctagtcctaaaaccaacacttttttgttttgataggttgttatttttttcattgtcaatttcccctttgatagattagaaaagaatccataatgtgattcctgaacagattaaaccgacagaccaaaagacaaaatcaattttccattcagaccaaccacacatttcaaaatggtgatgaattggtgaca

SEQ ID NO: 325 - DNA, 263 bp, Enterococcus faecalis
taataacaagaattccatttaaactctccttgttccatacaaaagtgagcctgacaggaagccttaaagtggtgccaaattgagaggacccacttgccgctcctccagtaatttccactggggctatcgtatctatttttttcaacaactcatcatttaacagcacctttttatttactcgttcctgttcaattttatttttctttttctcctgttttgtttgttgctccttgtcctgtctcgaggcaataattgatctttct

SEQ ID NO: 326 - DNA, 129 bp, Enterococcus faecalis
gtgaaacgttttgaattaattgatttgaaagtttccaagcctttaagaaggagcagaatttctgcttctggtaaattcaacgattgaataagtaacagtccacgcttctgcttctgtttcaatttgacg

SEQ ID NO: 327 - DNA, 139 bp, Enterococcus faecalis
gggatgctgcccagtcgtccgtttaacccctgttgaacctttggctaagcagatcaatttcagcaccacgcaaatgtaaattatgatctctttcatatcctttaacaaagccatacgctgttttgtcggctactgtacc

SEQ ID NO: 328 - DNA, 279 bp, Enterococcus faecalis
tcagcaatcagttcccctaaccatttgcctggtgtttcttctaagacggctaaaaggtcttttcctgttatggccaattcatgtctttgatggatgggtaatgccttaactaactcttttgttacttgtacttgactctcttgttggtaataatataaaagcctttcaacaagtactgctgattcttcgcctaattcataaagcatcattggctgccagtcgttactcaagcgaaaacgcaaaccgcgtactaattgtgaaacgttttgaattaattga

SEQ ID NO: 329 - DNA, 245 bp, Enterococcus faecalis
tcttgtgcttcaaacaaggtcatgtctaagccaccagtaatgtttaataagacttgttccgcaccatcgattgatgtttctaacaatggtgaagaaatagccttttttcgttgcttcaattacacagttcttcgccgctcgctacaccaattcccattaaagctgttccttggttttccatcactgttttcacgtcagcaaagtccaagtttacgtaacctggtgcagtgattaaatctgaaatt

SEQ ID NO: 330 - DNA, 60 bp, Enterococcus faecalis
tggtgaacggattgaaccttgacgagcacgaccagttcctttttgacgccatggtttgcg

SEQ ID NO: 331 - DNA, 218 bp, Enterococcus faecalis
ggctcaatcccagataaatcttgtaacatccgaatcacggtcggatcatcatgtcctagaatatcaagttttaaaatattatcgtgaatggaatggaaatcaaagtgcgtcgttttccattctgcctcttgatcatcagcagggtattgaattggcgtaaagtcataaacatccatgtaatcaggaattacaataataccgccgggatgctgcccagt

SEQ ID NO: 332 - DNA, 184 bp, Enterococcus faecalis; identical to SEQ ID NO: 307

SEQ ID NO: 333 - DNA, 227 bp, Enterococcus faecalis
tactttcccgccacgtttcatgtaacgagtcattgcaatacgggctgcttcgatttgacggttagtaatccagtgagattcagttgcttgtaaaccccattcaccaaatgctacttcttttccgcctttagcttcaccgcgcatttttccgcggaattcacgacggtgttttacacgtttaggtactaacatgattatttccctcctttctcagtgttttttttcgt

SEQ ID NO: 334 - DNA, 279 bp, Enterococcus faecalis
ggcgtttctacttcgacatagccattgccatctagataacagacggatttcgctaataatttgactgcgtttcatgaaacgatcaaagctttctttgttactgattaaatccaaatagcgttgacgatagcgttgctccacattcgttaatccatggtatttatctggcaatggacgcaaagctttagttaataacgtaattgtttgagctttaacagtaacttcccccgtattggttttcattacttgacctgtcacaccaaagaagtcgcctaagtc

SEQ ID NO: 335 - DNA, 66 bp, Enterococcus faecalis
gaagatacgtgttccgcgtgggcttttatcgtcacggataattaccgcagcattttcatcaaattt

SEQ ID NO: 336 - DNA, 184 bp, Enterococcus faecalis
tgtagcactttcgctttgggacattttcttttgaatatacgttacttctgtttcaatttctaaacgtgggaaaataggtgttcctttacttgttactgttacgtctgttgggaactcaccaaaatgaatattttccatgttcattgtttctggatctaagcctaattgttcgaaaattttccct

SEQ ID NO: 337 - DNA, 141 bp, Enterococcus faecalis
  misc_feature (1)...(141): n = A,T,C or G
tgaacccagctcgcgtgccgctttaatgggcgaacagcccancccttgggaccgactacagccccaggatgcgacgagccgacatcgaggtgccaaacctccccgtcgatgtggactcttgggggagataagcctgttatc

SEQ ID NO: 338 - DNA, 97 bp, Enterococcus faecalis
ctggtgtttgaacagttaagttatagtctgttggttcgttcaagtaagggaactcaacaggcatgatttcgttaaagatgatcttaccaactgtggt

SEQ ID NO: 339 - DNA, 97 bp, Enterococcus faecalis
gaaaacgtccaaggcttctaattgttctttaaacgcatgtaacacagttggcactgtttctccttgcaagaattctttcgcagcatcatctaaaact

SEQ ID NO: 340 - DNA, 289 bp, Enterococcus faecalis
tgtcatagccgctaacaagcttactttttcatcttgtgcagttgctagaactagtacatcagacaattctttttgtttccattggtcagccaattggcagtaattgattcatgtctttaacattgacttgagcggcaatataacgaacaccgttgatgtctttgacatctttaaaaatgtcaccagcttgttggttcgctaatttgcctgccaattgttcgttttctttttgtagatcacgtaattgttgttgcaattgctctgttttcgtaaccacttcttttaattg

SEQ ID NO: 341 - DNA, 142 bp, Enterococcus faecalis
cggcgtttaattacaacaccttcgaataactggatacgttcacgagtaccttcgactactttcgcatgaacgcgaacagtgtcaccagggcaggaacgcaggaatatccgtacgtaattgttcttgtgttaattcttgaatt

SEQ ID NO: 342 - DNA, 162 bp, Enterococcus faecalis
ttgtatgagtctccttcgccaatatgacgattcaaatcatcatggaaatgcatatcatgattctctttcgcttcttttaagaaaatccagcacaaatgacctgttgattccgagtcataaatggcgcggtgatgttgttctaagttgacgccaaattttttc

SEQ ID NO: 343 - DNA, 313 bp, Enterococcus faecalis
taaaatttcggcaccattcgctgctttcagccattctgtccgattctttgttagttccgctgtagccaatcctttttgaatctcacctatccagttaattggaaataccagaccaataccaattgcgattaatgcattggtgacattataggttcctggcactggaatcgtaaacgtcatttgtgtatcactgattttgaatgaggtttgctctttggcttcatttgtgacgattccttgaagttgactttcctggctaaaaccaaaagtaatcacttgttgcgtgactttttccaccaatggttctagcaaa

SEQ ID NO: 344 - DNA, 216 bp, Enterococcus faecalis
catatgttggcatgtagcgtttataacgatcatctaagccagcataaaggatttcacttgttggaccaaatgtcacagccaaagcgccagcaaccgtgacgatttcaccagcttctgcgatattttcttctaattcttttagttcccgagtcaaggaagcatctaattcttctaaattatggcgctttttcacttgattttctttcaaattactca

SEQ ID NO: 345 - DNA, 135 bp, Enterococcus faecalis
tgcctaacgatttactcatcttacggccttcgccatcgagaaccatcccttgagaaatgattgatttataaggcgctaccccattgatagcaacaccttgttgtaatacttgagttaaaccaaccacgatattgg

SEQ ID NO: 346 - DNA, 197 bp, Enterococcus faecalis
tcatcgcttcaacgatacacacaacagtcacccgttttaacagtgtctcctactttgacaaagttctctttatctggtgctggttgtaaataaacagattcctacaataggtgacgtaatttcttctgtcttttcattggttgtcggtgtattagttggcgtttcttcaacgacagaaactgtttcaacaggcactg

SEQ ID NO: 347 - DNA, 156 bp, Enterococcus faecalis
taccaatgtcatcccaacccaattcattaaactacttttactttgcaagcgattttcagctggtagcaccagtgtttccacatcgccaactttcagccactctttccacattgccgcttggtctttataggagcccaccagaaaaagtttctgttc

SEQ ID NO: 348 - DNA, 213 bp, Enterococcus faecalis
tctttgccatatttttcgccaaataacgccattgcgcccatgtttttcgctgtatcaatatctgtttcaattgtgacaacaggaatagcttcccagattttttcgttaacgatggcttccatccgcgctagttcttctgatgtaacttgcccaaaatgagtaaagtcaaaacgtagatgtcctggtgcaactaatgagcctgcttggttggca

SEQ ID NO: 349 - DNA, 102 bp, Enterococcus faecalis
acttcgccagctttggccatatatgttgtacagcacgtttctttcctccaattttgttttcgatgtttgacatacaccttgagtttccggggcctcattgtg

SEQ ID NO: 350 - DNA, 586 bp, Enterococcus faecalis
tgctcgctcgaggggtttaccagcgttccaccgatggagtttcccacatcgcttcgtcacctgtggcacctttcaaggatacctttgacatagtcgaaaccttagtcatttttcctgccgttactctaaaagagtaccttagcttatgatttcgctaagcacgaacactacaagcatctcagcttgtgcgagcatggactttcctcagcttgcaaaagcaaaccgcgatcacccgaaaattacaaatctgtttagacgaacagcaaaaatttatacactacaacaagtgtacgctattctaacaaatgctttttgttctccgtgaaaacttgacttaaattgtcttgttaaaattgacgtgtttgtgcattatcaacatcatggttcgctggttctgcagtcattgacggtgcagaaggcgttacaggtgttgaaggtgtttcatctaactttttaccaaaaacttcacgctctaagtttgataaacgttttaaaatatcaaagttggtcactgctgcactttttggtacttcttgagcaacacgaggcgttggttgggcttttgataattggtctaattttgcca

SEQ ID NO: 351 - DNA, 171 bp, Enterococcus faecalis
  misc_feature (1)...(171): n = A,T,C or G
canaacttccattcctcgagctgctgcttcatcgttaaattcttcatgaacaactgggtacctctgccacaaccaatgacctcaccttgatgcggaattttttcccaaatttcttctgttacaaacggcataattggatgcaataagcgtaagatttgatccaatgtgtac

SEQ ID NO: 352 - DNA, 209 bp, Enterococcus faecalis
agaacatcaggtccttcaaaaatacagcatcaccttctggatcagtctgttgggatggtttttggcctcaatcccagataaatcttgtaacatccgaatcacaggtcggatcatcatgtcctagaatatcaagttttaaaatattatcgtgaatggaatggaaatcaaagtgcgtcgttttccattctgcctcttgatcatcagcaggg

SEQ ID NO: 353 - DNA, 222 bp, Enterococcus faecalis
gctgagaaacctttcatcatttggaaattagtaaccagtaattgcttgaccaaatgccgacattgctctatctacaaagtttgttcctggcaatttaccagcagattcaccacttaaacctgaatgcgtgctcgtaccaaaaccaaattttttcaaatactccatccatttttcatcacccattttttgttctagttttaccataccaatattactagacca

SEQ ID NO: 354 - DNA, 180 bp, Enterococcus faecalis
gctcatggggattaccgacagcacgaatggtttgattagttaaatcttcgataccatcaaataaatcaatgatttcgcctgtgcctgtcgagcgccaaggcattaatcgtaaaatctcgccgttttaagtcttctttcaaggagcgaacaaaggtgacttcatctggtcgacgaaagtct

SEQ ID NO: 355 - DNA, 130 bp, Enterococcus faecalis
ggtaaacgagtgaagctaccttctaatttttcagtgtcaaagcttacgaatgctggacgtccaacagttgcttcaaccgcttctttaattgttgagatgttttgagatttttcacgaacaccgatcactt

SEQ ID NO: 356 - DNA, 69 bp, Enterococcus faecalis
  misc_feature (1)...(69): n = A,T,C or G
cacgagcgacattttgtttgccacagtaattttccgttcacttggaaaactacttccacttnatcttct

SEQ ID NO: 357 - DNA, 190 bp, Enterococcus faecalis
gatttggattaatgcgaatgtaatttttctttttaaataatgccatttgcttactcctcgtattttagcaggcaagagcacagcctcttgcggcagttctttctttaatgattgctttctggctcccaatttggtagaaatgtttcttgtaaaaagcttgtgtcatagtcacctgtcaaaacattgtcat

SEQ ID NO: 358 - DNA, 161 bp, Enterococcus faecalis
  misc_feature (1)...(161): n = A,T,C or G
gcagtaagtcttcccagacattttttacattcattaaatgtgttctagtcgccttcgtttangacttgatatacgcgttctgtgggtaccgcaggaacgaactttttggcgcttgtggtcgtgcttgttgacgtggcgcatctgcttctttggcagctaca

SEQ ID NO: 359 - DNA, 208 bp, Enterococcus faecalis
  misc_feature (1)...(208): n = A,T,C or G
tcacttcgccgcctttanaagcaacaaatttttcgacagtcatatctggatctttaacaaatggttggtcaaccaaagcgatttctgctttgaatttttgtagacgaccaacaaccattttttcaacgatatttgctggtttaccttcgtttaatgcttgttcagttaacacagctttttcgtgttctaattcttcttgaggaatttg

SEQ ID NO: 360 - DNA, 566 bp, Enterococcus faecalis
tcattatagctacatttgctcgaccatctgttgccttcggtcaaaggatgacaccgatctgaaaagtcacctaaatcaatggttacgacctgttttgccctctttttggtgcagcgaacgtttggcctttaaccagacgccgtattttgggccaattttcaaagtgagaatgaagatcattggtatggaacaacacaatctcttccactaaaatcgcctcctttattcagcgctctgattaatagtaccatatttatagaagaaagttacaaaaaagaacagatgactttagaagaatttctcctaaaatcacctgctttgatcaggacgaactatgcgttatttttgggacgcttgcgttgcgtcgcttccatgataactggtaagatcacaggacgacgtttggtttgttcaaataaataacggcttaagttttcgcggatttcttgtttcagtttgctccattcaaaatcgtcactttctaaatgtttttcaacaatttctgtaacaatattgctactttctttcattaggtctttacttgttttaacgtaaacaaaacctct

SEQ ID NO: 361 - DNA, 211 bp, Enterococcus faecalis; identical to SEQ ID NO: 324

SEQ ID NO: 362 - DNA, 149 bp, Enterococcus faecalis
tgttgttttaccagcatcaacgtgggccatgataccaatgttacgagttttttcaagtgaaaattctcttgccattttgtatgtttactcctctctttatttaaatcgattgtaaattgactttctgctgccactttacgcgacagaca

SEQ ID NO: 363 - DNA, 208 bp, Enterococcus faecalis
tcaccacgtagacgtgcgtagttaactacccaacgtaaacctaaagttgtacgacgttctggacgaaccttcaactggtacttggtagttagaacccccaacacgacgtgctttaacttcaagaacaggcataacgtttttcattgcttgttcaaaaacttccaatggatcgttacctgtagattctttgatgatatcaaatgaatta

SEQ ID NO: 364 - DNA, 122 bp, Enterococcus faecalis
tatccaccacggtcgaagactacttttttgatgcctttttcagcaggcacagttcagcaacctagtttaccaacagcctgcagcctgtttctgtttttgttccaccctgaaatttctttatc

SEQ ID NO: 365 - DNA, 106 bp, Enterococcus faecalis
ttgcttttgcaacatgacctttcgcaggtttgtttgataaaacttcacagtttgtcttggtaaccaaccttggatagccttcgtatccgtcagtttcaacagtttt

SEQ ID NO: 366 - DNA, 158 bp, Enterococcus faecalis
  misc_feature (1)...(158): n = A,T,C or G
aactaaacgacggctcatgataatggcatcctcgtagttgtaaccttcccatgtcatgaaggcaaccaagacgttttgccctaaagccatttcgccttcttccatagaaggtccatccgctaantttntcgcctttttcaactttttcacctaagtga

SEQ ID NO: 367 - DNA, 359 bp, Enterococcus faecalis
taattgcttgaccaaatgccgacattgctctatctacaaagtttgttcctggcaatttaccagcagattcaccaccttaaacctgaatgcgtgctcgtaccaaaaccaaattttttcaaatactccatccatttttcatcacccattttttgttctagttttaccataccaatattactagaccaagaaatggcttgacgataattcaaatattctttgccgttcaaccgagtgtagtcatggtcattcacagttacatccccaacctgaattccaccaacacgattgaataattcattaggattaaactgtccttgttccatagaagcagctgttgtaaataatttgattgttgagcc

SEQ ID NO: 368 - DNA, 274 bp, Enterococcus faecalis
agatttgtaagttaagatttcttgtaatgtgtaagcagcaccagtaagcttccagtgcccaaacttccatttccccgaaacgttgtccaccgaattgagctttaccacccaacggttgttgcgtaacaagagagtaaggtccgattgaacgagcatgcaatttgtcatcaaccatgtgggctaatttaatcatatacatgacaccaacggaaatacggttatcaaatggttcacctgtacgtccatcgtaaagaactgttttagcatcgctagc

SEQ ID NO: 369 - DNA, 127 bp, Enterococcus faecalis
tcctctaaatgcgcttgttgttcttctgccacctgttgttcctccattcttgattttaacctatcctaataatgccacagtaattcgaaaaaaagcaagccgaattttactttcggcttgaattttt

SEQ ID NO: 370 - DNA, 105 bp, Enterococcus faecalis
tccccgccaccgtgttttgataatacagtagcaattgcagcctgttaatgtagttttaccatggtcaacgtgtccgatagtaccaatgttaacatgggatttaga

SEQ ID NO: 371 - DNA, 70 bp, Enterococcus faecalis
  misc_feature (1)...(70): n = A,T,C or G
tcctaagacacggcctaatttaccaacctgtanccatcatgtcaggagtcgcaacaactacagtcaaagt

SEQ ID NO: 372 - DNA, 127 bp, Enterococcus faecalis
acctttggctaagcgatcaatttcagcaccacgcaaatgtaaattatgatctctttcatatcctttaacaaagccatacgcctgttttgtcggcctacctgtaccaatggttcctgcccggtagaca

SEQ ID NO: 373 - DNA, 229 bp, Enterococcus faecalis
tgccttctttaccaagtacttgcgcgcttgttccagcctgaacggattaattgtccacctttaccaggtttcatttcaatgttgtggataacctgtaccaactggaatgttttccaatggtaatgcgttacctactttaatatctgcttctggaccagatactaggcgcatgcctacttctaatccttttggtgctaagatgtatgccttaaccccgtcttcgtaatga

SEQ ID NO: 374 - DNA, 207 bp, Enterococcus faecalis
tcaagttctttaattccgctttagtaccaaattcttcttgaccatacggacgtaaagaaatattggcatcacaacagcatagaaccttcttccattttcacatcagaaacttctgtaaattggataattgaacgcaacgcttctaaataagcatacgccttcttctggtgaacgcatgtctgcttcagaaacgatttcaattaaagg

SEQ ID NO: 375 - DNA, 125 bp, Enterococcus faecalis
ctctttagtggaggcagtccatccctttgtccgtaatttctttcattcgtgctttcacagccttctttcccttgtgacattgccacctaagtcaaagtcatccgcccgaacggagaaaaatgcac

SEQ ID NO: 376 - DNA, 408 bp, Enterococcus faecalis
tgaccaatttcgattcctttagtaaaggctaagacaccattgccatcaggagaaggatcgccttcttgaacaaagcgtaaatcttcgtaacctaattggttggaaatcacgatctggatttacatttgtcaaatgatagccatcttcgttagctccaacaatggcgttggctaaatcttgaacagctaaatctgcataaattttaacatcttcggaaacattgactggaccaattgaaccaaagccagctcctaagacacggcgagcatcttcttctgttgcttcatctaggaaatcagcgcctaagaagtttttcaatttgacatcattgacatcatgatcgccacgaaccaagaccattactggctcttcatcggcaataaatagtactgatttaataattcgttg

SEQ ID NO: 377 - DNA, 279 bp, Enterococcus faecalis; identical to SEQ ID NO: 328

SEQ ID NO: 378 - DNA, 211 bp, Enterococcus faecalis
  misc_feature (1)...(211): n = A,T,C or G
ctgcgctgacaccacttttanctagtcctaaaaccaacacttttttgttttgataggttgttatttttttcattgtcaatttcccctttgatagattagaaaagaatccataatgtgattcctgaacagattaaaccgacagaccaaaagacaaaatcaattttccattcagaccaaccacacatttcaaaatggtgatgaattggtgaca

SEQ ID NO: 379 - DNA, 181 bp, Enterococcus faecalis
  misc_feature (1)...(181): n = A,T,C or G
tcaatgctgcaaagcctgcaatcccaatttcacatacctgtggcttctgtcccaccagttaccatcatgtccgctaaaccatatttaatcgtgcganaagccttcaccaatcgcattccgtcgcatangcacangcagtcacnatagtttgagaangtccntttgcacctaaacgaatcga

SEQ ID NO: 380 - DNA, 172 bp, Enterococcus faecalis
  misc_feature (1)...(172): n = A,T,C or G
ggaagaatttctccacgatagatccacacctttaactcctagttttccgtaagtagtgtccgccttcttcccatgcngtaatcaatgtccgcacgtaatgtgtgaagtggtacagttccttcagagtatccttctgaacgagcgatatccgcaccgtttagacgacctgata

SEQ ID NO: 381 - DNA, 311 bp, Enterococcus faecalis
accacttaaacctgaatgcagtgctcgtaccaaaaccaaattttttcaaatactccatccatttttcatcacccattttttgttctagttttaccataccaatattactagaccaagaaatggcttgacgataattcaaatattctttgccgttcaaccgagtgtagtcatggtcattcacagttacatccccaacctgaattccaccaacacgattgaataattcattaggattaaactgtccttgttccatagaagcagctgttgtaaataatttgattgttgagcctggttcataaggactttcaact

SEQ ID NO: 382 - DNA, 129 bp, Enterococcus faecalis
aatttttctagcaaagagacattttttagtttctttttgggtaatagagtggggacaggtagtgtttcctcttgcatttttctgtcttgctctgttgccacagttggctgatccatttctggtgcttca

SEQ ID NO: 383 - DNA, 86 bp, Enterococcus faecalis
tcacgtttcaggatttctgcgatatcacgtttgatttttgaagcaggtaccttctaaagtttcatgtttaaccatgttcgcattac

SEQ ID NO: 384 - DNA, 447 bp, Enterococcus faecalis
cggaccaaagcaccctctaattcacggatgttggaatcaatttgaccagcagatataaccttagtgtatcatccaggaatttctaaacgctcggcatcgtgccttttttgcagcaaaattgcaatccgtgtttctaaatcaggcggggtgatatcgacagacaaaccccaagcaaagcgagaaactaatcgttcaggtaattttggaatatcattcggcgggcgatcacttgttaaaacaatttgtttattttcattgtaaagatcgttgaaggtatggaaaaattcttccaatgttgcttctttttccgccaaaaattgaatatcatcgactaataataagtcaacattgcgatattctttccgaaattgttcggatgtctttgtttgaattgagttgataaattcattcgtaaacgtttcgctactaacatatttgactttggca

SEQ ID NO: 385 - DNA, 138 bp, Enterococcus faecalis
gaattgagttgataaattcattcgtaaacgtttcgcctactaacatatttgacctttggcatctggttgattcacctaacatttgatgaccaatagcatgcatcaaatgggttttccctaaccctacaccaccataga

SEQ ID NO: 386 - DNA, 245 bp, Enterococcus faecalis
tgaaaactctttaaacatgcagtaaaacttcttcttcggattttgaaccgcgcaccatttcatctgtaatcccagttaaattgattgtcgtttgagataatggatggccaggatcaataaactgctcaaaagtctcaatgacatttcctttgtgcattttgactgcggccaattcaataatggtatcataaacagcggaaagccccgttgtttccacgtcaaagaccacataggtagcatctgtt

SEQ ID NO: 387 - DNA, 81 bp, Enterococcus faecalis
tgtgtttgaacctagtgatttatatgtaatatctgctacaccagcctaattccaatacggcacgaacctggtccaccagca

SEQ ID NO: 388 - DNA, 203 bp, Enterococcus faecalis
aggaaacgctgctaagacaacgccttctttgtttttatctttaccagtgataacttttactttatcagccttttttaacaaacattacctgtttcgcacctcctttaacgtgggctcgagattataatacttctggtgctagagaaacgatcttcatgaagttgttttcacgtaattcacgtgcaactggtccgaagataccg

SEQ ID NO: 389 - DNA, 92 bp, Enterococcus faecalis
tactttctttcattttttcagttcgttgatctggttggcaccccattaaaataatcattgaacaaaataacccagacaacctatctttttag

SEQ ID NO: 390 - DNA, 283 bp, Enterococcus faecalis
tccccaatttcagaaatcgccataaattctttagaatctttaccacccatggcaccaccgtccccaataatggcacggaattctagtccacagcgttcaaaaatgcgtgagtaagctttttcgtaatcacggtatgattgatctaaactagcttcatcggcatggaaagaatagccatctttcatgataaattcacggcctcttaataagccagaacgagggccgtttttcatcacgatattttgtttgaatttggtataaattcaaaggtaatcgtttgtaa

SEQ ID NO: 391 - DNA, 221 bp, Enterococcus faecalis
tcctacgaataaagcaacgccgccttcttctgcaacagtttttcatgtaatcgtaagcctgcatctactaatttcacctgttttttgtaagtcaatgatgtagataccgtttctttctgtgaagatatatttcttcatttttgggttccagcgacgagtttggtgaccaaagtgtacgccggcttctagtaattgtttcatagaaattactgccatgttgt

SEQ ID NO: 392 - DNA, 151 bp, Enterococcus faecalis
cgcgagaatctttgtatttatgagtcgcacgaataacctgtgtaaagtgagcagttctgttggtaatggaatcggacctgatacgtcagcctccagttctttttgctgtttccacaattttatccgctgattgatctaaaatacggtgttc

SEQ ID NO: 393 - DNA, 125 bp, Enterococcus faecalis; identical to SEQ ID NO: 375

SEQ ID NO: 394 - DNA, 320 bp, Enterococcus faecalis
cattgcttcaacttcttgtgatagttttgtttggtactcatctttcacattcatttggaccacgtgtaaatcaaatggcgcaattcctgttggccaattaataccgcgctcgtctgcattttgttcaacgattgctgaaagtaaacgactaacgccgatgccatagcaacccatgatcacctgatttttcacgaccgttttcatctaaaactgttgcgcccatagcatcactataacgcgttcctaatttaaagatatgaccaatttcgattcctttagtaaaggctaagacaccattgccatcaggagaaggatcgcct

SEQ ID NO: 395 - DNA, 216 bp, Enterococcus faecalis
  misc_feature (1)...(216): n = A,T,C or G
agancggccagctttaccaatgttgattaattcgtgttgttcgttaccaactgaaccgattgttgcaccggcaagttgcctaagatcatacgaacttcgccagagtttaagcggattaatacgtatttgccttctttaccaagtacttgcgcgcttgttccagctgaacggattaattgtccacctttaccaggtttcatttcaatgttgtggata

SEQ ID NO: 396 - DNA, 277 bp, Enterococcus faecalis
tacgtccaattggtgttttaccttcaccaccaccgtgtgggtgatcgttagggttcattacgcctaccacgaacagttgggcgtttacgcatccaaccgagagcggccagctttaccaatgttgattaattcgtgttgttcgttaccaactgaaccgattgttgcacggcaagttgctaagatcatacgaacttcgccagagtttaagcggattaatacgtatttgccttctttaccaagtacttgcgcgcttgttccagctgaacggattaattgt

SEQ ID NO: 397 - DNA, 153 bp, Enterococcus faecalis
  misc_feature (1)...(153): n = A,T,C or G
taaactatggcgatttaacaggattatgcgccgcccatagacccgactaaaattttccgatagatggcatcttcttcatttaaataatgaacatttccagtggcgacaaccagcttgccaagttcgtcaccgattttcactanattactaata

SEQ ID NO: 398 - DNA, 82 bp, Enterococcus faecalis
tgtgtttgaacctagtgatttatgatgtaatatctgctacaccagctaattccaatacggcacagaacctggtccaccagca

SEQ ID NO: 399 - DNA, 161 bp, Enterococcus faecalis
acaccaccgacaattgcgttttcaaactcgaagcctttaccttcttcatttggtgtaaattcaacccatacgtgaccgtattgtcctttaccaccagactgacgaacgaatttaccttctgctttagtcgcagcacggaatgtttcgcggtaagatacttg

SEQ ID NO: 400 - DNA, 103 bp, Enterococcus faecalis
gttttagtagggcctttacgagtacagtgcattatttttcgtgttttgtccacgagttggtaatccacgacggtgacggattccacaggtatgaaccgatttc

SEQ ID NO: 401 - DNA, 219 bp, Enterococcus faecalis
catatgttggcatgtagcagtttataacgatcatctaagccagcataaaggatttcaccttgttggaccaaatgtcacagccaaagcgccagcaaccagtgacgatttcaccagcttctgcgatattttcttctaattcttttagttcccgagtcaaggaagcatctaattcttctaaattatggcgctttttcacttgattttctttcaaattactca

SEQ ID NO: 402 - DNA, 169 bp, Enterococcus faecalis
tccagaaacagcaattcgaattggcataaacaagtttttgcctttaacgccggtttctttttggacggcctttaatcgcctgcctttaataccttgggacatcgaaaacgtccaaggcttctaattgttctttaaacgcatgtaacacagttggcactgtttctccttg

SEQ ID NO: 403 - DNA, 197 bp, Enterococcus faecalis
tgaatacctaattggcgagcagccatacctaagtgtaattcaagtacttgtccgatattcatacgagaaggtacccctaatgggttcaacatgatatcaacaggtgttccgtcaggtaagaatggcatatcttcttccggcataatacgggaaacaacccctttatttccgtgacgtcccgccattttatctccttc

SEQ ID NO: 404 - DNA, 112 bp, Enterococcus faecalis
tatttcactgcatctttcaatgctttacctggtttgaatgcaggtactttgcttgcagcagatttgaatttcttgtccagtttgtgggttacagtcctttacgagctgcgcg

SEQ ID NO: 405 - DNA, 207 bp, Enterococcus faecalis
ttttcaacagttccttcaacagttgcgcctgcaacagttggcagcaccaaccttttgtagattcgccacctacctaagataaccttcgtcaaaaacaacctttctcgccagcctcaacgtttaatttttcaacgtagattgcttgacctacttcaactttcacttgtttaccaccagttttgataattgcgtacatgctatacagca

SEQ ID NO: 406 - DNA, 192 bp, Enterococcus faecalis
tatgttactaaatcttgaacggtttggatgccatcttctgtttcgattttcacatcaaattcatcttcgatttcgttaatgatttggaataaatctaagctatccgcgtctaattcttcttgaatgtttgtagttaattgtacctcttcagcatcttttcctaattcttctacgataattgcttgaattttt

SEQ ID NO: 407 - DNA, 281 bp, Enterococcus faecalis
tcagcaatcagttcccctaaccatttgcctggtgtttcttctaagacggcctaaaaggtcttttcctgttatggccaattcatgtctttgatggatgggtaatgccttaactaactcttttgttacttgtacttgactctcttgttggtaataatataaaagcctttcaacaagtacctgctgattcttcgcctaattcataaagcatcattggctgccagtcgttactcaagcgaaaacgcaaaccgcgtactaattgtgaaacgttttgaattaattga

SEQ ID NO: 408 - DNA, 129 bp, Enterococcus faecalis
gccacgtcttatttccctcctacgttgatattgttcaggactgcttattcagcagccttcgaataattgaatttcttttgaatcttcagttaatgtaacgatcgctttgcgacgtttttttgtataacc

SEQ ID NO: 409 - DNA, 127 bp, Enterococcus faecalis
cagagtatccttctgaacgagcgatatccgcaccgtttagacgacctgatacttgagttttgattcctttagcgccagcacgcattgcgcagttggatggccttgtttttgagcacgacggaaagca

SEQ ID NO: 410 - DNA, 215 bp, Enterococcus faecalis
tggtccatgaactgtgataactgtgaagaaccaaagaattctttgatacttgctaccacctggacggatgttgattaattgttgtggtgtcaatgtttctgtgtcttgaatagacattctttcacgaaccacacgttccatacgggctaaaccaatacggaattggttttgtaataattcgcctactgaacggatacgacgattacctaagtggt

SEQ ID NO: 411 - DNA, 100 bp, Enterococcus faecalis
caccagtttcaacgtttgtttcaacgcggaatgatggatcttcttcagcaagtttttgtagagccacagcccattttatcttggtcagccttttgattta

SEQ ID NO: 412 - DNA, 221 bp, Enterococcus faecalis
caagttgctctttaaatttcgctaaattctcttctgcttcaggcatgtccattttattggcaacaataatttgaggtcgttccatcaaacgtaaattgtgtgaagccaattctttattgattgccaaataatcttcgtaaggatcgcgtccttccatgccactcatatcaatgacatgtaaaataacacgcgtccgttcaatatggcgtaagaactgtgtt

SEQ ID NO: 413 - DNA, 116 bp, Enterococcus faecalis
tcattttcaggttcagaatgattcaaactgccctgattttggttaataaaactttgtcttagttttggccagctttctctagtaatgcagaccatttctggtgtatagtccatcaa

SEQ ID NO: 414 - DNA, 200 bp, Enterococcus faecalis
cctgaataaattcccatagcatacaacagtgttattcgggtcccatgtccaaaaagctcgtctggttctaaaaaaagttccagcagttagttaatttgaaggcttctactccgtcagcttgagaaacaaccgtatatggcgcttctatatttttccggatctctttggtcataggatacctttgttttatctcccgtata

SEQ ID NO: 415 - DNA, 219 bp, Enterococcus faecalis
taataccaagagcttccagcccattgtggcatagtattcgtttcacagttttcccttcatgccagtttcagggtcgacgacattgacccattcatcaatgtttgctaatggcgattccccagttccacttgggcgaatatccgatgttactggtaaacgtagaggtaactcagattcaggaaccgttgtggttgttccatcttcccaatggatcacagg

SEQ ID NO: 416 - DNA, 195 bp, Enterococcus faecalis
tacccgctagattttctggtgttagtttagtatcggctaattcaactttttcacctgtttaagtaagcagaaacttcgcccattaaccagtttgatgcttgtttcgcatctgcaccgtttgctaaggttgcttcaaagaaatctgacatttctttcgttaaagtcaagaccattgcgtcgtattcaggtaaacct

SEQ ID NO: 417 - DNA, 265 bp, Enterococcus faecalis
tcactcattttttatgctcctttagttgctgacattaaatttttatcatgtactttttcaccttgtacccagacttctcgaatattttctggtcgtgctaaatataagattttttggaaaatatcaagcaatgattcccctggatttttagggattcgtgcttgtgacaagcttgtattaataatttgaacatcccaagcataccctttttctaattttccaattggtaaacttagcgcttgaccaccaccagcagtagctaaat

SEQ ID NO: 418 - DNA, 158 bp, Enterococcus faecalis
gcaataatcgattcatcgatagcaagatttaaaatggtttgagaaatatgttcgccaatttctttccagcgtaaatctggcaacctcatggacggggcgatagatcatattccctttatttgttactagtaaaagatgatctaatgtattgacttcgc

SEQ ID NO: 419 - DNA, 276 bp, Enterococcus faecalis
  misc_feature (1)...(276): n = A,T,C or G
gacatggctaattctggcgcttctatttcacgactgatgactaattcctctgggttacagaagcagttctaagtagcctagtattagcctgttaaaaattcttctacttctgtatcgtttgttttaattaacaaggtaattggtttanaaagtggtgtattcacttctgctcgaatattccgaaccgaacgaataacttctttcagaacttccattcctcgagctgctgcttcatcgttaaattcttcatgaacaactgggtactctgccacaacc

SEQ ID NO: 420 - DNA, 166 bp, Enterococcus faecalis
gtcataatcactagtttgtgataacgtgctttagaaacatcgaaatcttcgccaaagcctgttcccatagcctgtaaataatgaccgaatttcttcattggctaaaattttatccatgctggctttctcaacattcaagattttcccacgaattggtaaaatggct

SEQ ID NO: 421 - DNA, 164 bp, Enterococcus faecalis
taagattaattctggtaaataatgtttgttggtatgttttgtatttatttcatcagatttgctctggtttatttccccaaatacagacctcgtgtccattttcggctaatacttgagctaaagctgtcccccaggaacctggacctaaaacagcgactttttgt

SEQ ID NO: 422 - DNA, 107 bp, Enterococcus faecalis
gccattttgtgtgtgtcttcgcagttttttaacagaagcgccagtgttgttagcagcatccatgatttctttcgctagacgttcttccattgtgtgttcaccacgta

SEQ ID NO: 423 - DNA, 91 bp, Enterococcus faecalis
tcactgatataacgggcacgacgtgaggctggcatttctggcaaactagcagcgaactttttcaatccattcatcatcaattgaaaaacga

SEQ ID NO: 424 - DNA, 247 bp, Enterococcus faecalis
tcttgcaaatgggcagaaaccagcttttcctttaccacgttttgtcatcatacgtccagcaacagcctgaccttctgtattcatttcacctaagttcttcttttgtatgattatcatattgttcatgaagttctgctgaattatgagtgcgatcgaaacgtttaccgaaaggatcaatcccttcttcacgtaaagcttccattttttcgcggcgcacgagcatttgatcatttaaatcctctaaatg

SEQ ID NO: 425 - DNA, 146 bp, Enterococcus faecalis
cttcgccgccgatatttttcgctctagcttctttgtcagtaattacaccctctgatgtagagatgattgcaattcctagaccgtttaatacttttggtacttcgtcagcttttacgtatgcacgtaaacctggtttagaaatacgt

SEQ ID NO: 426 - DNA, 188 bp, Enterococcus faecalis
gattgtagctggtttagctaatacttgtccacgttcgatatcttcacgtgctacaccacgtaataaagcaccgatgttgtcgcctgcttcagcagtagtctaataatttacggaacatttcaacacctgtaacagttgttttagatgtttcgtctttaataccaacgatttcaacttcgtcaccaacg

SEQ ID NO: 427 - DNA, 129 bp, Enterococcus faecalis
tccgtttgaaggatcaatcaccattacattagaaacatgaattggcagcttccaccttcaaggattccaccttgtggggcctgcttggtttggtttttggtgttttttaacagacgttgacaccttcaa

SEQ ID NO: 428 - DNA, 424 bp, Enterococcus faecalis
cactaaaccaggtaagcggacactatggattcgcagaccctcgaaatcagccccgcgtgcccctggtattgattctacctcttgcggattcccttgtttttttgctggccgaacttcttgaatcatttctgcagtttttatagccgttccgctcggtgcatccaatttgttatcatgatgtaattcaatgatttccacatccggaaaatactgtgccgctttttgggcaaattgcatcattaaaactgccccaattgcaaaatttggcgcaattaagccgccgatggctttttctcgagataggtttgtcaattcgttgatttgttcctccgtaaagcctgtcgtcccaacaactggcgccataccatgttccaacgcaaaacgtgtatttggataggcggcttcaggaaccgtaaaatcaatc

SEQ ID NO: 429 - DNA, 234 bp, Enterococcus faecalis
gcggtttctttaagtaatggaaaataatcagcttcgtgattcaacacaatgacctttagaatgtgtaatcaattgacgtttgcaataaaagtaatcgtcaaaggttggatgttcaattggactgatatggtcgggggtaatgtttaaaaaaatgccgacatcaaaaaataaccttgtagacacgattagttttgtaggcttgggaagaaacttccataataaaatgagtcatcc

SEQ ID NO: 430 - DNA, 161 bp, Enterococcus faecalis
acactacttacccacaagcgtaagatatctgcacccatttggttgataacctttttcaggtaagatagtattgcctaacgatttacctcatcttacggccttcgccatcgagaaccatcccttgagaaatgattgatttataaggcgctaccccattgata

SEQ ID NO: 431 - DNA, 248 bp, Enterococcus faecalis
tatcccaaacttcatcttcgccacgttcgattttacgtttcgcatttttaatgtttgtcgcaatttcacgttgtactaattcacagcattacaaatggtttgaataattcaatcgccatttcttttggtaaaccacattggtacatttttaagaacggaccaacgacgattacggaacgaccagaatagtcaacacgtttacctagtaagttttgacggaaacgaccttgtttccctttcaacatgtg

SEQ ID NO: 432 - DNA, 208 bp, Enterococcus faecalis
cacatcggcttccgcgtcaacactacttacccacaagcagtaagatatctgcacccatttggttgataactttttcaggtaagatagtattgcctaacgatttactcatcttacggccttcgccatcgagaaccatcccttgagaaatgattgatttataaggcgctaccccattgatagcaacacttgttgtaatacttgagttaaa

SEQ ID NO: 433 - DNA, 64 bp, Enterococcus faecalis
gtagttgtaaccttcccatgtcatgaaggcaaccaagacgttttgccctaaagccatttcgcct

SEQ ID NO: 434 - DNA, 149 bp, Enterococcus faecalis
ccttcattacggaagacacgaccaatttcatatactttttccatgccaccgacaattaaacagttttaaatgtaacctctagggcaatgcgtaagtataagtccatatctaatgcattatggtgtgtgataaatggacgagcagcagct

SEQ ID NO: 435 - DNA, 204 bp, Enterococcus faecalis
tgggtaactccagtcaaccacatttgtgttgctgtttggttctgctccgaaatgcgcctggcgcagaggagaaaattttagagttggttttcaattctacgtggacttctaatccaatgacagtttcaaagttcattaatcgttcccccctaaaatgactggttttttcgtatggaaatctgtcgcttgttcaaaagcataggc

SEQ ID NO: 436 - DNA, 178 bp, Enterococcus faecalis
actgcgtgtgttccttgtcttaatgaagcacgttgcatgatgattgcatcatagacaacactttcattaggttcgattccgaagatttcttcatttaaagtgatttcaccgttttgagttccatcttgtttgaataatgctacattcggcattccttagttcctcctttccctacact

SEQ ID NO: 437 - DNA, 90 bp, Enterococcus faecalis
tcttattccattgtcctttacgtaccgtttccataatcttaaaggccatcccacctgtccaaaccagcatgaattaaataaaccatgata

SEQ ID NO: 438 - DNA, 288 bp, Enterococcus faecalis
gtcgcatctgttgcaggtccagctttaaccatcaacataattcgacgaggtttttcaattgcattcacaaattcctcaattgagtatgttgcttgaaagtttttgtcaggatgttcttcaaccacttctgttgtttttgatcctgtacggttatacagcgcaactgtatagcctctgctttcaatgtttaaagcaagattttttcccatgacagccatgccgactacgccaaattgttgttttgtcattttatgacctcctatattataatcaacgaaaattctatga

SEQ ID NO: 439 - DNA, 167 bp, Enterococcus faecalis
cgtttgctaaaacttttttagctgtagtgttaccaataccataaatgtaagtaagagaaactactacacgtttgtcacgagggatgtctacctcctgcaatacgagccattattcgttacacctcctaattatccttgacgttgtttatgttttggatttgctgggc

SEQ ID NO: 440 - DNA, 283 bp, Enterococcus faecalis
tccccaatttcagaaatcgccataaattctttagaatctttaccacccatggcaccaccgtccccaataatggcacggaattctagtccacagcgttcaaaaatgcagtgagtaagctttttcgtaatcacggtatgattgatctaaactagcttcatcggcatggaaagaatagccatctttcatgataaattcacggcctcttaataagccagaacgagggcgtttttcatcacgatattttgtttgaatttggtataaattcaaaggtaatcgtttgtaa

SEQ ID NO: 441 - DNA, 132 bp, Enterococcus faecalis
ggtaaacgagtgaagctaccttctaatttttcagtgtcaaagcttacgaatgcctggacgtccaacagttgccttcaaccgcttctttaattgttgagatgttttgagatttttcacgaacaccgatcactt

SEQ ID NO: 442 - DNA, 275 bp, Enterococcus faecalis
agatttgtaagttaagatttcttgtaatgtgtaagcagcaccagtaagcttccagtgcccaaacttccatttccccgaaacgttgtccaccgaattgagcctttaccacccaacggttgttgcgtaacaagagagtaaggtccgattgaacgagcatgcaatttgtcatcaaccatgtgggctaatttaatcatatacatgacaccaacggaaatacggttatcaaatggttcacctgtacgtccatcgtaaagaactgttttagcatcgctagc

SEQ ID NO: 443 - DNA, 127 bp, Enterococcus faecalis; identical to SEQ ID NO: 372

SEQ ID NO: 444 - DNA, 69 bp, Enterococcus faecalis
actacgtcaaagtcgaaccatccaccttggatttttgcaaccatgtcgtcgtcgcctacgaaatctgca

SEQ ID NO: 445 - DNA, 168 bp, Enterococcus faecalis
taatttgacgatttcaaaatgtaatttcaagacatcaccagggaccacctttttgacggaatttggctttgttgataccgccaatataggcctgtttcaccttcaaattgatccatttttaagattaaaatcgaacctacttgtgccaatgcttcaataatcaaaacg

SEQ ID NO: 446 - DNA, 275 bp, Enterococcus faecalis
tacgtccaattggtgttttaccttcaccaccaccgtgtgggtgatcgttagggttcattacgctaccacgaacagttgggcgtttacgcatccaacgagagcggccagctttaccaatgttgattaattcgtgttgttcgttaccaactgaaccgattgttgcacggcaagttgctaagatcatacgaacttcgccagagtttaagcggattaatacgtatttgccttctttaccaagtacttgcgcgcttgttccagctgaacggattaattgt

SEQ ID NO: 447 - DNA, 280 bp, Enterococcus faecalis
tcagcaatcagttcccctaaccatttgcctggtgtttcttctaagacggcctaaaaggtcttttcctgttatggccaattcatgtctttgatggatgggtaatgccttaactaactcttttgttacttgtacttgactctcttgttggtaataatataaaagcctttcaacaagtactgctgattcttcgcctaattcataaagcatcattggctgccagtcgttactcaagcgaaaacgcaaaccgcgtactaattgtgaaacgttttgaattaattga

SEQ ID NO: 448 - DNA, 208 bp, Enterococcus faecalis
aaccattgcaacgattggaatgtttaatttgtgtgcttcttgaacagcaatgcgttctttacgtgggtcaacgatgtacattacatcctggaattcttggcatatcagcgataccacctaagaatttttctaaacgttcacgttctttgtttaagccagcaacttctttcttaggtaaaacttcgaaagtgccgtcttcttccattgc

SEQ ID NO: 449 - DNA, 69 bp, Enterococcus faecalis; identical to SEQ ID NO: 444

SEQ ID NO: 450 - DNA, 319 bp, Enterococcus faecalis
ggtcaattggatcatttaattctgtaaatgcattagcaaacctcttttccgataataaatagttcaaagcggtcagtgaaacgaccatcttctggatttttcttcgctaatggtgaaacagctactgggtgaccataaataaatgttggttgttgcaacgtatcttctacaaatgtttcgaaaaattcattaatgatatgaccgactgtcatggcatctgtaatttcaacattatgttctttagccaacgcacgggcttcttctatcgtcatctcttgccaaaaatctacgcccgtttgttctttgaccgcatctacca

SEQ ID NO: 451 - DNA, 69 bp, Enterococcus faecalis
tcctaagacacggcctaatttaccaactgtagccatcatgtcaggagtcgcaacaacctacgtcaaagt

SEQ ID NO: 452 - DNA, 205 bp, Enterococcus faecalis
tgggtaacctccagtcaaccacatttgtgttgctgtttggttctgctccgaaatgcgcctggcgcagaggagaaaattttagagttggttttcaattctacgtggacttctaatccaatgacagtttcaaagttcattaatcgttcccccctaaaatgactggttttttcgtatggaaatctgtcgcttgttcaaaagcataggc

SEQ ID NO: 453 - DNA, 95 bp, Enterococcus faecalis
caacgcgaacttcaccacgttcaacacggcctgtagcaacagtaccaccgtccagtgattgagaataccgtcttcgactggcatcatgaatggtt

SEQ ID NO: 454 - DNA, 259 bp, Enterococcus faecalis
ttgttttttcaataatcgatgaaacacaacgttgtacgtctttatagccatttttagttggaataataattgagactaacttttcagattcaatgtcataataaacatcgtataagccattcgccgccccatgcgttgcatgaccattaatacctcgacgaacgagcgcatcttgcacggctcttagccccgcttcaaaagcataacctttggagccctgatccactgctgttgaggttggcagcatccgccaatagta

SEQ ID NO: 455 - DNA, 143 bp, Enterococcus faecalis
cggcgtttaattacaacaccttcgaataactggatacgttcacgagtaccttcgactacctttcgcatgaacgcgaacagtgtcaccagggcaggaacgcaggaatatccgtacgtaattgttcttgtgttaattcttgaatt

SEQ ID NO: 456 - DNA, 259 bp, Enterococcus faecalis; identical to SEQ ID NO: 454

SEQ ID NO: 457 - DNA, 91 bp, Enterococcus faecalis
tactttctttcattttttcagttcgttgatctggttggcaccccattaaaataatcattgaacaaaataacccgacaacctatctttttag

SEQ ID NO: 458 - DNA, 194 bp, Enterococcus faecalis
ggaatttggtggccccaccataattgtcgcgaaataacccagtcatgaatattttccatccaacagtaaaaatgtttgattgaagcgtggtggataaaattcaacagcgtcttctgttttttgattttctattgctttttcagctaatggtcccatttttacaaaccattgggtcgataaacgtggttccacga

SEQ ID NO: 459 - DNA, 123 bp, Enterococcus faecalis
ttatcgccttttttaacaaacattactgtttcgcacctcctttaacagtgggctcgagattataataccttctggtgctagagaaacgatcttcatgaagttgttttcacgtaattcacgtgc

SEQ ID NO: 460 - DNA, 204 bp, Enterococcus faecalis; identical to SEQ ID NO: 435

SEQ ID NO: 461 - DNA, 195 bp, Enterococcus faecalis
ggtgtttcttcaacgaataactcttcagttgcttggtcttccccttggttaccttcgatgaaagcgtcagccattttagcagtgattaatttcacagcgcggattgcatcatcatttgaagggattacaacatcgatctcatcaggatcacagtttgtatcaaccattgcaacgattggaatgtttaatttgtgt

SEQ ID NO: 462 - DNA, 98 bp, Enterococcus faecalis
caccagtttcaacgtttgtttcaacgcggaatgatggatcttcttcagcaagtttttgtagagccacgcccattttatcttggtcagcttttgattta

SEQ ID NO: 463 - DNA, 147 bp, Enterococcus faecalis
acggaaacgtttcattgttggtccttcgttaacaaatgcttcagatacgactaagcctttcaacagtctaagtcaaagttgttttctgcgttagcaacctgcctgacattaaaactttttcaatgattccagcagacttgttcggtg

SEQ ID NO: 464 - DNA, 227 bp, Enterococcus faecalis
ccttcataaatgccatattgctctgcataagattgaggaatgtctttgcctactttatttactaccatgtctatatttcctcctcggtaattaatttagccgccaatgctaacgcaatgacccgttcagctcgttcaacaattggtttatcaaccatttttccatttacggagataacaccggaaccttttgcttcggcttcccgaatgccccagattacttcctta

SEQ ID NO: 465 - DNA, 167 bp, Enterococcus faecalis
gccaaacctccccgtcgatgtggactcttgggggagataagcctgttatccccagggtagccttttatccgttgagcgatggcccttccatgcggaaccaccggatcacctaagcccgactttcgtccctgctcgacttgtaggtctcgcagtcaagctcccttctg

SEQ ID NO: 466 - DNA, 234 bp, Enterococcus faecalis
tcagtgatttcttcaccttcaagatatttcatcattaagtcttcgtcagtttcagcaacagccttcaacctaatttttcgcagccattcttgcgctttttctaaataatcttcaggaatatcagtttcttgaatatctgttcccaaatcatttgtgtagatttcagctttcattttaatcaagtcaatgattccagtgaagtcttcttcagctccgattggaatttgaattgga

SEQ ID NO: 467 - DNA, 177 bp, Enterococcus faecalis
ctaacgtatccaaaattgattgattcttatcgtcccacaataaacagtcaattcacattcgcagacctttttatcttccacgtaagcagtcgcctttgccagatgccgacaaagtcacgtaatttgacgatttcaaaatgtaatttcaagacatcaccagggaccactttttgacgg

SEQ ID NO: 468 - DNA, 74 bp, Enterococcus faecalis
  misc_feature (1)...(74): n = A,T,C or G
gctgctccacctgctgctggtccagcctacctgctacagganctgctgcctgatacagtcaaatttttcttcga

SEQ ID NO: 469 - DNA, 184 bp, Enterococcus faecalis
  misc_feature (1)...(184): n = A,T,C or G
tgtcggatgancttttccttcttgcaatgtttgtacacaagcaatcgcttcgataccgccagccgcgcccaataaatgtccagtcatactctttgtacttgaaattggaatttgcgatgctcgctcaccaaagacacgtttgatggccgttgtttccgcagcgtcattcgctggggttgacgta

SEQ ID NO: 470 - DNA, 233 bp, Enterococcus faecalis
acttcaacatttcaggcagtcatttctactgattccaacatgtcaggtcgacagtaaaaaggtccagtcgtaatgattcttttagttgccattctgcaattaatttatggttaccattcgttagcacggcagggacttccatatcgttgaaaatagcaggtctggtatattgtggatgctctaataggccagtggaatgtgaatccgtttgtgcagaaagattgttacctaag

SEQ ID NO: 471 - DNA, 123 bp, Enterococcus faecalis
cctcaaaattagcgtttagtttttttatcgtcagcaacgtggccacgataagttctagttggtgcaaattcacctaatttatgtcctaccatgtcttcttgaatgtaaacagggacatgtttc

SEQ ID NO: 472 - DNA, 596 bp, Enterococcus faecalis
  misc_feature (1)...(596): n = A,T,C or G
gccgggaatttagaaactgcttcataagtaaccccgcctgcttctgtggcctacctaattgttgcaagtttaattcagcaacatatgtttcaggaatatcagtacgcctttcgctgtcgttggatgaacttgtccgacaaaaccaaccacttcatcttctaaataaatccatgcctgtccggcctggatgcatttctggaatcgccgctgtcgcttgataactgattttttctgttaatcctaaaacagctacaatactttccactaagccttttactgtataaaaatcaacggctgttgcttttgtttgccaatctttaaccattgtattaccagttaaagcaagtgctaagtgattttcttctgtangtaaattttttgttggatcttctgtttggtacaaaacgcgtcctacttcgtagaaggcgatattattatttttacgcgccacattgtatgcgacatcatctaataaaccagaaattaagntcatacgtaacacagaacgctcttcactcattggncattgcaaacgtgttggttgactttctttcatcataaattgacgggatttttcttctgttgtcaaccgcata

SEQ ID NO: 473 - DNA, 311 bp, Enterococcus faecalis
cgcgattgccatcgattgtatgcatcaagccttgttctttatagaaagctaagattggtgcagcctacctttcaatgttgacctgccaaacgatttttaaccagtttcgggcttatcatcttctctttggtagaattcatgtccgccacagcgatcacaagtgccttcaacttttggcgggttgaataatttatgatacgttgcgccacatgtgcgacagatgaatcgtccagctaaacgctcgattaatacatcttcttctacatggatgtcaatgacagcatcaatttttttgtttaattctttaagca

SEQ ID NO: 474 - DNA, 158 bp, Enterococcus faecalis
ccgtaagcttccagtgcccaaacttccatttccccgaaacgttgtccaccgaattgagctttaccacccaacggttgttgcagtaacaagagagtaaggtccgattgaacgagcatgcaatttgtcatcaaccatgtgggctaatttaatcatataca

SEQ ID NO: 475 - DNA, 137 bp, Enterococcus faecalis
taagaattcagcatactctttttcagcataccatttcgcatcccagtcgcaggatgatgcctacacgcattccaattggatgtacctttttgacccacctgattgtccctcctcttaaatgtttaagctctgttttc

SEQ ID NO: 476 - DNA, 188 bp, Enterococcus faecalis
cgcaccaacttttgtagattcgccacctactaagataacttcgtcaaaaacaactttctcgccagcctcaacagtttaatttttcaacgtagattgcttgacctacttcaactttcacttgtttaccaccagttttgataattgcgtacatgctatacagcacctccttcttctagacttagactcgc

SEQ ID NO: 477 - DNA, 280 bp, Enterococcus faecalis
tactggcgctttacgtccaattggtgttttaccttcaccaccaccgtgtgggtgatcgttagggttcattacgctaccacgaacagttgggcagtttaccgcatccaacgagagcggccagctttaccaatgttgattaattcgtgttgttcgttaccaactgaaccgattgttgcacggcaagttgctaagatcatacgaacttcgccagagtttaagccggattaatacgtatttgccttctttaccaagtacttgcgcgcttgttccagctgaacgg

SEQ ID NO: 478 - DNA, 243 bp, Enterococcus faecalis
ttttaacgcttcaactttatctgtttgttcccacggtaaatcaatatctgttcgaccaaaatgaccataagccgcagtttgtttataaattgggcgacgtaaatctagcatttcaataatacctgctggacgtaaatcaaagtttttacgaactgcttcgattaatttactttctggaagatcacctcgtaccaaacgtattaatagaaatagacacctggttgcgccacaccaattgcataa

SEQ ID NO: 479 - DNA, 84 bp, Enterococcus faecalis
ccaacaatttcgccgtatatagttgcgccacgtttctgtgcatgcctcgagttcttctaaaaccagcattcctgcgccttcacc

SEQ ID NO: 480 - DNA, 256 bp, Enterococcus faecalis
tgcgaaaagcttcaccaatcgcattcgtcgcagaagcacaagcagtcacgatagtttgagaaggtccttttgcacctaaacgaatcgaaatatttcccgctgccatattagcaattaccatgggcacgaaaaatggtgttacgcgttttgcgccttttttatccattacccgtacttggtcttgtaaggtagtcattccgccaatcccactaccgacaatcacacctaaacgagtcgggtcaatcgttgcttctgt

SEQ ID NO: 481 - DNA, 100 bp, Enterococcus faecalis
tgatgtgaactcgtttgccagttaatttgtttaattcttttcttaggttttcgacttcagatccgcctttaccgataaccatacctggtttagctgtgtg

SEQ ID NO: 482 - DNA, 233 bp, Enterococcus faecalis
caagctctaaaaattcgaatcgcaatttcgccacgattggcaactaatacctttttcataacagtcactcctaccatcaatttccttcaaatttattggttctgttctaaagataaatagtactcattttctaatttctgacgtgtttcatctgcactgatattcaggacaaaggccacagcaatcgaaataatcagcaaactattcccaccttgactcaagaacgggaaagt

SEQ ID NO: 483 - DNA, 69 bp, Enterococcus faecalis; identical to SEQ ID NO: 451

SEQ ID NO: 484 - DNA, 147 bp, Enterococcus faecalis; identical to SEQ ID NO: 463

SEQ ID NO: 485 - DNA, 186 bp, Enterococcus faecalis
tcgatatgtttgtcgccgatttctaccccttgcatacggtaaacacagttgtacttcacagtaataggtagttttcaacagataaaacatcacgaaccttgtaataattgttttggatcaattgaaccttctgtcaacggtgcaccacggtggatgatgtcgccttcagcaactttcatacgtgca

SEQ ID NO: 486 - DNA, 86 bp, Enterococcus faecalis
  misc_feature (1)...(86): n = A,T,C or G
tcacgtttcangatttctgcgatatcacgtttgatttttgaagcaggtaccttctaaagtttcatgtttaaccatgttcgcattac

SEQ ID NO: 487 - DNA, 187 bp, Enterococcus faecalis
ccacaaagcataataggacagtttcgtccctattctccctaccatttcgccggctctcggggcaacaagaaaactaacaaaagccaaaggaatggttgataagccagcttccaacgggctgaagcctctcatctcttgcaaatatagcgtgtttaaaaataaatagccgttatatatgataaagcca

SEQ ID NO: 488 - DNA, 248 bp, Enterococcus faecalis
  misc_feature (1)...(248): n = A,T,C or G
tcagttgcttgtaaaccccattcaccaaatgctacttcttttccgcctttancttcaccgcgcatttttccgcggaattcacgacggtgttttacacgtttaggtactaacatgattatttccctcctttctcagtgttttttttcgttggaagaatttctccacgatagatccacactttaactcctagttttccgtaagtagtgtccgcttcttcccatgcgtaatcaatgtccgcacgtaatgtg

SEQ ID NO: 489 - DNA, 85 bp, Enterococcus faecalis
tcacgtttcaggatttctgcgatatcacgtttgatttttgaagcaggtacttctaaagtttcatgtttaaccatgttcgcattac

SEQ ID NO: 490 - DNA, 116 bp, Enterococcus faecalis
cagctccaccgtatacgttcaatttagtaaattgtttacagtcctaaagtgtttttaggtagcataccttttacagaagtttcgataagacggcgagagtttttgtcgcgtaattc

SEQ ID NO: 491 - DNA, 160 bp, Enterococcus faecalis
attcgtaaacgtttcgctactaacatatttgactttggcatctggttgattcactaacatttgatgaccaatagcatgcatcaaatgggttttccctaaccctacaccaccatagaagaaaaggggattgtaaatcgaacctggatcctcggcaacaaca

SEQ ID NO: 492 - DNA, 197 bp, Enterococcus faecalis; identical to SEQ ID NO: 403

SEQ ID NO: 493 - DNA, 219 bp, Enterococcus faecalis
taatttgtccaacaaggaaaccaacctgcacaggtcttttccgtttttaaagtcatcaattgattgttggttgttgtctaaaacttcgttaatcattggtaataattgcgcctggatcagataactgaacaaggccttttgcttcgacaacttctttagcgtctccaccgttttcaattaactctttgaacactttcttcgcaattttcgagctgattg

SEQ ID NO: 494 - DNA, 69 bp, Enterococcus faecalis
cacgagcgacattttgtttgccacgtaattttccgttcaccttggaaaactacttccacttcatcttct

SEQ ID NO: 495 - DNA, 156 bp, Enterococcus faecalis
aactgtgtaaagttggagatgttaccacgggctccagagtcagacatcatgaagattgggttacgagcttccatactttcgatcagtttttgttggatttcgtctttggcaccgttccaaacgccgattacacgttcataacgttcgtcatcagta

SEQ ID NO: 496 - DNA, 125 bp, Enterococcus faecalis
gtctgaaatactataaacgttttcgctagctacgccaacttcttttggttccatgttacggtaacgagccataccagtaccagcctgggatgattttaccaatgataacattttctttcaatcca

SEQ ID NO: 497 - DNA, 183 bp, Enterococcus faecalis
cctgtaacagttgttttagatgtttcgtctttaataccaacgatttcaaccttcgtcaccaacgcgaaccttcaccacgttcaacacaggcctgtagcaacagtaccacgtccagtgattgagaatacgtcttcgactggcatcatgaatggtttgtcagtatcacgttctggagttgggata

SEQ ID NO: 498 - DNA, 219 bp, Enterococcus faecalis
tcctacgaataaagcaacgccgccttcttctgcaacgtttttcatgtaatcgtaagcctgcatctactaatttcactgttttttgtaagtcaatgatgtagataccgtttctttctgtgaagatatatttcttcatttttgggttccagcgacgagtttggtgaccaaagtgtacgccggcttctagtaattgtttcatagaaattactgccatgttgt

SEQ ID NO: 499 - DNA, 210 bp, Enterococcus faecalis
tcaccacgtagacgtgcgtagttaactacccaacgtaaacctaaagttgtacgacgttctggacgaacttcaacctggtaccttggtagttagaacccccaacacgacgtgcctttaacttcaagaacaggcataacgtttttcattgcttgttcaaaaacttccaatggatcgttacctgtagattctttgatgatatcaaatgaatta

SEQ ID NO: 500 - DNA, 222 bp, Enterococcus faecalis
taattgaggtgatttaactaatgtagcaatctctttcaattgacagttcttcttcttgtaaaagttgatacgccttctttactcgtcacctgcttcaatacaggcgtactcctgcaccaattccagattcagaaacaattttgaaaatcccgatatcttctgtattagcaacgtgtgttccaccacataattcgatagagtaatccccaatattaactacac

SEQ ID NO: 501 - DNA, 134 bp, Enterococcus faecalis
caatcttggtaacttttccagattctttaattaattcccaaaattttgggattaagccttggtggtaaattgtcgatacagaaatagcccatgtcttcaaagctttgaacagcgactgtttttccagcgccact

SEQ ID NO: 502 - DNA, 371 bp, Enterococcus faecalis
aaattcatggggcctgtgtaggcagccttcaggcgtgtgggcaatgtcaaaataatcgagaagcatgcctgaccttcgccaacctgtttcggcctcctgagtcaattaatgtcacatgactccccatcacattttgaatcaccggacgtaacaacgggtaatgggtacaacctaaaatcaacgtatcaagtccttttaattgtagtgcttgaagtgtttctgccacaattttttttgctacggaagaacgatattgattactttcaacaatggggacaaatttagggcaagctaaactagtcacctcaattgttggtgccttacttttaatggcgatttcataggaagcacttttgattgtccctaacgta

SEQ ID NO: 503 - DNA, 166 bp, Enterococcus faecalis
aatacgcatcacttctggatcgtctgttgggatggtttttggctcaatcccagataaatcttgtaacatccgaatcacggtcggatcatcatgtcctagaatatcaagttttaaaatattatcgtgaatggaatggaaatcaaagtgcgtcgttttccattctgcc

SEQ ID NO: 504 - DNA, 131 bp, Enterococcus faecalis
ggtaaacgagtgaagctaccttctaatttttcagtgtcaaagcttacgaatgctggacagtccaacagttgcttcaaccgcttctttaattgttgagatgttttgagatttttcacgaacaccgatcactt

SEQ ID NO: 505 - DNA, 81 bp, Enterococcus faecalis
cacgagttgctttcataatttgtccaacaaggaaaccaactgcacggtcttttccgtttttaaagtcatcaattgattgtt

SEQ ID NO: 506 - DNA, 103 bp, Enterococcus faecalis
ggttttgccatcgcgcaacatgatttcttttgctgcttgttgtacatcttcgtcattgtacaagacattgtagattgtttctgtgattggcatttcaacttct

SEQ ID NO: 507 - DNA, 126 bp, Enterococcus faecalis
aacagctgtcattaattgacgaatttgttcatttggataaacaggtcacctttagccttctaacgatttaccgattaatttagaatgacgagccttcttccaacgcttttaagacattgtcacgga

SEQ ID NO: 508 - DNA, 151 bp, Enterococcus faecalis
cgtacacgaacatcttcagatacgccaacgtttgctaaaacttttttagctgtagtgttaccaataccataaatgtaagtaagagaaactactacaccgtttgtcacgagggatgtctactcctgcaatacgagccattattcgttacacc

SEQ ID NO: 509 - DNA, 115 bp, Enterococcus faecalis
tcgtttccttcgatgttcattttgatatcagaagaaaattcgcagtgttaattcacctttaggtcctttaactgtaatgttgtttccgtcttgcttgatttcaacaccagcagga

SEQ ID NO: 510 - DNA, 134 bp, Enterococcus faecalis
tcgccatcactaaattgtgttacagagcacctttcctagctccacacccacagcatccagcaattttttctgctaagggacgattagagttcaaagaaaagattttcaatcttggatcaaaataatgtttcgac

SEQ ID NO: 511 - DNA, 167 bp, Enterococcus faecalis
gatggcatcttcttcatttaaataatgaacatttccagtggcagacaaccagcttgccaagttcgtcaccagattttcacctagattactaataatttcttccaaatctgcttcatttttcaccaattcttgttcaattaatggcgcgtaaactggtttgggcataa

SEQ ID NO: 512 - DNA, 159 bp, Enterococcus faecalis
  misc_feature (1)...(159): n = A,T,C or G
cgctggatcatgataactgaacaaggccttttgcttcgacaaccttctttagcagtctccaccagttttcaattaacctctttgaacacctttcttcgcaattttcgagctgattgtgccatcgttaatcaaagtaatcatacccgctanattttctgg

SEQ ID NO: 513 - DNA, 182 bp, Enterococcus faecalis
  misc_feature (1)...(182): n = A,T,C or G
cacagataatgtttgcagtaagtcttcccagacattttttacattcattaaatgtgttctagtcgccttcgtttangacttgatatacgcagttctgtgggtacgcaggaacgaactttttggcgcttgtggtcgtgcttgttgacgtggcgcatctgcttctttggcagctacaccgtgtt

SEQ ID NO: 514 - DNA, 174 bp, Enterococcus faecalis
gtgttcgctgttgtaacaattacgatgtccataccgcgtactttatctactaaatcataatcaaccttctgggaagattaattgttctttaatacctaaagtatagttaccacgaccatcgaaagcttttttgctgacaccgtggaagtcaccgtacacgaggtaaagaaactg

SEQ ID NO: 515 - DNA, 180 bp, Enterococcus faecalis
gtgaatcatttggataactaattgttcacaaacattttgccaacctaacattggcagtccatttttggcagtgcctttcaaaattagcagccaaccgttccgcctgctcttccgttacttttttggcttgctgtgtcgcaacactttcttccaataattgacgataataaaccatgagca

SEQ ID NO: 516 - DNA, 99 bp, Enterococcus faecalis
ttacctgttaattttactttatcagcgttaattacgattacgaaatctccagtatccacatgtggtgtgaatgttggtttatttttaccacgtagtaca

SEQ ID NO: 517 - DNA, 220 bp, Enterococcus faecalis
tgtctctttaatgtctaacgctaatttcattaatgggtttgcaattgccgccattgcttctgaaggcgaacctgattttgcttgtctcagtgtaatatacaaaacatattcaggattatccgctgggaccatttccactacagaagacaagacttgacttgctccatcaacgtaccctttaccatctgaaatctgggcagttcctgttttggcagcaaca

SEQ ID NO: 518 - DNA, 188 bp, Enterococcus faecalis
tgggtttgcatttttagccgcagcctttcaatgccatagaagcagcctacacaggaaggccgtttcatttgaatcagacatcgtggtatgaaccatcgtaaagttttgctttgatatcaactaatggataaccagcaagaacaccgttgttcatagagtcttctaaccctttttcaactgctgggatg

SEQ ID NO: 519 - DNA, 184 bp, Enterococcus faecalis; identical to SEQ ID NO: 307

SEQ ID NO: 520 - DNA, 212 bp, Enterococcus faecalis
aaccattgcaacgattggaatgtttaatttgtgtgcttcttgaacagcaatgcgttctttacgtgggtcaacgatgtacattacatctggaattcttggcatatcatgcagataccaccctaagaatttttctaaacagttcacagttctttgtttaagccagcaacttctttcttaggtaaaacttcgaaagtgccgtcttcttccattgc

SEQ ID NO: 521 - DNA, 144 bp, Enterococcus faecalis
tgtaatagcaaggtttttagtgtattttaaccagttttttcaaaaaataatcattttttctcaaagttgataaatttatttgaatatctaaaaaaagtatggtagaatgcactattttcggcgtcgcggaatgattttaatcgg

SEQ ID NO: 522 - DNA, 173 bp, Enterococcus faecalis
tacgcgggcaacctgcatttttacgacggcctgtgccgctatattgtacttgtgccaatgaatttccctccttaaattaagttcgtgatatctaatacttctggttgttgtgcagcatgtggatgctcagctccaccgtatacgttcaatttagtaaattgtttacgtcctaa

SEQ ID NO: 523 - DNA, 135 bp, Enterococcus faecalis
taagttcttaatacaaataagccaatggttaacaagacaaagccaaacattactattgtatctcgtaggtgccaatgaagaatgcaggtattttgtccgtccttcaccaccttgataacctcttgcttccatggc

SEQ ID NO: 524 - DNA, 202 bp, Enterococcus faecalis
aggaaacgctgctaagacaacgccttctttgtttttatctttaccagtgataaccttttactttatcagccttttttaacaaacattactgtttcgcacctcctttaacgtgggctcgagattataatacttctggtgctagagaaacgatcttcatgaagttgttttcacgtaattcacgtgcaactggtccgaagatacg

SEQ ID NO: 525 - DNA, 205 bp, Enterococcus faecalis
ttttcaacagttccttcaacagttgcgcctgcaacagttggcagcaccaaccttttgtagattcgccacctacctaagataacttcgtcaaaaacaactttctcgccagcctcaacgtttaatttttcaacgtagattgcttgacctacttcaactttcacttgtttaccaccagttttgataattgcgtacatgctatacagca

SEQ ID NO: 526 - DNA, 270 bp, Enterococcus faecalis
cctgcttcttcatacaaatcaaccattttttcaatgatggtattttgaacttgagctggttttttcacatttcgcagtttcacttcttgtcgcaaggcttctgtaatttttaaggatgtatcaaagcctacgtctgcaccaattaacgtttcttctaattcttcaaagaaatcttcatcaacgctccggaaattagcaaacaattcgttcaaccgttgaccaaatgtcttacgtgttttttccaaacctttttcatatttttcttggact

SEQ ID NO: 527 - DNA, 338 bp, Enterococcus faecalis
agcagattcaccacttaaacctgaatgcgtgctcgtaccaaaaccaaattttttcaaatacctccatccatttttcatcacccattttttgttctagttttaccataccaatattactagaccaagaaatggcttgacgataattcaaatattctttgccgttcaaccgagtgtagtcatggtcattcacagttacatccccaacctgaattccaccaacacgattgaataattcattaggattaaactgtccttgttccatagaagcagcctgttgtaaataatttgattgttgagcctggttcataaggactttcaactaataggttctgccacgt

SEQ ID NO: 528 - DNA, 93 bp, Enterococcus faecalis
  misc_feature (1)...(93): n = A,T,C or G
gctacgtctttcactaatcctttgtcatacatttgtgctaacacctcgtggcccnaagccatcaatgttcattgcgtttcgtgagacaaagtg

SEQ ID NO: 529 - DNA, 112 bp, Enterococcus faecalis
cataaggatacggccgccaccgaatacgccaattacttcgtgcgggatagtagaaccaaccataggcaccttcaacctaagtttttcttcgcagtcttcgattgctttacgg

SEQ ID NO: 530 - DNA, 221 bp, Enterococcus faecalis
tctaaaatagataaaatatcggctaagttctttttgattaactcttttcctgacgttggattataaatcacctctagccttttttcatggtttgcctgcctacctttcttatcgttttgaaagctcttcttgcaataacttgttaaccacacctgggtttgcttgtccacgagttgctttcataatttgtccaacaaggaaaccaactgcacggtcttttc

SEQ ID NO: 531 - DNA, 146 bp, Enterococcus faecalis; identical to SEQ ID NO: 425

SEQ ID NO: 532 - DNA, 263 bp, Enterococcus faecalis
  misc_feature (1)...(263): n = A,T,C or G
angcggttcgtccgctagacgagccatttcattttcaggttcatgaatgattcaaactgccctgattttggttaataaaactttgtcttagttttggccagctttctctagtaatgcagaccatttctggtgtatagtccatcaaacggcttaaattattattgaaagctaactgcatctcttcatcgtctgttgcacgagcacaaacaatctcatagtcaaatgccaccacgatgcccttaggactcgctgcgacaggttca

SEQ ID NO: 533 - DNA, 222 bp, Enterococcus faecalis
tgtgtagatttcagctttcattttaatcaagtcaatgattccagtgaagtcttcttcagcctccgattggaatttgaattggatgagccgtttgcttgtaaacgatcatgtaatgattctactgaatagaagaagtccgcaccgattttatccattttgttacagaatacaatacgaggaactttatattcagtcgcttgacgccaaacagtttctgtttga

SEQ ID NO: 534 - DNA, 218 bp, Enterococcus faecalis
ggaccatcgcccgtttccgtgccacatcttttggatcgactttgacattttcaataccaggcatgttacctcattccagggatcatttttaataagtcttcaatcggtcccatgcccataacttgatccaattgctcaatgaaatcgttaaagtcaaaactgttttctttcattttttgagcaagttcttctgcttttttttcatcgtaatcttgttg

SEQ ID NO: 535 - DNA, 176 bp, Enterococcus faecalis
tcctttaactgtaatgttgtttccgtcttgcttgatttcaacaccagcaggaagaacaacaacctttattaccaataccggcctcaccttagagacacctccttgtgtattttttagaattaccatacgtaggcgattacttcgccgccgatatttttcgctctagcttctttgtc

SEQ ID NO: 536 - DNA, 196 bp, Enterococcus faecalis
  misc_feature (1)...(196): n = A,T,C or G
tatttaagaaccccatatcaaaagangcgttgtgggccacctaaaatagttccttctgaaaactctttaaacatgcgtaaaacttcttcttcggattttgaaccgcgcaccatttcatctgtaatcccagttaaattgattgtcgtttgagataatggatggccaggatcaataaactgctcaaaagtctcaatga

SEQ ID NO: 537 - DNA, 220 bp, Enterococcus faecalis
caacttcatctaaaatatcttgacggaatttagagattgaagcaaaccattgtggcgttgcacaggtagataactggttttttggtacgccaatcatgtggataactatgcgtaaagaaatctaattttaataacgcgcctttttcttctaataactcagtaatcattggattcgctttgtcatagaaaattccttcaaaaccaggtgcttcatctgtaa

SEQ ID NO: 538 - DNA, 252 bp, Enterococcus faecalis
tatcccaaacttcatcttcgccacgttcgattttacagtttcgcatttttaatgtttgtcagcaatttcacagttgtacctaattcacagcattacaaatggtttgaataattcaatcgccatttcttttggtaaaccacattggtacatttttaagaacggaccaacgacgattacggaacgaccagaatagtcaacacgtttacctagtaagttttgacggaaacgaccttgtttccctttcaacatgtg

SEQ ID NO: 539 - DNA, 279 bp, Enterococcus faecalis
tatctacaaagtttgttcctggcaatttaccagcagattcaccaccttaaacctgaatgcgtgcctcgtaccaaaaccaaattttttcaaatacctccatccatttttcatcacccattttttgttctagttttaccataccaatattactagaccaagaaatggcttgacgataattcaaatattctttgccgttcaaccgagtgtagtcatggtcattcacagttacatccccaacctgaattccaccaacacgattgaataattcattaggattaa

SEQ ID NO: 540 - DNA, 191 bp, Enterococcus faecalis
taagttttcttcaacaactgcttctggttcgaagaatttatcaatgtccgcaatatcaacttggactttttcttgcggttccatgccatagtccacagctaataattcaattgtatctttatctagggcttggttttggttaacaatgacacccatcataaataattttttgatgatttccgctggttcgc

SEQ ID NO: 541 - DNA, 116 bp, Enterococcus faecalis
tctgtttgttcgtttgttaaatcacgtacacgaacatcttcagatacgccaacagtttgctaaaacttttttagcctgtagtgttaccaataccataaatgtaagtaagagaaact

SEQ ID NO: 542 - DNA, 305 bp, Enterococcus faecalis
aagatcttcagtgattaattgatccgcaccaatgatgattgcaccagtttctggatgaacaactgatttaccgtgtataaccgacctaatagacgttcgtctaatggttcgataatttcgttaccttcacgaatggcttcgatttcaagaccacggtcagtgccacagtcgtcttcacgaatgattacgtcttgggcaacgtcaactaaacgacgtgttaagtaacctgaatcggctgtcttcaaggccgtatcggtcatccctttacgagccccgtgagttgagataaacatttctaagacaga

SEQ ID NO: 543 - DNA, 164 bp, Enterococcus faecalis
gcctaattcaggaccatgcatttgtccagaaacagcaattcgaattggcataaacaagtttttgcctttaacgccggtttctttttggacggctttaatcgctgctttaatacttgggacatcgaaaacgtccaaggcttctaattgttctttaaacgcatgta

SEQ ID NO: 544 - DNA, 189 bp, Enterococcus faecalis
gattgtagctggtttatctaatacttgtccacgttcgatatcttcacgtgctacaccacgtaataaagcaccgatgttgtcgcctgccttcagcagtagtctaataatttacggaacatttcaacacctgtaacagttgttttagatgtttcgtctttaataccaacgatttcaacttcgtcaccaacg

SEQ ID NO: 545 - DNA, 144 bp, Enterococcus faecalis
atggcatcctcgtagttgtaaccttcccatgtcatgaaggcaaccaagacgttttgccctaaagccatttcgccttcttccatagaaggtccatccgctaaagtatcgcctttttcaactttttcacctaagtgaacaattggg

SEQ ID NO: 546 - DNA, 142 bp, Enterococcus faecalis
tgtcgcggaagatcatgccttccccttcacggccttcttcttccattgttaggtagtagttacctaagaccatatcttgagatggtgtaacaacctggtttaccatctttcgggttcaagatattttgggcagcaagcatta

SEQ ID NO: 547 - DNA, 128 bp, Enterococcus faecalis
atgcgtaatcaatgtccgcacgtaatgtgtgaagtggtacagttccttcagagtatccttctgaacgagcgatatccgcaccgtttagacgacctgatacttgagttttgattcctttagcgccagca

SEQ ID NO: 548 - DNA, 131 bp, Enterococcus faecalis; identical to SEQ ID NO: 504

SEQ ID NO: 549 - DNA, 173 bp, Enterococcus faecalis
tacgcgggcaactgcatttttacgacggcctgtgccgcctatattgtacttgtgccaatgaatttccctccttaaattaagttcgtgatatctaatacttctggttgttgtgcagcatgtggatgctcagctccaccgtatacgttcaatttagtaaattgtttacgtcctaa

SEQ ID NO: 550 - DNA, 123 bp, Enterococcus faecalis; identical to SEQ ID NO: 471

SEQ ID NO: 551 - DNA, 104 bp, Enterococcus faecalis
  misc_feature (1)...(104): n = A,T,C or G
aaacattttttcttgtaattctcgtgtatggatcccgtaatgagccgccacctaattcgtagccgtttaagacaacatcgtaagcttcagcatacacagangct

SEQ ID NO: 552 - DNA, 244 bp, Enterococcus faecalis
tgaaaactctttaaacatgcgtaaaacttcttcttcggattttgaaccgcgcaccatttcatctgtaatcccagttaaattgattgtcgtttgagataatggatggccaggatcaataaactgctcaaaagtctcaatgacatttcctttgtgcattttgactgcggccaattcaataatggtatcataaacagcggaaagccccgttgtttccacgtcaaagaccacataggtagcatctgtt

SEQ ID NO: 553 - DNA, 187 bp, Enterococcus faecalis
ccacaaagcataataggacgtttcgtccctattctccctaccatttcgccggctctcggggcaacaagaaaacctaacaaaagccaaaggaatggttgataagccagcttccaacgggctgaagcctctcatctcttgcaaatatagcgtgtttaaaaataaatagccgttatatatgataaagcca

SEQ ID NO: 554 - DNA, 187 bp, Enterococcus faecalis
tgtagcactttcgctttgggacattttcttttgaatatacagttacttctgtttcaatttctaaacgtgggaaaataggtgttcctttaccttgttacctgttacgtctgttgggaactcaccaaaatgaatattttccatgttcattgtttctggatctaagcctaattgttcgaaaattttccct

SEQ ID NO: 555 - DNA, 250 bp, Enterococcus faecalis
taacataatccgacgtttgacttcagtaccaaagccttcggaacgcgaattaacatagacagtcttctagattttggacattttcggaacggtaaccataaccgaatgccatcaaagcagttgtaagtttgaacttgcttctgaagaggcaataatatagtaagcggcaatcccatatttagaatgtggtaagctaacttcttccactgttgcgcctaaagctttgaacgtttctgctgcttttaatacc

SEQ ID NO: 556 - DNA, 182 bp, Enterococcus faecalis
  misc_feature (1)...(182): n = A,T,C or G
tantaaaccttcgcggtttggtagttttgccaacgcagtaatttgttccacctgaagaaacttttccttcgatgacgccacctttgatttctaatgcttttgcatctttagcaaattcgtcgatgattttagctggtgctactacatcgtcgttgctgaatgcgacagcagttgggcctgta

SEQ ID NO: 557 - DNA, 128 bp, Enterococcus faecalis
acctttggctaagcgatcaatttcagcaccacagcaaatgtaaattatgatctctttcatatcctttaacaaagccatacgcctgttttgtcggcctacctgtaccaatggttcctgcccggtagaca

SEQ ID NO: 558 - DNA, 227 bp, Enterococcus faecalis
cgctggtgacttgcttaagcgttgttcatcaaacaatttaatcaagtcttcttgtgagaagatttcttcttcgccaacaggagaccatcctagtaaagcaataaagttgaacatggcttctggtaagtaacctaattcacggtattgttcaataaattgtaaaattgtttcatcacgtttgctcaattttttgccagtttctgaattaatgattaaggtcatatggc

SEQ ID NO: 559 - DNA, 197 bp, Enterococcus faecalis
ccgaccccgataagttcaagtgctttttggaaaccttcagaaacaccaacaaccatgttgttgaagtttgcacagagttgttccgtggattgttttcatttcttttgaatcgtttggacgagtgaatgtcaccttcgtttccttcgatgttcattttgatatcagaagaaaattcgcgtgttaattcacctttaggt

SEQ ID NO: 560 - DNA, 101 bp, Enterococcus faecalis
atcaatttgaccagcgatataacttagtgtatcatccggaatttctaaacgctcggcatctgcttttttgcacaaaattgcaatccgtgtttctaaatcag

SEQ ID NO: 561 - DNA, 148 bp, Enterococcus faecalis
cccccatcgagaagatagagaagttttgcatggcacctaccacctcaccatattcaacatattcaaaaagggtaagcctaccttaaatcagacaatccctttgcattcaccccgggcacagtaatgtgcgcacctaggcgaaatacaa

SEQ ID NO: 562 - DNA, 142 bp, Enterococcus faecalis; identical to SEQ ID NO: 546

SEQ ID NO: 563 - DNA, 130 bp, Enterococcus faecalis
ggtccaaagactacgccacctccacgccattgtggtgaacaggattgaaccttgacgagcacgaccagttcctttttgacgccatggtttgcggccaccgccacgaacagcgctacggtttttaactgcg

SEQ ID NO: 564 - DNA, 105 bp, Enterococcus faecalis
tcttcttgcaataacttgttaaccacacctgggtttgcttgtccacgagttgctttcataatttgtccaacaaggaaaccaacctgcacaggtcttttccgtttt

SEQ ID NO: 565 - DNA, 130 bp, Enterococcus faecalis
aatcactaattcgttaattcctaagccagcctttttcaacacatttacaggatgttatggatgattgtttttggtccagtatagacaacagccaaacatctccatgcgaacgccaagcattccacgtggg

SEQ ID NO: 566 - DNA, 81 bp, Enterococcus faecalis
ggtaaaacatcacgttttgcaacaggacctttacgaggcatccagtaactcctccttccgaaatatgatttttcaagttgt

SEQ ID NO: 567 - DNA, 274 bp, Enterococcus faecalis
agatttgtaagttaagatttcttgtaatgtgtaagcagcaccgtaagcttccagtgcccaaacttccatttccccgaaaccgttgtccaccgaattgagctttaccacccaacggttgttgcgtaacaagagagtaaggtccgattgaacgagcatgcaatttgtcatcaaccatgtgggctaatttaatcatatacatgacaccaacggaaatacggttatcaaatggttcacctgtacgtccatcgtaaagaactgttttagcatcgctagc

SEQ ID NO: 568 - DNA, 91 bp, Enterococcus faecalis
aaagtagttccgtaaccgcgttctaatggttcaacgacgaacttaccataatctctattttcatcaattttttcgattcttggtttttcaa

SEQ ID NO: 569 - DNA, 68 bp, Enterococcus faecalis
tcctaagacacggcctaatttaccaactgtagccatcatgtcaggagtcgcaacaactacgtcaaagt

SEQ ID NO: 570 - DNA, 179 bp, Enterococcus faecalis
gttccttcaacagttgcgcctgcaacagttggcgcaccaacttttgtagattcgccacctactaagataacttcgtcaaaaacaactttctcgccagcctcaacgtttaatttttcaacgtagattgcttgacctacttcaactttcacttgtttaccaccagttttgataattgcgta

SEQ ID NO: 571 - DNA, 188 bp, Enterococcus faecalis
gtgatacggattggacaaccaattaaatcagcatcagcaaattttacgcctgcgcgctcattgcggtcatcaactaatacttcgtagcccgcttcggtcatcattgcttcaacttcttgtgatagttttgtttggtactcatctttcacattcatttggaccacgtgtaaatcaaatggcgcaattcc

SEQ ID NO: 572 - DNA, 123 bp, Enterococcus faecalis
tgagataaacatttctaagacagaaagtccttcacggaagtttgagatgattggtaattccatgattcgtccattcggagcggccatcaaaccacgcataccagctaactgtgtaaagttgga

SEQ ID NO: 573 - DNA, 119 bp, Enterococcus faecalis
aacaccagtaacgtctgttgtacggaagtagaattgaggacggtagttagtgaagaatggagtgtgacgtccgccttcttcttttgataatacgtataccttcagcctttgaattttgt

SEQ ID NO: 574 - DNA, 158 bp, Enterococcus faecalis
tatttaaatcgattgtaaattgactttctgctgccactttacgcgacagacagagaggatcttaccaacgataatgagcaaatgcgccggtttgcgtctgccattttgtgtgtgtcttcgcgttttttaacagaagcgccagtgttgttagcagcatc

SEQ ID NO: 575 - DNA, 139 bp, Enterococcus faecalis
tctttaccaagtacttgcgcgcttgttccagctgaacggattaattgtccacctttaccaggtttcatttcaatgttgtggataacctgtaccaactggaatgttttccaatggtaatgcgttacctactttaatatct

SEQ ID NO: 576 - DNA, 157 bp, Enterococcus faecalis
tatttaaatcgattgtaaattgactttctgctgccactttacgcgacagacagagaggatcttaccaacgataatgagcaaatgcgcggtttgcgtctgccattttgtgtgtgtcttcgcgttttttaacagaagcgccagtgttgttagcagcatc

SEQ ID NO: 577 - DNA, 189 bp, Enterococcus faecalis
taagcggattaatacgtatttgccttctttaccaagtacttgcgcgcttgttccagctgaacggattaattgtccacctttaccaggtttcatttcaatgttgtggataactgtaccaactggaatgttttccaatggtaatgcgttacctactttaatatctgcttctggaccagatactaggcgcat

SEQ ID NO: 578 - DNA, 68 bp, Enterococcus faecalis; identical to SEQ ID NO: 569

SEQ ID NO: 579 - DNA, 157 bp, Enterococcus faecalis; identical to SEQ ID NO: 576

SEQ ID NO: 580 - DNA, 230 bp, Enterococcus faecalis
ctggatcaactagcgtttcagctaaggttaagtttaagagacgtgtttttaagtctaattttttgttaactttgtagcgaccaacgtttgccaaatcataacgttttggatcaaagaaacgtgcagttaacaagctacgtgagctatctgctgtttttggttcgcctgggcgaagacgttcataaatgtctttcaagccttcttctgtacgagaatcacttgcgtttttg

SEQ ID NO: 581 - DNA, 306 bp, Enterococcus faecalis
cgcgattgccatcgattgtatgcatcaagccttgttctttatagaaagctaagattggtgcgctactttcaatgttgactgccaaacgatttttaaccgtttcgggcttatcatcttctctttggtagaattcatgtccgccacagcgatcacaagtgccttcaacttttggcgggttgaataatttatgatacgttgcgccacatgtgcgacagatgaatcgtccagctaaacgctcgattaatacatcttcttctacatggatgtcaatgacagcatcaatttttttgtttaattctttaagca

SEQ ID NO: 582 - DNA, 203 bp, Enterococcus faecalis
tacgataattgcttgaattttttcaaataccatgtgtatattcctccaaaatagtcattttcttcatttatatgtgaacagttttttacagcgttaggagcagtgagccccatgttaagccgccgccaaatcctgttagcaccacgcgttgttgggaacctaaaattaaggtcccattttcaactgcttcatccaacaaaata

SEQ ID NO: 583 - DNA, 125 bp, Enterococcus faecalis
tagtaaagcagcacctgagtcatgggctgatttatattccatacctgtacctacccacggagagcgtggttgaattaacggcaccgcttgacgctgcatgttggcacccatcaaggcacggttgg

SEQ ID NO: 584 - DNA, 139 bp, Enterococcus faecalis
tgtttacggtcgttaacaccggcagtatcaagcgcaccacgaacgatatggtaacgtacccctggtaagtcttttacacgtccaccaccgtaataataccaccgcctgtgttcttgtaagttgtgaccgatacctggga

SEQ ID NO: 585 - DNA, 151 bp, Enterococcus faecalis
tcgaccttttgaaatcttaaagtttttggttgtagtattcaacgacaagtgcttcgtcgatttctgggtaaagttcatcacgttctggtaaacgagtgaagctaccttctaatttttcagtgtcaaagcttacgaatgctggacgtccaac

SEQ ID NO: 586 - DNA, 218 bp, Enterococcus faecalis
tcctacgaataaagcaacgccgccttcttctgcaacgtttttcatgtaatcgtaagctgcatctactaatttcactgttttttgtaagtcaatgatgtagataccgtttctttctgtgaagatatatttcttcatttttgggttccagcgacgagtttggtgaccaaagtgtacgccggcttctagtaattgtttcatagaaattactgccatgttgt

SEQ ID NO: 587 - DNA, 147 bp, Enterococcus faecalis
ggtccgtgttgtcctggtttgtaagggcgacgagctagttctttaccagtacctgataaagagatacctagacgacgagatactttccatgatggtccagtataacgagacattaaaaattcctccaataaataaatgtttttttgg

SEQ ID NO: 588 - DNA, 68 bp, Enterococcus faecalis; identical to SEQ ID NO: 569

SEQ ID NO: 589 - DNA, 183 bp, Enterococcus faecalis
ggtgatacccagccttctggtgcccctttacctttacccatacgtacgccgatagctttacttgtgtaagacttgtgagggaaaattttaatccatactttcccgccacgtttcatgtaacgagtcattgcaatacgggctgcttcgatttgacggttagtaatccagtgagattcagttgct

SEQ ID NO: 590 - DNA, 60 bp, Enterococcus faecalis
ccaatcgcattcgtcgcagaagcacaagcagtcacgatagtttgagaaggtccttttgca

SEQ ID NO: 591 - DNA, 103 bp, Enterococcus faecalis
tactttaccgtagcgaaccacttcaatttgagcaacacgtggtgtgtgtaatgggaatgtacgttccacaccaacaccatttgaaactttacagtactgtgta

SEQ ID NO: 592 - DNA, 243 bp, Enterococcus faecalis
ccagtaacgtctgttgtacggaagtagaattgaggacggtagttagtgaagaatggagtgtgacgtccgccttcttcttttgataatacgtatacgttcagctttgaattttgtgtgtggagtgattgtagctggtttagctaatacttgtccacgttcgatatcttcacgtgctacaccacgtaataaagcaccgatgttgtcgcctgcttcagcgtagtctaataatttacggaacatttc

SEQ ID NO: 593 - DNA, 149 bp, Enterococcus faecalis
gctgaaccttttgcacgaggacggaaacgtttcattgttggtccttcgttaacaaatgcttcagatacgactaagctttcaacgtctaagtcaaagttgttttctgcgttagcaactgctgacattaaaactttttcaatgattccagc

SEQ ID NO: 594 - DNA, 102 bp, Enterococcus faecalis
acgaatgctggacgtccaacagttgcttcaaccgcttctttaattgttgagatgttttgagatttttcacgaacaccgatcacttgaccaacttcaacgtgg

SEQ ID NO: 595 - DNA, 127 bp, Enterococcus faecalis
ataaatttttaatttcactgacttctttttgaatcgctggatctttttccaataattgctgaatcttttcgtgcgcatgaatcaccgttgtatgatctttgccgccaaattcggcaccaatttttgg

SEQ ID NO: 596 - DNA, 140 bp, Enterococcus faecalis
cgccgtagatagttgcgccacgtttctgtgcatgctcgagttcttctaaaaccagcattcctgcgccttcacccatcacaaaaccttttcgttctttatcaaaaggaatcgaagcccgagtcgcatcttctgttgtattt

SEQ ID NO: 597 - DNA, 130 bp, Enterococcus faecalis; identical to SEQ ID NO: 355

SEQ ID NO: 598 - DNA, 69 bp, Enterococcus faecalis; identical to SEQ ID NO: 451

SEQ ID NO: 599 - DNA, 93 bp, Enterococcus faecalis
caacgcgaacttcaccacgttcaacacggcctgtagcaacagtaccacgtccagtgattgagaatacgtcttcgactggcatcatgaatggtt

SEQ ID NO: 600 - DNA, 132 bp, Enterococcus faecalis
gcttcaggtacttcttgtgctttaccagtaccgaaaccaacgtgtccgtttttgtcaccgacaacaactaaagctgcgaaacgtaaacgacgtccacctttaacaacttttgttacacggttgatcgctaca

SEQ ID NO: 601 - DNA, 68 bp, Enterococcus faecalis; identical to SEQ ID NO: 569

SEQ ID NO: 602 - DNA, 171 bp, Enterococcus faecalis
cagcagccatttgtgcttcaatgtctgaaatactataaacgttttcgctagctacgccaacttcttttggttccatgttacggtaacgagccataccagtaccagctgggatgattttaccaatgataacattttctttcaatccaagtaatggatcttttttgccacgga

SEQ ID NO: 603 - DNA, 60 bp, Enterococcus faecalis; identical to SEQ ID NO: 330

SEQ ID NO: 604 - DNA, 151 bp, Enterococcus faecalis
taaacgttttcgctagctacgccaacttcttttggttccatgttacggtaacgagccataccagtaccagctgggatgattttaccaatgataacattttctttcaatccaagtaatggatcttttttgccacggatagcagcatctgtta

SEQ ID NO: 605 - DNA, 235 bp, Enterococcus faecalis
tccctttgcattcaccccgggcacagtaatgtgcgcacctaggcgaaatacaaacaagattaaaactgtaaataagatttttgatctaatgtctttgactttaaaggcgttctttaatagcttgaacaattagatcacctcgattgaaccaccagcagcttcgatagcttcttgtgctgatttcgagaatttagctgctttcacagttaattttttcgttaactcaccatctgca

SEQ ID NO: 606 - DNA, 70 bp, Enterococcus faecalis
gctgctccacctgctgctggtccagctactgctacaggagctgctgctgatacgtcaaatttttcttcga

SEQ ID NO: 607 - DNA, 98 bp, Enterococcus faecalis
gaacctacagtacgtccgccttcacgaatagagaaacgagttccgtcttcgatagcgattgggtgaattaattcaacgtccatagcaacgttatcacc

SEQ ID NO: 608 - DNA, 298 bp, Enterococcus faecalis
tacgtccgaataccccagttttttacgctggttaaagctatagttaaaaagttaattatttaacgatttcagtaacaacgcctgaacctacagtacgtccgccttcacgaatagagaaacgagttccgtcttcgatagcgattgggtgaattaattcaacgtccatagcaacgttatcaccaggcattaccatttcagtaccttctggcaattctacaacaccagtaacgtctgttgtacggaagtagaattgaggacggtagttagtgaagaatggagtgtgacgtccgccttcttc

SEQ ID NO: 609 - DNA, 129 bp, Enterococcus faecalis
ggtccaaagactacgccacctccacgccattgtggtgaacggattgaaccttgacgagcacgaccagttcctttttgacgccatggtttgcggccaccgccacgaacagcgctacggtttttaactgcg

SEQ ID NO: 610 - DNA, 202 bp, Enterococcus faecalis
ttttcaacagttccttcaacagttgcgcctgcaacagttggcgcaccaacttttgtagattcgccacctactaagataacttcgtcaaaaacaactttctcgccagcctcaacgtttaatttttcaacgtagattgcttgacctacttcaactttcacttgtttaccaccagttttgataattgcgtacatgctatacagca

SEQ ID NO: 611 - DNA, 218 bp, Enterococcus faecalis; identical to SEQ ID NO: 586

SEQ ID NO: 612 - DNA, 117 bp, Enterococcus faecalis
acttctaatccttttggtgctaagatgtatgccttaaccccgtcttcgtaatgaactaacgcgatgttagcagaacggtttggatcgtactcgatcgttttaacaaccgctgcgacg

SEQ ID NO: 613 - DNA, 130 bp, Enterococcus faecalis; identical to SEQ ID NO: 355

SEQ ID NO: 614 - DNA, 218 bp, Enterococcus faecalis
taattgaggtgatttaactaatgtagcaatctctttcaattgacgttcttcttcttgtaaaagttgatacgcttctttactcgtcactgcttcaatacggcgtactcctgcaccaattccagattcagaaacaattttgaaaatcccgatatcttctgtattagcaacgtgtgttccaccacataattcgatagagtaatccccaatattaactacac

SEQ ID NO: 615 - DNA, 85 bp, Enterococcus faecalis; identical to SEQ ID NO: 489

SEQ ID NO: 616 - DNA, 161 bp, Enterococcus faecalis
tacagataatagcatagatagtaaaccttcgcggtttggtagttttgccaacgcagtaatttgttccactgaagaaacttttccttcgatgacgccacctttgatttctaatgcttttgcatctttagcaaattcgtcgatgattttagctggtgctacta

SEQ ID NO: 617 - DNA, 161 bp, Enterococcus faecalis
gcagtaagtcttcccagacattttttacattcattaaatgtgttctagtcgcttcgtttaggacttgatatacgctgttctgtgggtactgctggaacgaactttttggcgcttgtggtcgtgcttgttgacgtggcgcatctgcttctttggcagctaca

SEQ ID NO: 618 - DNA, 218 bp, Enterococcus faecalis; identical to SEQ ID NO: 614

SEQ ID NO: 619 - DNA, 275 bp, Enterococcus faecalis; identical to SEQ ID NO: 446

SEQ ID NO: 620 - DNA, 80 bp, Enterococcus faecalis
tttcattgccaacgcgctgaatatctccgtctaaagcatacacagtaccagttaagaaatcaacgatgcgtcgtgcttgg

SEQ ID NO: 621 - DNA, 193 bp, Enterococcus faecalis
tttccgtgtaatgcgcgtaagtagtaaagttttgcacgacgtactttaccgtagcgaaccacttcaatttgagcaacacgtggtgtgtgtaatgggaatgtacgttccacaccaacaccatttgaaactttacgtactgtgtaagtttcgctgattccagcaccacggcgtttaattacaacaccttcgaata

SEQ ID NO: 622 - DNA, 169 bp, Enterococcus faecalis
tcttcagcagccatttgtgcttcaatgtctgaaatactataaacgttttcgctagctacgccaacttcttttggttccatgttacggtaacgagccataccagtaccagctgggatgattttaccaatgataacattttctttcaatccaagtaatggatcttttttgc

SEQ ID NO: 623 - DNA, 77 bp, Enterococcus faecalis
aacacggcctgtagcaacagtaccacgtccagtgattgagaatacgtcttcgactggcatcatgaatggtttgtcag

SEQ ID NO: 624 - DNA, 71 bp, Enterococcus faecalis
ccttaaccgataatttcttctacagatttaccgcgaagtgctgccacttcttcggcacgttttaattgttt

SEQ ID NO: 625 - DNA, 70 bp, Enterococcus faecalis
taaggtccggtcataccgacatcacttaagaaggctgtccctttcggtaaaatccgagcgtcatttgttt

SEQ ID NO: 626 - DNA, 80 bp, Enterococcus faecalis; identical to SEQ ID NO: 620

SEQ ID NO: 627 - DNA, 120 bp, Enterococcus faecalis
ttgaacgtctgtattggctgtgataaattccacacctttaacgttttcttcgatcatacggtttacagcgtttccgccgccgccacctacaccgataactttaatgactgcaccgttgtt

SEQ ID NO: 628 - DNA, 239 bp, Enterococcus faecalis
agttttccgtaagtagtgtccgcttcttcccatgcgtaatcaatgtccgcacgtaatgtgtgaagtggtacagttccttcagagtatccttctgaacgagcgatatccgcaccgtttagacgacctgatacttgagttttgattcctttagcgccagcacgcattgcgcgttggatggcttgtttttgagcacgacggaaagcaacacggttttctaattgacgtgcaattccttcgcc

SEQ ID NO: 629 - DNA, 237 bp, Enterococcus faecalis
gaacatttcaacacctgtaacagttgttttagatgtttcgtctttaataccaacgatttcaacttcgtcaccaacgcgaacttcaccacgttcaacacggcctgtagcaacagtaccacgtccagtgattgagaatacgtcttcgactggcatcatgaatggtttgtcagtatcacgttctggagttgggatatattcgtcaactgcagccattaattctaagattttttcttcata

SEQ ID NO: 630 - DNA, 200 bp, Enterococcus faecalis
aggaaacgctgctaagacaacgccttctttgtttttatctttaccagtgataacttttactttatcgccttttttaacaaacattactgtttcgcacctcctttaacgtgggctcgagattataatacttctggtgctagagaaacgatcttcatgaagttgttttcacgtaattcacgtgcaactggtccgaagatacg

SEQ ID NO: 631 - DNA, 177 bp, Enterococcus faecalis
tcttttgataatacgtatacttcagctttgaattttgtgtgtggagtgattgtagctggtttagctaatacttgtccacgttcgatatcttcacgtgctacaccacgtaataaagcaccgatgttgtcgcctgcttcagcgtagtctaataatttacggaacatttcaacacctgta

SEQ ID NO: 632 - DNA, 262 bp, Enterococcus faecalis
aaattgcatcattaaaactgccccaattgcaaaatttggcgcaattaagccgccgatggctttttctcgagataggtttgtcaattcgttgatttgttcctccgtaaagcctgtcgtcccaacaactggcgccataccatgttccaacgcaaaacgtgtatttggataggcggcttcaggaaccgtaaaatcaatccaaacatctggtttgacagctaggacttcttctaagcgctgaaaaacgggaattgctgtttcatca

SEQ ID NO: 633 - DNA, 226 bp, Enterococcus faecalis
agcatcaacgtgggccatgataccaatgttacgagttttttcaagtgaaaattctcttgccattttgtatgtttactcctctctttatttaaatcgattgtaaattgactttctgctgccactttacgcgacagacagagaggatcttaccaacgataatgagcaaatgcgcggtttgcgtctgccattttgtgtgtgtcttcgcgttttttaacagaagcgccag

SEQ ID NO: 634 - DNA, 183 bp, Enterococcus faecalis; identical to SEQ ID NO: 589

SEQ ID NO: 635 - DNA, 175 bp, Enterococcus faecalis
tgcaggaatgtctgtaccagcttctacgaagtatttatctggtgtttgaacagttaagttatagtctgttggttcgttcaagtaagggaactcaacaggcatgatttcgttaaagatgatcttaccaactgtggtgattaagattcgttctttttgccaatcagtaaatggtttg

SEQ ID NO: 636 - DNA, 247 bp, Enterococcus faecalis
taaccacacctgggtttgcttgtccacgagttgctttcataatttgtccaacaaggaaaccaactgcacggtcttttccgtttttaaagtcatcaattgattgttggttgttgtctaaaacttcgttaatcattggtaataattgcgctggatcagataactgaacaaggccttttgcttcgacaacttctttagcgtctccaccgttttcaattaactctttgaacactttcttcgcaattttcga

SEQ ID NO: 637 - DNA, 353 bp, Enterococcus faecalis
gcatgcccggttaattcgaatgaaacgattcggccggagcctgttcgtttaaaagaacctttaatcattgataggccttctttcctgtcaacaagagagattaagcgttgattgcttcgatcataacttttgtatacggttgacggtgaccttgtttacggtgagagtgttttttaggtttgtattggaaagtcacgactttcttttgtttgccgtgtttttcaacagttccttcaacagttgcgcctgcaacagttggcgcaccaacttttgtagattcgccacctactaagataacttcgtcaaaaacaactttctcgccagcctcaacgtttaatttttcaacgtagatt

SEQ ID NO: 638 - DNA, 158 bp, Enterococcus faecalis
atcttttgctaaagctactgcttcttcaactgagtaagcttttgtagcatcaacttttttcaatgcttcttgcatttttttgctctttttagccattttgtttcctccttgattgtggttataacggttgtacctcccacgtctttcatatctttaaa

SEQ ID NO: 639 - DNA, 197 bp, Enterococcus faecalis
  misc_feature (1)...(197): n = A,T,C or G
ggtgtttcttcaacgaataactcttcagttgcttggtcttccccttggttaccttcgatgaaagcgtcagccattttagcagtgattaatttcacagcgccggattgcatcatcatttgaagggattacaacatcgatctcatcaggatcacagtttgtatcaaccattgcaacgattgggaatggttaatttgngt

SEQ ID NO: 640 - DNA, 231 bp, Enterococcus faecalis
tcaaaactaaatggacgagttactacaccaactgttaaagcgcctaattctttagcgatttttgcaactactggggcagcacctgtaccagttccgccacccataccagcagtaatgaaaatcatatccgcgccttgtaatgattctgaaatcacttgttcactttcttctgcagctttttggccaacttcaggttgtgaaccagcacctaaaccacgagtgtatttaggg

SEQ ID NO: 641 - DNA, 183 bp, Enterococcus faecalis; identical to SEQ ID NO: 589

SEQ ID NO: 642 - DNA, 145 bp, Enterococcus faecalis
ctgcatgttggcacccatcaaggcacggttggagtcatcgttttctaagaaaggaatacatgctgttgcgactgcgactacttgttttggtgaaacgtccatgtagtcaactttgtctacggcaacttctaagttttcactttgt

SEQ ID NO: 643 - DNA, 278 bp, Enterococcus faecalis
tttgtagttaattgtacctcttcagcatcttttcctaattcttctacgataattgcttgaattttttcaaataccatgtgtatattcctccaaaatagtcattttcttcatttatatgtgaacagttttttacagcgttaggagcagtgagccccatgttaagccgccgccaaatcctgttagcaccacgcgttgttgggaacctaaaattaaggtcccattttcaactgcttcatccaacaaaataggaatactagcagctgaggtattgccatatt

SEQ ID NO: 644 - DNA, 206 bp, Enterococcus faecalis
ttttcaacagttccttcaacagttgcgcctgcaacagttggcagcaccaacttttgtagattcgccacctacctaagataaccttcgtcaaaaacaacctttctcgccagcctcaacgtttaatttttcaacgtagattgcttgacctacttcaactttcacttgtttaccaccagttttgataattgcgtacatgctatacagca

SEQ ID NO: 645 - DNA, 127 bp, Enterococcus faecalis
  misc_feature (1)...(127): n = A,T,C or G
acttgcgcgtagatgtttttgttagaacggaaaatgttcaagcgtgggcacctcagcagtaccagagattttgttacgtacacngacgatgtctcttttgacgtgttttgtttttatctggttttgt

SEQ ID NO: 646 - DNA, 137 bp, Enterococcus faecalis
gaattgagttgataaattcattcgtaaacagtttcgcctactaacatatttgactttggcatctggttgattcactaacatttgatgaccaatagcatgcatcaaatgggttttccctaaccctacaccaccataga

SEQ ID NO: 647 - DNA, 219 bp, Enterococcus faecalis
tcctacgaataaagcaacgccgccttcttctgcaacgtttttcatgtaatcagtaagctgcatctactaatttcactgttttttgtaagtcaatgatgtagataccgtttctttctgtgaagatatatttcttcatttttgggttccagcgacgagtttggtgaccaaagtgtacgccggcttctagtaattgtttcatagaaattactgccatgttgt

SEQ ID NO: 648 - DNA, 168 bp, Enterococcus faecalis
acgtaataataccacgcctgtgttcttgtaagttgtgaccgatacctgggatataagcctgtaacttcgattaagtttgacaaacgaacacgggcatatttacgtaaagctgagttcggttttttaggtgtcatcgtacccacacgtgtacaaactccacgtttttgc

SEQ ID NO: 649 - DNA, 149 bp, Enterococcus faecalis
ttgcatttttttgctctttttagccattttgtttcctccttgattgtggttataacaggttgtacctcccacgtctttcatatctttaaatatgaaaccgaacctgagaagctaccttctttgagtaagtgtggaataaaaattattct

SEQ ID NO: 650 - DNA, 128 bp, Enterococcus faecalis; identical to SEQ ID NO: 547

SEQ ID NO: 651 - DNA, 184 bp, Enterococcus faecalis; identical to SEQ ID NO: 307

SEQ ID NO: 652 - DNA, 135 bp, Enterococcus faecalis
ccaagaattcttttgtaaacatttctgttggcattatgctttctctccttttgaacgttgttttttggcaaacgaaagcagaacttcttgtttattctctaagctaccttcaacaacgtgttgctcgatttcagc

SEQ ID NO: 653 - DNA, 227 bp, Enterococcus faecalis
tcgaaaacgtccaaggcttctaattgttctttaaacgcatgtaacacagttggcacctgtttctccttgcaagaattctttcgcagcatcatctaaaactggatgttcattaaagaacaagtttgatagttccacaatttcagctgcataactcatttgtggttgatacaagcctaactaattgttttaaccattcgattttttcaggagatggattttcttcaaca

SEQ ID NO: 654 - DNA, 151 bp, Enterococcus faecalis
aacaaccgctgcgacgttatctttattacgtttgaagtcaatcacacggtattgacgtttgtgaccgccaccttggtgacgaaccgtaatgcagaccgttgttgttacgaccggcattgttttttaatggctgtaacaatgatttttctgg

SEQ ID NO: 655 - DNA, 148 bp, Enterococcus faecalis
ttgcatttttttgctctttttagccattttgtttcctccttgattgtggttataacaggttgtacctcccacagtctttcatatctttaaatatgaaacgaacctgagaagctacttctttgagtaagtgtggaataaaaattattct

SEQ ID NO: 656 - DNA, 177 bp, Enterococcus faecalis
acttttttcatactagttttcctcccatttcttcaagcaaattacaccattatggccaccaaagccaaacagaattacctaattgtatagtccgctgtaatgtcacagtgcaccttctgtgacataatctaaatcacaatctggatcagcaacttggtagcctactgtcggatgagc

SEQ ID NO: 657 - DNA, 127 bp, Enterococcus faecalis
tcgattgtaaattgactttctgctgccactttacgcgacagacagagaggatcttaccaacgataatgagcaaatgcgcaggtttgcagtctgccattttgtgtgtgtcttcgcgttttttaacaga

SEQ ID NO: 658 - DNA, 191 bp, Enterococcus faecalis
cgcaccaacttttgtagattcgccacctactaagataaccttcgtcaaaaacaactttctcgccagcctcaacagtttaatttttcaacagtagattgccttgacctacttcaactttcacttgtttaccaccagttttgataattgcgtacatgctatacagcacctccttcttctagacttagactcgc

SEQ ID NO: 659 - DNA, 176 bp, Enterococcus faecalis
ccttgttgtgcttcgacctttttcatcaaatgatcatcgacgaaaggtcctttttttaaactacgacccatggtgaacctcctctcaaaatgtacgacacatggtcaaaaaaattatttagtacgacgacgaacgataagtttgtctgatttagcttttttattacgtgttttgta

SEQ ID NO: 660 - DNA, 129 bp, Enterococcus faecalis
acttgcgcgtagatgtttttgttagaacggaaaatgttcaagcagtgggcacctcagcagtaccagagattttgttacagtacacagacgatgtctcttttgacgtgttttgtttttatctggttttgt

SEQ ID NO: 661 - DNA, 133 bp, Enterococcus faecalis
ggtaaacgagtgaagctaccttctaatttttcagtgtcaaagcttacgaatgctggacagtccaacagttgccttcaaccgcttctttaattgttgagatgttttgagatttttcacgaacaccgatcacctt

SEQ ID NO: 662 - DNA, 162 bp, Enterococcus faecalis
acaccaccgacaattgcgttttcaaactcgaagcctttaccttcttcatttggtgtaaattcaacccatacgtgaccagtattgtcctttaccaccagactgacgaacgaatttaccttctgctttagtcgcagcacggaatgtttcgcggtaagatacttg

SEQ ID NO: 663 - DNA, 182 bp, Enterococcus faecalis; identical to SEQ ID NO: 556
  misc_feature (1)...(182): n = A,T,C or G

SEQ ID NO: 664 - DNA, 256 bp, Enterococcus faecalis; identical to SEQ ID NO: 480

SEQ ID NO: 665 - DNA, 220 bp, Enterococcus faecalis
tcctacgaataaagcaacgccgccttcttctgcaacagtttttcatgtaatcgtaagcctgcatctactaatttcactgttttttgtaagtcaatgatgtagataccgtttctttctgtgaagatatatttcttcatttttgggttccagcgacgagtttggtgaccaaagtgtacgccggcttctagtaattgtttcatagaaattactgccatgttgt

SEQ ID NO: 666 - DNA, 167 bp, Enterococcus faecalis
ttaccttcgatgaaagcgtcagccattttagcagtgattaatttcacagcgcaggattgcatcatcatttgaagggattacaacatcgatctcatcaggatcacagtttgtatcaaccattgcaacgattggaatgtttaatttgtgtgcttcttgaacagcaatgc

SEQ ID NO: 667 - DNA, 69 bp, Enterococcus faecalis
ccagaaccttctactgcaggtttcataaggatacggccgccaccgaatacgccaattacttcgtgcggg

SEQ ID NO: 668 - DNA, 94 bp, Enterococcus faecalis
caacgcgaacttcaccacgttcaacacggcctgtagcaacagtaccacgtccagtgattgagaatacgtcttcgacctggcatcatgaatggtt

SEQ ID NO: 669 - DNA, 229 bp, Enterococcus faecalis
ataggttggccaagggacataagttaaactttcctcgttacctaaaatttgccatagttcttcaccaatatgtggcgcgattggcgcaagtaattggacaaatccttccacatattcataaggtaaggcatccactttattggcttcattcacaaaaaccattaattgagaaatcgctgtattaaagtgcaagtttgccatatcttctgtcacttttttaaccgtttgg

SEQ ID NO: 670 - DNA, 311 bp, Enterococcus faecalis; identical to SEQ ID NO: 473

SEQ ID NO: 671 - DNA, 195 bp, Enterococcus faecalis
aagctttcaacgtctaagtcaaagttgttttctgcgttagcaacctgctgacattaaaactttttcaatgattccagcagacttgttcggtgtgaatttcaagattgaaattgcatccgcaacgcttttccctctgataagatcgattactaaacgtgctttacgaggtgaagtgcgaactgtttttgcagttgc

SEQ ID NO: 672 - DNA, 133 bp, Enterococcus faecalis
ggtaaacgagtgaagctaccttctaatttttcagtgtcaaagcttacgaatgcctggacagtccaacagttgccttcaaccgcttctttaattgttgagatgttttgagatttttcacgaacaccgatcactt

SEQ ID NO: 673 - DNA, 280 bp, Enterococcus faecalis
tcagcaatcagttcccctaaccatttgcctggtgtttcttctaagacggctaaaaggtcttttcctgttatggccaattcatgtctttgatggatgggtaatgccttaactaactcttttgttacttgtacttgactctcttgttggtaataatataaaagcctttcaacaagtacctgctgattcttcgcctaattcataaagcatcattggctgccagtcgttactcaagcgaaaacgcaaaccgcgtactaattgtgaaacgttttgaattaattga

SEQ ID NO: 674 - DNA, 403 bp, Enterococcus faecalis
taataggtagttttcaacagataaaacatcacgaacttgtaataattgttttggatcaattgaaccttctgtcaacggtgcaccacaggtggatgatgtcgccttcagcaactttcatacgtgcagtgtaagggacagtataggtacgtgtatctgtttttcctttgatggttacttctttttgacgtgtggcaggatcttcagaaatatcgataacttcaccggttacttctgtaatcactgcttgtcctttcggattacgtgcttcaaagatttcttggatacgaggtaaaccttgagtgatatcgtcaccggcaaccccaccggtatggaacgtacgcatggttaactgtgtaccaggttccccgatagattgagcggcgattgtaccaactgcttctcc

SEQ ID NO: 675 - DNA, 141 bp, Enterococcus faecalis
cacccataccagagataacctgtttcaccagtttcaacgtttgtttcaacgcggaatgatggatcttcttcagcaagtttttgtagagccacagcccattttatcttggtcagcttttgatttaggttcaacagcgacttg

SEQ ID NO: 676 - DNA, 253 bp, Enterococcus faecalis
gaaattttttctaataaaggatgaaattcagcgatagcggcctaaggttttttcttcaattttaaaatctaattggcctagcaaagcagtaagccccgcatcattcgcagagcatcttcatgaaaccgctcatggggattaccgacagcacgaatggtttgattagttaaatcttcgataccatcaaataaatcaatgatttcgcctgtgctgtcgagcgccaaggcattaatcgtaaaatctcgccgtttta

SEQ ID NO: 677 - DNA, 184 bp, Enterococcus faecalis
ggaatgttttccaatggtaatgcgttacctactttaatatctgcttctggaccagatactaggcgcatgcctaccttctaatccttttggtgctaagatgtatgccttaaccccgtcttcgtaatgaactaacgcgatgttagcagaacggtttggatcgtactcgatcgttttaacaaccgct

SEQ ID NO: 678 - DNA, 85 bp, Enterococcus faecalis; identical to SEQ ID NO: 489

SEQ ID NO: 679 - DNA, 102 bp, Enterococcus faecalis
tactttaccgtagcgaaccacttcaatttgagcaacacgtggtgtgtgtaatgggaatgtacgttccacaccaacaccatttgaaactttacgtactgtgta

SEQ ID NO: 680 - DNA, 69 bp, Enterococcus faecalis
tccatactttcccgccacagtttcatgtaacgagtcattgcaatacgggcctgcttcgatttgacggtt

SEQ ID NO: 681 - DNA, 184 bp, Enterococcus faecalis; identical to SEQ ID NO: 307

SEQ ID NO: 682 - DNA, 226 bp, Enterococcus faecalis
tcgaaaacgtccaaggcttctaattgttctttaaacgcatgtaacacagttggcacctgtttctccttgcaagaattctttcgcagcatcatctaaaactggatgttcattaaagaacaagtttgatagttccacaatttcagctgcataactcatttgtggttgatacaagctaactaattgttttaaccattcgattttttcaggagatggattttcttcaaca

SEQ ID NO: 683 - DNA, 258 bp, Enterococcus faecalis
gaaataatcagcaaactattcccaccttgactcaagaacgggaaagtaattcctgttaatggaataatcccagtaatcccaccaacattaataaagacttgaattaataacattgtaccaattccaatacacattagtgaattaaaaggtttcttcgagcgtacaccgactaaaataattcgcgcaatcataaacatcaacaatcctaaaatcgctagaccgccgataatgcctaactcttctaaagtaatcgcaaag

SEQ ID NO: 684 - DNA, 128 bp, Enterococcus faecalis
tgtgttgctgaacgtaatgttgtagcataaccaaacatttcagcctaaaggtaccatcgcattaacgatttgagagttaccagtgtgccttccataccttcaacacgtccacgacgacttgttacgtg

SEQ ID NO: 685 - DNA, 119 bp, Enterococcus faecalis
tgttcttcgtaatattgtaccaagcgatccgcatatttactcatgcggaagaaataggattcttctttaacctaattcgacttcgtgaccacttggtgctttcccaccaatgacattgc

SEQ ID NO: 686 - DNA, 219 bp, Enterococcus faecalis
agagcggccagcctttaccaatgttgattaattcgtgttgttcgttaccaactgaaccgattgttgcacaggcaagttgcctaagatcatacgaaccttcgccagagtttaagcaggattaatacgtatttgccttctttaccaagtacttgcgcgcttgttccagctgaacggattaattgtccacctttaccaggtttcatttcaatgttgtggata

SEQ ID NO: 687 - DNA, 125 bp, Enterococcus faecalis
cctcaaaattagcagtttagtttttttatcgtcagcaacagtggccacgataagttctagttggtgcaaattcacctaatttatgtcctaccatgtcttcttgaatgtaaacagggacatgtttc

SEQ ID NO: 688 - DNA, 150 bp, Enterococcus faecalis
cacgtttgtcacgagggatgtctacctcctgcaatacgagccattattcgttacacctcctaattatccttgacgttgtttatgttttggatttgctgggcaaataaccataacacgtcctttacggcgaattactttacaatgttcaca

SEQ ID NO: 689 - DNA, 147 bp, Enterococcus faecalis
tcatggattggtttatttaataaagcatcacggacgctgcccccgacaaaatacgcttcaaagccctgtgcattgatttcacgaataaccgggagcggcttctttaaattcgtttggaatagttgtcaatttcatagcatctgttcc

SEQ ID NO: 690 - DNA, 190 bp, Enterococcus faecalis
gcatgaattaaataaaccatgatatcatcccgacaaccaattaccttcagcaagattggccttcgccacgacgaatcaattcttctgcattccctagccacacatcggttccgtgagacagtccagaaatttgaagtaattctgcaaaagttgatggatgggtctgttctaacatacctcgaacgaaacg

SEQ ID NO: 691 - DNA, 197 bp, Enterococcus faecalis
ttcaacgcggaatgatggatcttcttcagcaagtttttgtagagccacgcccattttatcttggtcagcttttgatttaggttcaacagcgacttggataactgggtcagggaattcaatagattcaagaataactggtgcatctaatgcacataatgtatcaccagttgttgtgtcttttagaccaacagcagcag

SEQ ID NO: 692 - DNA, 168 bp, Enterococcus faecalis
taatttgacgatttcaaaatgtaatttcaagacatcaccagggaccacctttttgacggaatttggcctttgttgataccgccaatataggctgtttcaccttcaaattgatccatttttaagattaaaatcgaacctacttgtgccaatgcttcaataatcaaaacg

SEQ ID NO: 693 - DNA, 219 bp, Enterococcus faecalis
  misc_feature (1)...(219): n = A,T,C or G
agancggccagctttaccaatgttgattaattcgtgttgttcgttaccaacctgaaccgattgttgcacaggcaagttgcctaagatcatacgaaccttcgccagagtttaagcaggattaatacgtatttgccttctttaccaagtacttgcgcgcttgttccagctgaacggattaattgtccacctttaccaggtttcatttcaatgttgtggata

SEQ ID NO: 694 - DNA, 180 bp, Enterococcus faecalis
ccagcagcttcagcttctttagctttttcgcctttagcgaatactaaaacagtttgtgttttaccagttccgtttggaagcacaacctgcctccacaggatttgttggtctgcttttttagggtcaacagttcaatttgtaagcaaccttcaactgttgcgtcaaatttcgcgatgtttg

SEQ ID NO: 695 - DNA, 131 bp, Enterococcus faecalis
  misc_feature (1)...(131): n = A,T,C or G
ggtaaacgantgaagctaccttctaatttttcagtgtcaaagcttacgaatgctggacgtccaacagttgccttcaaccgcttctttaattgttgagatgttttgagatttttcacgaacaccgatcactt

SEQ ID NO: 696 - DNA, 123 bp, Enterococcus faecalis
agacgtttgtgagtacgcatttcgaattgttcgcgagaatctttgtatttatgagtcgcacagaataactgtgtaaagtgagcgttctgttggtaatggaatcggacctgatacgtcagctcc

SEQ ID NO: 697 - DNA, 147 bp, Enterococcus faecalis
cacttctaaacctgttgcttgtaatgaacgaattgctgcttcacagtccagaaccaggtcctttaacctgttacagtctacagttttaagtccatgttccattgccactttagttgcggcttctgcagccatttgagcggcaaaagg

SEQ ID NO: 698 - DNA, 277 bp, Enterococcus faecalis
tacgtccaattggtgttttaccttcaccaccaccgtgtgggtgatcgttagggttcattacgcctaccacgaacagttgggcgtttacgcatccaacgagagcggccagcctttaccaatgttgattaattcgtgttgttcgttaccaactgaaccgattgttgcacggcaagttgctaagatcatacgaacttcgccagagtttaagcggattaatacgtatttgccttctttaccaagtacttgcgcgcttgttccagctgaacggattaattgt

SEQ ID NO: 699 - DNA, 196 bp, Enterococcus faecalis
actgattctgcttctttttccagctgtttcgcctgattgttgttccgcaaatttggttagtgcagtcaacaggtgattaaatcatcatcgtcatcagtccatatcgcgtaactcaatctcagcttcctcaatgtccaagacacgcatgtctaaaccaagtgattgtaattctttcactaatactcggaatgattca

SEQ ID NO: 700 - DNA, 172 bp, Enterococcus faecalis
aacgttttcgattaattctgctttatttgccatggatcatttcacctcctctataagagatacgatgtttttacacacctaaagttccgtctatttttgagtggtccaaaaacagacagcaaatattgatctggttcaatattctgttaacaagatagcataagaaagttgt

SEQ ID NO: 701 - DNA, 125 bp, Enterococcus faecalis
gtattgacgtttgtgaccgccaccttggtgacgaaccgtaatgcgaccgttgttgttacgaccggcattgttttttaatggctgtaacaatgatttttctggtgttgaagttgtgatttcagcga

SEQ ID NO: 702 - DNA, 124 bp, Enterococcus faecalis
tccacgattacaactgatgctgctgattcaaatttctcagcggcctgcttgaactagggtttcttttttagcagattgcctgcttcacctcatttatttcaccctcctgattttgatggtggag

SEQ ID NO: 703 - DNA, 158 bp, Enterococcus faecalis
gacgttactaaaaatcgtctgatcatcataagctattttacacgaaatcttgaaaaaaggatagttctaaaaacaaaccttttattctcaaggaaaattatgcgttgccgccgtttttcttgatgatttcttcttgaacagacttaggtacgtcttca

SEQ ID NO: 704 - DNA, 234 bp, Enterococcus faecalis
agaagctgtttgtttccaatgacgctttggtaataccaagtaagactggacgactagtagcagggacgccaccagcaacctaatgtgtcgtagttacggtctttaaattctgcgatgtccattaatgttcctggaaggatttcagtgtcacctggatccattacgcggattttacgtaacatttgacgaaccattacttcgatatgtttgtcgccgatttctaccccttgcata

SEQ ID NO: 705 - DNA, 131 bp, Enterococcus faecalis
ttcattagagcgtcaactgtttttggtgttgggttcacaatgtcaattagacagtttgtgagtacgcatttcgaattgttcgcgagaatctttgtatttatgagtcgcacgaataactgtgtaaagtgagc

SEQ ID NO: 706 - DNA, 134 bp, Enterococcus faecalis
agctaaaatcatatgaatacctgctgcccgtgccatttgggctaaacggataatcgcatcttctacttcattacttgccaccatcattaaatcagcctaactcatccacaatgacaacaataaatggcagaatc

SEQ ID NO: 707 - DNA, 91 bp, Enterococcus faecalis
ccacacgtgtacaaactccacgtttttgcggagagttaacagtttgtttgagttttcttaaaactgttatatcctttgtttaaggctggtg

SEQ ID NO: 708 - DNA, 218 bp, Enterococcus faecalis
  misc_feature (1)...(218): n = A,T,C or G
tctaaaatagataaaatatcggctaagttctttttgattaactcttttcctgacgttggattataaatcactctagcttttttcatggtttgcctgctactttcttatcgttttgaaagctcttcttgcnaataacttgttaaccacacctgggtttgcttgtccacgagttgctttcataatttgtccaacaaggaaaccaactgcacggtcttttc

SEQ ID NO: 709 - DNA, 160 bp, Enterococcus faecalis
accgtgtgggtgatcgttagggttcattacgctaccacgaacagttgggcagtttacgcatccaacgagagcaggccagcctttaccaatgttgattaattcgtgttgttcgttaccaactgaaccgattgttgcacggcaagttgctaagatcatacga

SEQ ID NO: 710 - DNA, 178 bp, Enterococcus faecalis
tcaatgctgcaaagcctgcaatcccaatttcacatactgtggcttctgtcccaccagttaccatcatgtccgctaaaccatatttaatcgtgcgaaaagcttcaccaatcgcattcgtcgcagaagcacaagcagtcacgatagtttgagaaggtccttttgcacctaaacgaatcga

SEQ ID NO: 711 - DNA, 184 bp, Enterococcus faecalis
gctttttctttgcctaataattcgatggtttcgcctaattcaggaccatgcatttgtccagaaacagcaattcgaattggcataaacaagtttttgcctttaacgccggtttctttttggacggctttaatcgctgctttaatacttgggacatcgaaaacgtccaaggcttctaattgttctt

SEQ ID NO: 712 - DNA, 155 bp, Enterococcus faecalis
cctaattgaatcactgtttctgcttttgaatgttttaatgcttgaacagtctgtattggctgtgataaattccacacctttaacgttttcttcgatcatacggtttacagcgtttccgccgccgccacctacaccgataactttaatgactgcac

SEQ ID NO: 713 - DNA, 337 bp, Enterococcus faecalis
agcagattcaccacttaaacctgaatgcgtgctcgtaccaaaaccaaattttttcaaatacctccatccatttttcatcacccattttttgttctagttttaccataccaatattactagaccaagaaatggcttgacgataattcaaatattctttgccgttcaaccgagtgtagtcatggtcattcacagttacatccccaacctgaattccaccaacacgattgaataattcattaggattaaactgtccttgttccatagaagcagctgttgtaaataatttgattgttgagcctggttcataaggactttcaactaataggttctgccacgt

SEQ ID NO: 714 - DNA, 125 bp, Enterococcus faecalis
tgcaacagttggcgcaccaacttttgtagattcgccacctactaagataacttcgtcaaaaacaacctttctcgccagcctcaacagtttaatttttcaacgtagattgcttgacctacttcaac

SEQ ID NO: 715 - DNA, 207 bp, Enterococcus faecalis
tagtaaaggctaagacaccattgccatcaggagaaggatcgccttcttgaacaaagcgtaaatcttcgtaacctaattggttggaaatcacgatctggatttacatttgtcaaatgatagccatcttcgttagctccaacaatggcgttggctaaatcttgaacagctaaatctgcataaattttaacatcttcggaaacattgact

SEQ ID NO: 716 - DNA, 97 bp, Enterococcus faecalis
cgtccatagctaacatggatttttcagtgatcactgggcagtttgattacgtctagtaattccattatgcaagcacctcctcaatttgagtaagagc

SEQ ID NO: 717 - DNA, 144 bp, Enterococcus faecalis
cgcaagttgctctttaaatttcgctaaattctcttctgcttcaggcatgtccattttattggcaacaataatttgaggtcgttccatcaaacgtaaattgtgtgaagccaattctttattgattgccaaataatcttcgtaagg

SEQ ID NO: 718 - DNA, 175 bp, Enterococcus faecalis; identical to SEQ ID NO: 635

SEQ ID NO: 719 - DNA, 81 bp, Enterococcus faecalis
  misc_feature (1)...(81): n = A,T,C or G
cacganttgctttcataatttgtccaacaaggaaaccaactgcacggtcttttccgtttttaaagtcatcaattgattgtt

SEQ ID NO: 720 - DNA, 419 bp, Enterococcus faecalis
tctattttagcaagaaaggcctgtctctagcaatgaaaactttttggttatgtataaaaaaagaagatagcctaggcctacctccttgttaatgccttatttaccatcaagaatatttaagcggacctttttcggaccatcgatacgtacactataaacaattgtccgaattgcttttgcaacacgcccttgtttaccaatgatacgtccaatatcttctttggccacagtcaaattatactcgaggaaatcagttgattcctcaatttctaatgagactgcttcaggttgactgactaacggacggacaatagttaaaattaactctttcacatctgccatattcaatcaccttatttcttaacgtttttagcttcatgatgttttttcataacgccttcttttgaaaggatgttacg

SEQ ID NO: 721 - DNA, 184 bp, Enterococcus faecalis; identical to SEQ ID NO: 307

SEQ ID NO: 722 - DNA, 202 bp, Enterococcus faecalis
ctttttcagcggcacgttcagcaactagtttaccaacagcctgcagcctgtttctgtttttgttccacctgaaatttctttatccaaggcagaggcacttgctagcagtcacacccgctacgtcatcaatgacttgcgcgtagatgtttttgttagaacggaaaatgttcaagcgtgggcacctcagcagtaccagagattt

SEQ ID NO: 723 - DNA, 116 bp, Enterococcus faecalis
tattcagcagccttcgaataattgaatttcttttgaatcttcagttaatgtaacgatcagcctttgcgacagtttttttgtataacctgcatatttacccatgcgtttgaattttg

SEQ ID NO: 724 - DNA, 226 bp, Enterococcus faecalis; identical to SEQ ID NO: 633

SEQ ID NO: 725 - DNA, 185 bp, Enterococcus faecalis
ggtgatacccagccttctggtgcccctttacctttacccatacgtacgccgatagcctttacttgtgtaagacttgtgagggaaaattttaatccatactttcccgccacgtttcatgtaacgagtcattgcaatacagggctgcttcgatttgacggttagtaatccagtgagattcagttgct

SEQ ID NO: 726 - DNA, 281 bp, Enterococcus faecalis
ggcgtttctacttcgacatagccattgccatctagataacgacggatttcgcctaataatttgactgcgtttcatgaaacagatcaaagcctttctttgttactgattaaatccaaatagcgttgacgatagcgttgctccacattcgttaatccatggtatttatctggcaatggacgcaaagctttagttaataacgtaattgtttgagctttaacagtaacttcccccgtattggttttcattacttgacctgtcacaccaaagaagtcgcctaagtc

SEQ ID NO: 727 - DNA, 93 bp, Enterococcus faecalis; identical to SEQ ID NO: 599

SEQ ID NO: 728 - DNA, 203 bp, Enterococcus faecalis
gcacggtagataactggttttttggtacgccaatcatgtggataacctatgcgtaaagaaatctaattttaataacgcgcctttttcttctaataacctcagtaatcattggattcgctttgtcatagaaaattccttcaaaaccaggtgcttcatctgtaaagaccccacgactgtcaacaggagaaataacaggtaaatca

SEQ ID NO: 729 - DNA, 253 bp, Enterococcus faecalis
tacttgttctaatgaagattcatcaacttttggacgtgtattttgttctctgcgaatatcccaatcgccaaaagcacttgcttcttcttgtgattttggttgatccatttccacagattgagttgtttgttgcattggttgaaccgcttgtcttgtttgacggtgcggttttctatccttttttgattcatcaatacctgtagcgattactgttacacgaatttcgtcgcctaaatcttcattgattgatgta

SEQ ID NO: 730 - DNA, 186 bp, Enterococcus faecalis
ggtgatacccagccttctggtgcccctttacctttacccatacgtacgccgatagcctttaccttgtgtaagacttgtgagggaaaattttaatccatactttcccgccacgtttcatgtaacgagtcattgcaatacagggctgcttcgatttgacggttagtaatccagtgagattcagttgct

SEQ ID NO: 731 - DNA, 144 bp, Enterococcus faecalis
gcttcatcaaagcggcgtgtttcttgttgaatttcgccaccagataataggactttggcctggcgtttttcttcataagctaaacctttttttacaaagttcatagagttcaagttctttaattccgctttagtaccaaattct

SEQ ID NO: 732 - DNA, 127 bp, Enterococcus faecalis
tatggccttttcctaataaattacccgcacgccaatttcgagaatggacacttgtacaagtaacaattaaatccccaacaccacttaaaccaataaatgttaatgggtttgctcccatcgcaacccc

SEQ ID NO: 733 - DNA, 258 bp, Enterococcus faecalis
ggtaaatttctttacagttctgattgacgatatggaccatattctcccggatgagcaggtgattcatcccattccatccctaaccatgctaagttttccaactgacttttctcgccgtcttcgatgttccgtttttggtcggtatcctcgatacgaatgataaattctccgtcattgtggcgggcaaataagtagttaaataatgctgttcttgcattcccaatgtgcaagtgtccagttggacttggtgcgtaacgc

SEQ ID NO: 734 - DNA, 182 bp, Enterococcus faecalis
gttccttcaacagttgcgcctgcaacagttggcagcaccaacttttgtagattcgccacctactaagataaccttcgtcaaaaacaacctttctcgccagcctcaacgtttaatttttcaacgtagattgcttgacctacttcaactttcacttgtttaccaccagttttgataattgcgta

SEQ ID NO: 735 - DNA, 175 bp, Enterococcus faecalis
  misc_feature (1)...(175): n = A,T,C or G
tccacgccattgtggtgaacggattgaaccttgacgagcacgaccagttcctttttgacgccatggtttgcggccaccgccacagaacatcgcctacnggtttttaactgcgtgtgttccttgtcttaatgaagcacgttgcatgatgattgcatcatagacaacactttcatta

SEQ ID NO: 736 - DNA, 184 bp, Enterococcus faecalis; identical to SEQ ID NO: 307

SEQ ID NO: 737 - DNA, 184 bp, Enterococcus faecalis; identical to SEQ ID NO: 307

SEQ ID NO: 738 - DNA, 117 bp, Enterococcus faecalis
tatttacccatgcgtttgaattttggacgcacagtttaagatgtttacagtttgctacctttaacatcgaatgcctgattcaacagccttgttttactaaagttttgtttgcgcgag

SEQ ID NO: 739 - DNA, 127 bp, Enterococcus faecalis
ccagtttttgagaaattaaataaataaccgagaaaccattcccgttaatcgaattcagttccttttctaaccgtttttcgacaatttctggtaaaggatcgccatacaattcgcgcgcacgattgta

SEQ ID NO: 740 - DNA, 127 bp, Enterococcus faecalis
  misc_feature (1)...(127): n = A,T,C or G
canantatccttctgaacgagcgatatccgcaccgtttanacgacctgatacttgagttttgattcctttagcgccagcaccgcattgcgcgttggatggccttgtttttgagcacgacggaaagca

SEQ ID NO: 741 - DNA, 199 bp, Enterococcus faecalis
tctttgtttgaattgagttgataaattcattcgtaaacagtttcgcctactaacatatttgactttggcatctggttgattcactaacatttgatgaccaatagcatgcatcaaatgggttttccctaaccctacaccaccatagaagaaaaggggattgtaaatcgaacctggatcctcggcaacaacaagcgctgca

SEQ ID NO: 742 - DNA, 318 bp, Enterococcus faecalis
tcggcgggcgatcacttgttaaaacaatttgtttattttcattgtaaagatcgttgaaggtatggaaaaattcttccaatgttgcttctttttccgccaaaaattgaatatcatcgactaataataagtcaacattgcgatattctttccgaaattgttcggatgtctttgtttgaattgagttgataaattcattcgtaaacgtttcgctactaacatatttgactttggcatctggttgattcactaacatttgatgaccaatagcatgcatcaaatgggttttccctaaccctacaccaccatagaagaaaaggg

SEQ ID NO: 743 - DNA, 146 bp, Enterococcus faecalis
ggctaaccctttatgcaagacaaaaaaagctgaatccggagattcagctttttaatcgtattagttagcctacctggataaacctgatactttgttttttgtcgcggcctttacgttcgaaacgtaccacaccgtcaacttttgca

SEQ ID NO: 744 - DNA, 208 bp, Enterococcus faecalis
tcacttcgccgcctttagaagcaacaaatttttcgacagtcatatctggatctttaacaaatggttggtcaaccaaagcgatttctgctttgaatttttgtagacgaccaacaaccattttttcaacgatatttgctggtttaccttcgtttaatgcttgttcagttaacacagctttttcgtgttctaattcttcttgaggaatttg

SEQ ID NO: 745 - DNA, 271 bp, Enterococcus faecalis
gccaaggcattaatcgtaaaatctcgccgttttaagtcttctttcaaggagcagaacaaaggtgaccttcatctggtcgacgaaagtcttgataagttgactcggtacgaaaggttgttacttcatactgttggtcttccatcaatacaaggactgtgccatgttcgatgcccacatcaacggttcgtttaaaaatttgcttaatctcttctggataggcacttgtcgcaatatcgacatcatggattggtttatttaataaagcatcacg

SEQ ID NO: 746 - DNA, 130 bp, Enterococcus faecalis
cgagactcttcgtcagtgttcgctgttgtaacaattacgatgtccataccagcgtacctttatctactaaatcataatcaaccttctgggaagattaattgttctttaatacctaaagtatagttaccac

SEQ ID NO: 747 - DNA, 69 bp, Enterococcus faecalis; identical to SEQ ID NO: 451

SEQ ID NO: 748 - DNA, 123 bp, Enterococcus faecalis
tcctttatgcgagtttacttgtttaccagctagcctttcttcacgccgggaatttgacctttataggcaagttcgcggaagcaaatacggcaaagatgaaatttacgataaactgaatgtgga

SEQ ID NO: 749 - DNA, 179 bp, Enterococcus faecalis
gtgatcatcgccacgtaaaacgtgagaaattttcattaagtgatcatctactgcaacaggcaaagttatacgttggcatcccatcgcgtttttggatgacaaaatcgccaccaatgttatctgactcaaaagtaatttcacctttcacgatgtcatcaaatttgtattctgtattacgt

SEQ ID NO: 750 - DNA, 173 bp, Enterococcus faecalis
aaaagaaacatctataaagtgatcggtttattaattatttaacaaattcgataacctaccattggtgcctgcatcgccgcgtcttggttctgtcttcaagatacgagtgtaaccaccttggcgttccgcgaaacgaggtcctaaatcgttaaatagcttttgtaaagctgatt

SEQ ID NO: 751 - DNA, 204 bp, Enterococcus faecalis
tcgttgcttcaattacacagttcttcgccgctcgctacaccaattcccattaaagcctgttccttggttttccatcacctgttttcacagtcagcaaagtccaagtttacagtaacctggtgcagtgattaaatctgaaattccttgaacaccttgacgtaatacattatcagcttctctaaatgcttcaagcattggcgtttt

SEQ ID NO: 752 - DNA, 163 bp, Enterococcus faecalis
gatagacgtcctaaaggaacatctgttgcatctactacagtaccatttacagttctacttcgccagcctttggccatatatgttgtacagcacagtttctttcctccaattttgttttcgatgtttgacatacacttgagtttccggggctcattgtggggca

SEQ ID NO: 753 - DNA, 102 bp, Enterococcus faecalis
acttcgccagctttggccatatatgttgtacgcacagtttctttcctccaattttgttttcgatgtttgacatacaccttgagtttccggggcctcattgtg

SEQ ID NO: 754 - DNA, 145 bp, Enterococcus faecalis
catcatgtcaggagtcgcaacaactacgtcaaagtcgaaccatccaccttggatttttgcaaccatgtcagtcgtcgcctacgaaatctgcaccagcagccttcagccttctttagctttttcgcctttagcgaatactaaaaca

SEQ ID NO: 755 - DNA, 162 bp, Enterococcus faecalis
aaagacacgtttgatggccgttgtttccgcagcgtcattcgcctggggttgacgtaccatgagcattgatatacccaatttgttccggcagtaatccctgcttccgcaatcgccatttccatcgcagccgccgcgccactaccgtcttttaaaggagcggtc

SEQ ID NO: 756 - DNA, 113 bp, Enterococcus faecalis
tgtttatgttttggatttgctgggcaaataaccataacacgtcctttacggcgaattacctttacaatgttcacacattggttttacctgatggtcttactttcatgataata

SEQ ID NO: 757 - DNA, 158 bp, Enterococcus faecalis
aactaaacgacggcctcatgataatggcatcctcgtagttgtaaccttcccatgtcatgaaggcaaccaagacgttttgccctaaagccatttcgccttcttccatagaaggtccatccgctaaagtatcgcctttttcaactttttcacctaagtga

SEQ ID NO: 758 - DNA, 279 bp, Enterococcus faecalis
ggcgtttctacttcgacatagccattgccatctagataacgacggatttcgcctaataatttgactgcgtttcatgaaacgatcaaagctttctttgttactgattaaatccaaatagcgttgacgatagcgttgctccacattcgttaatccatggtatttatctggcaatggacgcaaagctttagttaataacgtaattgtttgagctttaacagtaacttcccccgtattggttttcattacttgacctgtcacaccaaagaagtcgcctaagtc

SEQ ID NO: 759 - DNA, 79 bp, Enterococcus faecalis
  misc_feature (1)...(79): n = A,T,C or G
ttgtaaaccccattcaccaaatgctacttcttttccgcctttancttcaccgcgcatttttccgcggaattcacgacgg

SEQ ID NO: 760 - DNA, 138 bp, Enterococcus faecalis
gcttcaggtacttcttgtgctttaccagtaccgaaaccaacagtgtccagtttttgtcaccgacaacaacctaaagctgcgaaacagtaaacgacagtccacctttaacaacttttgttacacaggttgatcgctaca

SEQ ID NO: 761 - DNA, 130 bp, Enterococcus faecalis
  misc_feature (1)...(130): n = A,T,C or G
gaactttttcacctttancaagagtttcttgaattgttgaaaagacagcgtctactgctgcagtagcatcttttttagttaaaccagttgaagatgcaacgttttcgattaattctgctttatttgccat

SEQ ID NO: 762 - DNA, 109 bp, Enterococcus faecalis
gaatagcaatgacaataccacctttggctgttccgtctagtttggttaaaactaagccagtgacatcggttgtttctttgaactgtttggcttgtgtcatcgcattttg

SEQ ID NO: 763 - DNA, 86 bp, Enterococcus faecalis
tcacgtttcaggatttctgcgatatcacgtttgatttttgaagcaggtacttctaaagtttcatgtttaaccatgttcgcattaca

SEQ ID NO: 764 - DNA, 418 bp, Enterococcus faecalis
tctattttagcaagaaaggcctgtctctagcaatgaaaactttttggttatgtataaaaaaagaagatagcctaggcctacctccttgttaatgcttatttaccatcaagaatatttaagcggacctttttcggaccatcgatacgtacactataaacaattgtccgaattgcttttgcaacacgcccttgtttaccaatgatacgtccaatatcttctttggccacagtcaaattatactcgaggaaatcagttgattcctcaatttctaatgagactgcttcaggttgactgactaacggacggacaatagttaaaattaactctttcacatctgccatattcaatcaccttatttcttaacgtttttagcttcatgatgttttttcataacgccttcttttgaaaggatgttacg

SEQ ID NO: 765 - DNA, 107 bp, Enterococcus faecalis
gccattttgtgtgtgtcttcgcgttttttaacagaagcagccagtgttgttagcagcatccatgatttctttcgctagacgttcttccattgtgtgttcaccacgta

SEQ ID NO: 766 - DNA, 185 bp, Enterococcus faecalis
tccacgccattgtggtgaacggattgaaccttgacgagcacgaccagttcctttttgacgccatggtttgcaggccaccagccacagaacagcagcctacaggtttttaacctgcgtgtgttccttgtcttaatgaagcacagttgcatgatgattgcatcatagacaacactttcattaggttc

SEQ ID NO: 767 - DNA, 227 bp, Enterococcus faecalis
agcaattttcatgcctttgatgtcgccagttaaatctgccgtaaaatcaggaacagaaacgcctgcagaagtgccgtctttttcgtcataaccacctaattgcatttaaagctaaggcattgtctttaacatttcgtgtcaatggaccaatttggtctaaacttgaagcaaaagcaatcaaaccaaaacgagatacacgtccataagttggttttaggcccacaata

SEQ ID NO: 768 - DNA, 133 bp, Enterococcus faecalis
ccgtagttcatcaggaatcttattccattgtcctttacgtaccgtttccataatcttaaaggccatcccactgtccaaaccagcatgaattaaataaaccatgatatcatcccgacaaccaattacttcagca

SEQ ID NO: 769 - DNA, 136 bp, Enterococcus faecalis
gaattgagttgataaattcattcgtaaacgtttcgctactaacatatttgactttggcatctggttgattcacctaacatttgatgaccaatagcatgcatcaaatgggttttccctaaccctacaccaccataga

SEQ ID NO: 770 - DNA, 222 bp, Enterococcus faecalis
tatcccgtagttcatcaggaatcttattccattgtcctttacagtaccagtttccataatcttaaaggccatcccacctgtccaaaccagcatgaattaaataaaccatgatatcatcccgacaaccaattacttcagcaagattggcttcgccacagacgaatcaattcttctgcattccctagccacacatcggttccgtgagacagtccagaaatttga

SEQ ID NO: 771 - DNA, 257 bp, Enterococcus faecalis
ggtaaatttctttacgttctgattgacgatatggaccatattctcccggatgagcaggtgattcatcccattccatccctaaccatgctaagttttccaactgacttttctcgccgtcttcgatgttccgtttttggtcggtatcctcgatacgaatgataaattctccgtcattgtggcgggcaaataagtagttaaataatgctgttcttgcattcccaatgtgcaagtgtccagttggacttggtgcgtaacgc

SEQ ID NO: 772 - DNA, 175 bp, Enterococcus faecalis
tgagcagactctacttggcgagtaaacattttactttgaataacctgcatcttcttcttgcacattcattcgttctaagaatgttttaattcgttctgaaccaaagcgtttcattaagtcatcttctaaagataaataaaattgtgaaacccctggatccccttgacgtcctgca

SEQ ID NO: 773 - DNA, 284 bp, Enterococcus faecalis
tccccaatttcagaaatcgccataaattctttagaatctttaccacccatggcaccaccagtccccaataatggcacaggaattctagtccacagcgttcaaaaatgcgtgagtaagctttttcgtaatcacggtatgattgatctaaactagcttcatcggcatggaaagaatagccatctttcatgataaattcacggcctcttaataagccagaacgagggcgtttttcatcacgatattttgtttgaatttggtataaattcaaaggtaatcgtttgtaa

SEQ ID NO: 774 - DNA, 360 bp, Enterococcus faecalis
ccttggttttccatcactgttttcacgtcagcaaagtccaagtttacagtaacctggtgcagtgattaaatctgaaattccttgaacaccttgacgtaatacattatcagcttctctaaatgcttcaagcattggcgttttcttgtcaacgacttctaataagcggttgtttgagataattagtagtgtatcaacgttttcttttaataaggcaattccttcagcggcaaaacgaccacgttttggaccttcaaaactaaatggacgagttactacaccaactgttaaagcgcctaattctttagcgatttttgcaactactggggcagcacctgtaccagttccgccacccataccagc

SEQ ID NO: 775 - DNA, 220 bp, Enterococcus faecalis
tcctacgaataaagcaacgccgccttcttctgcaacgtttttcatgtaatcgtaagcctgcatctactaatttcacctgttttttgtaagtcaatgatgtagataccgtttctttctgtgaagatatatttcttcatttttgggttccagcgacgagtttggtgaccaaagtgtacgccggcttctagtaattgtttcatagaaattactgccatgttgt

SEQ ID NO: 776 - DNA, 204 bp, Enterococcus faecalis
ttttcaacagttccttcaacagttgcgcctgcaacagttggcgcaccaacttttgtagattcgccacctactaagataaccttcgtcaaaaacaacctttctcgccagcctcaacgtttaatttttcaacgtagattgcttgacctacttcaactttcacttgtttaccaccagttttgataattgcgtacatgctatacagca

SEQ ID NO: 777 - DNA, 183 bp, Enterococcus faecalis
taccgtttctttctgtgaagatatatttcttcatttttgggttccagcgacgagtttggtgaccaaagtgtacgccggcttctagtaattgtttcatagaaattactgccatgttgtgtttcctccagtttggtttttattttcctcttcttttcgtcaactccttgaagaactaccgtagta

SEQ ID NO: 778 - DNA, 77 bp, Enterococcus faecalis
ccattgtggtgaacggattgaaccttgacgagcacgaccagttcctttttgacgccatggtttgcaggccaccgcca

SEQ ID NO: 779 - DNA, 188 bp, Enterococcus faecalis
cgcaccaacttttgtagattcgccacctactaagataaccttcgtcaaaaacaactttctcgccagcctcaacgtttaatttttcaacgtagattgcttgacctacttcaactttcacttgtttaccaccagttttgataattgcgtacatgctatacagcacctgcttcttctagacttagactcgc

SEQ ID NO: 780 - DNA, 135 bp, Enterococcus faecalis
ggtaaacgagtgaagctaccttctaatttttcagtgtcaaagcttacgaatgcctggacagtccaacagttgccttcaaccagccttctttaattgttgagatgttttgagatttttcacgaacaccgatcactt

SEQ ID NO: 781 - DNA, 247 bp, Enterococcus faecalis
tctttgattgcttcttgtgcttgttttttagttcctacgaataaagcaacagccgccttcttctgcaacagtttttcatgtaatcgtaagcctgcatctactaatttcacctgttttttgtaagtcaatgatgtagataccgtttctttctgtgaagatatatttcttcatttttgggttccagcgacgagtttggtgaccaaagtgtacgccggcttctagtaattgtttcatagaaattacctgc

SEQ ID NO: 782 - DNA, 580 bp, Enterococcus faecalis
  misc_feature (1)...(580): n = A,T,C or G
gcagccattaattctaagattttttcttcataagactcgtcgccttctaaagctttcaaagcagaacctgcgataactggaacatcatcgcctgggaaatcgtattctgataataagtcacgaacttccatttctactaattctaataattcttcgtcatcaaccatatccattttgtttaagaatacaacgatgtatggtacaccaacgttaccgtgataataagatatgttcacgtgtttgaggcataggaccatcagcagcagaaactactaagatagctccgtccatttgagcagcaccagtgatcatgtttttaacgtagtccgcgtgtcctgggcagtcaacgtgtgcatagtgacgagtttcagtttcatattcgatatgagaagtgttgattgtgattccacgttctttttcttctggagcgttatcgatagaatcgtagctttgtgcttccccgccaccgtgttttgataatacagtagcaattgcagctgttaatgtagttttaccatggtcaacgtgtccgatagtaccantgttaacatgggatttagaacggtcaaatttttctttt

SEQ ID NO: 783 - DNA, 137 bp, Enterococcus faecalis
ccctacacttatttagctttcacagctgatttgattgtgattaaagattttttcgctccaggaatgtttcctttgattaagataacatttctttctacgtccacctttaacaacttcaaggttttgaattgttacag

SEQ ID NO: 784 - DNA, 207 bp, Enterococcus faecalis
aaccattgcaacgattggaatgtttaatttgtgtgcttcttgaacagcaatgcgttctttacgtgggtcaacgatgtacattacatctggaattcttggcatatcagcgataccacctaagaatttttctaaacgttcacgttctttgtttaagccagcaacttctttcttaggtaaaacttcgaaagtgccgtcttcttccattgc

SEQ ID NO: 785 - DNA, 152 bp, Enterococcus faecalis
taaactatggcgatttaacggattatgcgccgcccatagacccgactaaaattttccgatagatggcatcttcttcatttaaataatgaacatttccagtggcgacaaccagcttgccaagttcgtcaccgattttcactagattactaata

SEQ ID NO: 786 - DNA, 171 bp, Enterococcus faecalis
taaactagcttcatcggcatggaaagaatagccatctttcatgataaattcacggcctcttaataagccagaacgagggcgtttttcatcacgatattttgtttgaatttggtataaattcaaaggtaatcgtttgtaagaattgatttcatcacgaattaattctgtgaa

SEQ ID NO: 787 - DNA, 83 bp, Enterococcus faecalis
aaatcaatgatttcgcctgtgctgtcgagcgccaaggcattaatcgtaaaatctcgccgttttaagtcttctttcaaggagcg

SEQ ID NO: 788 - DNA, 300 bp, Enterococcus faecalis
acaaaatggggcatcacttctgcaccggtcaatttaaatccagtttcgacaatttttgccgaaagatttttttcccagtaatcacgatgaactgcagaagggacttctagccacaattgattgttgtctaatttcaaagggcgtgtggttttaatccaagcatcaaaacttggcgccgacaaaatcgcttgataggcttcttcaaggctatgccaaaaactttccacgtcgggcatacagtgacctcctatatgtttaaattttggttatctaaaaaatgtggataacttaaaagaatga

SEQ ID NO: 789 - DNA, 102 bp, Enterococcus faecalis; identical to SEQ ID NO: 753

SEQ ID NO: 790 - DNA, 165 bp, Enterococcus faecalis
gcctaattcaggaccatgcatttgtccagaaacagcaattcgaattggcataaacaagtttttgcctttaacgccggtttctttttggacaggctttaatcgctgctttaatacttgggacatcgaaaacgtccaaggcttctaattgttctttaaacgcatgta

SEQ ID NO: 791 - DNA, 254 bp, Enterococcus faecalis
atagctaacatggatttttcagtgatcactgggcagtttgattacagtctagtaattccattatgcaagcacctcctcaatttgagtaagagcctgtttgtgttgccaagactttgttagctgacacaacatctaacacactaacgttatcagaagttactacagaaacgtttggtaagttacgagctgataaagctgcaaagtcgttaccattttctaaaacaactaatactttagtatcgatagacaagtta

SEQ ID NO: 792 - DNA, 131 bp, Enterococcus faecalis; identical to SEQ ID NO: 504

SEQ ID NO: 793 - DNA, 131 bp, Enterococcus faecalis
gaactttttcacctttagcaagagtttcttgaattgttgaaaagacagcagtctactgctgcagtagcatcttttttagttaaaccagttgaagatgcaacgttttcgattaattctgctttatttgccat

SEQ ID NO: 794 - DNA, 121 bp, Enterococcus faecalis
accttcacgatcatatgacggataatatcgtcattgatttttgctaaacgatcaaactcgttgattgcgccagcctgttgatggagaagtaacattaacgatatgatagatgccttcacgg

SEQ ID NO: 795 - DNA, 360 bp, Enterococcus faecalis
ccttggttttccatcactgttttcacgtcagcaaagtccaagtttacgtaacctggtgcagtgattaaatctgaaattccttgaacaccttgacgtaatacattatcagcttctctaaatgcttcaagcattggcagttttcttgtcaacgacttctaataagcggttgtttgagataattagtagtgtatcaacgttttcttttaataaggcaattccttcagcggcaaaacgaccacgttttggaccttcaaaactaaatggacgagttactacaccaactgttaaagcgcctaattctttagcgatttttgcaactactggggcagcacctgtaccagttccgccacccataccagc

SEQ ID NO: 796 - DNA, 311 bp, Enterococcus faecalis; identical to SEQ ID NO: 473

SEQ ID NO: 797 - DNA, 289 bp, Enterococcus faecalis; identical to SEQ ID NO: 340

SEQ ID NO: 798 - DNA, 148 bp, Enterococcus faecalis
cttcgccgccgatatttttcgctctagcttctttgtcagtaattacaccctctgatgtagagatgattgcaattcctagaccgtttaataccttttggtacttcgtcagcttttacgtatgcacagtaaacctggtttagaaatacgt

SEQ ID NO: 799 - DNA, 154 bp, Enterococcus faecalis
tgagaagtgttgattgtgattccacgttctttttcttctggagcagttatcgatagaatcgtagctttgtgcttccccgccaccgtgttttgataatacagtagcaattgcagctgttaatgtagttttaccatggtcaacgtgtccgatagta

SEQ ID NO: 800 - DNA, 211 bp, Enterococcus faecalis; identical to SEQ ID NO: 324

SEQ ID NO: 801 - DNA, 92 bp, Enterococcus faecalis
attacgaaatctccagtatccacatgtggtgtgaatgttggtttatttttaccacgtagtacagaagcaacaacctgctgatagacgtccta

SEQ ID NO: 802 - DNA, 164 bp, Enterococcus faecalis
gagatgattgcaattcctagaccgtttaatacttttggtacttcgtcagccttttacagtatgcacagtaaacctggtttagaaatacagttttaagtttgtgataacacagctcttcgtttttaccatattttaggaaaacacggattacgccttgtttgtca

SEQ ID NO: 803 - DNA, 180 bp, Enterococcus faecalis
tccacgccattgtggtgaacggattgaaccttgacgagcacgaccagttcctttttgacgccatggtttgcaggccaccgccacgaacagcgcctacggtttttaacctgcgtgtgttccttgtcttaatgaagcacgttgcatgatgattgcatcatagacaacactttcattaggttc

SEQ ID NO: 804 - DNA, 175 bp, Enterococcus faecalis
ctaacgtatccaaaattgattgattcttatcgtcccacaataaacgtcaattcacattcgcagacctttttatcttccacagtaagcagtcgctttgccgatgccgacaaagtcacgtaatttgacgatttcaaaatgtaatttcaagacatcaccagggaccactttttgacgg

SEQ ID NO: 805 - DNA, 76 bp, Enterococcus faecalis
taaccgataatttcttctacagatttaccgcgaagtgctgccaccttcttcggcacagttttaattgttttagaca

SEQ ID NO: 806 - DNA, 174 bp, Enterococcus faecalis
ctaacgtatccaaaattgattgattcttatcgtcccacaataaacgtcaattcacattcgcagacctttttatcttccacgtaagcagtcgctttgccgatgccgacaaagtcacgtaatttgacgatttcaaaatgtaatttcaagacatcaccagggaccactttttgacgg

SEQ ID NO: 807 - DNA, 201 bp, Enterococcus faecalis
tcagctacatcgcctaattgatcttcaatacagtaataattggttgtatttagcaatacaggtcagtacggccttaatgaaccagttttgatttggccagcagtttgttgcaacagcgatatcagagattgttgaatcttctgtttcaccagaacggtgagatacaactgcagtgtagccagcttctttagccatttcgat

SEQ ID NO: 808 - DNA, 208 bp, Enterococcus faecalis; identical to SEQ ID NO: 359
  misc_feature (1)...(208): n = A,T,C or G

SEQ ID NO: 809 - DNA, 112 bp, Enterococcus faecalis
tgccatatacgtgtgcgctattcccgtcggacaacctgtagcagcctattaattgataccgtagccatctgtttattcctcctcttgaatctttatttgttgctctaactcc

SEQ ID NO: 810 - DNA, 152 bp, Enterococcus faecalis; identical to SEQ ID NO: 785

SEQ ID NO: 811 - DNA, 152 bp, Enterococcus faecalis
cacagataatgtttgcagtaagtcttcccagacattttttacattcattaaatgtgttctagtcgcttcgtttaggacttgatatacgcagttctgtgggtacgcggaacgaactttttggcgcttgtggtcgtgcttgttgacgtggcgca

SEQ ID NO: 812 - DNA, 194 bp, Enterococcus faecalis
taagcggattaatacgtatttgccttctttaccaagtaccttgcgcgccttgttccagcctgaacaggattaattgtccacctttaccaggtttcatttcaatgttgtggataacctgtaccaactggaatgttttccaatggtaatgcgttacctactttaatatctgcttctggaccagatactaggcgcat

SEQ ID NO: 813 - DNA, 203 bp, Enterococcus faecalis; identical to SEQ ID NO: 582

SEQ ID NO: 814 - DNA, 130 bp, Enterococcus faecalis
cgagactcttcgtcagtgttcgctgttgtaacaattacgatgtccataccagcgtactttatctacctaaatcataatcaaccttctgggaagattaattgttctttaatacctaaagtatagttaccac

SEQ ID NO: 815 - DNA, 92 bp, Enterococcus faecalis; identical to SEQ ID NO: 801

SEQ ID NO: 816 - DNA, 180 bp, Enterococcus faecalis; identical to SEQ ID NO: 803

SEQ ID NO: 817 - DNA, 294 bp, Enterococcus faecalis
  misc_feature (1)...(294): n = A,T,C or G
cancagtaccagagattttgttacgtacacgacgatgtctcttttgacgtgttttgtttttatctggttttgtaatcacaattttcacctctttgatttaatgtttactactaatatttcaagcagtcagcagattacggaaaagagaagctggcagacaagacaaaagcattttattggaaaaatcccataaaatgacagttgcttgttgttgacttctgttttctacacagctgttattatttaccagttttaccttctttacggcgtacaaattcaccaacatagcgaatc

SEQ ID NO: 818 - DNA, 234 bp, Enterococcus faecalis; identical to SEQ ID NO: 704

SEQ ID NO: 819 - DNA, 228 bp, Enterococcus faecalis
tttagaacagtagctacctgcataaactaacgctaagcagtgcctctttttgagcatcttcatccaaaatccgaacatgggcataatatttattgaacgccttgtgctaaatgaatgctatgtttcgcaataacagatggttcatatttttcagcagcttgcatcacagtttcagggaatttttgtaacaacttcacgacttcccagctatccttgtcatttagtgca

SEQ ID NO: 820 - DNA, 148 bp, Enterococcus faecalis
tccaaggcagaggcaccttgctagcagtcacacccgctacgtcatcaatgacttgcagcagtagatgtttttgttagaacggaaaatgttcaagcagtgggcacctcagcagtaccagagattttgttacgtacacgacgatgtctct

SEQ ID NO: 821 - DNA, 166 bp, Enterococcus faecalis
gcactgatattcaggacaaaggccacagcaatcgaaataatcatgcaaactattcccaccttgactcaagaacgggaaagtaattcctgttaatggaataatcccagtaatcccaccaacattaataaagacttgaattaataacattgtaccaattccaatacac

SEQ ID NO: 822 - DNA, 200 bp, Enterococcus faecalis
tcgttgcttcaattacacagttcttcgccgctcgctacaccaattcccattaaagctgttccttggttttccatcactgttttcacgtcagcaaagtccaagtttacgtaacctggtgcagtgattaaatctgaaattccttgaacaccttgacgtaatacattatcagcttctctaaatgcttcaagcattggcgtttt

SEQ ID NO: 823 - DNA, 71 bp, Enterococcus faecalis
  misc_feature (1)...(71): n = A,T,C or G
gctgctccacctgctgctggtccagctacctgctacagganctgctgctgatacgtcaaatttttcttcga

SEQ ID NO: 824 - DNA, 187 bp, Enterococcus faecalis
acacggtattgacgtttgtgaccgccaccttggtgacgaaccgtaatgcgaccagttgttgttacgaccggcattgttttttaatggcctgtaacaatgatttttctggtgttgaagttgtgatttcagcgaaatcagaacttgtcatgttacgacggccatttgtggtaggtttgtactttttaat

SEQ ID NO: 825 - DNA, 135 bp, Enterococcus faecalis
tgtggttttacggagtacaattatttaaagcgataagtaatacggccacgcgttaaatcatacggtgataattcaacctgttactttgtcaccaggtaagatacggatgtagtgcatacggattttacctgaaac

SEQ ID NO: 826 - DNA, 206 bp, Enterococcus faecalis; identical to SEQ ID NO: 644

SEQ ID NO: 827 - DNA, 262 bp, Enterococcus faecalis
cccaaaaggcaacctggttaataacgaatgaggtaggtgaaaaacctttcattacttgtaatgcggatgtggaacctatataccataatcaatcccacgataccttaaaattaaatatggaataaaaatactatagtctagcaaatgccgtttctttactttgtttggcaaagcttaaccctccttgccaatctcgtttttttcttgtgtttcttcataaacatctgtatataattgattcaattcgcgttctaaatcactt

SEQ ID NO: 828 - DNA, 137 bp, Enterococcus faecalis; identical to SEQ ID NO: 783

SEQ ID NO: 829 - DNA, 155 bp, Enterococcus faecalis
gaaacaattagtaattgagcaatatctgcatcaacagcctgtcattaattgacgaatttgttcatttggataaacaggtcacctttagccttctaacgatttaccgattaatttagaatgacgagcttcttccaacgcttttaagacattgtcac

SEQ ID NO: 830 - DNA, 141 bp, Enterococcus faecalis
tctttaccaagtacttgcgcgcttgttccagcctgaacggattaattgtccacctttaccaggtttcatttcaatgttgtggataacctgtaccaactggaatgttttccaatggtaatgcagttacctactttaatatct

SEQ ID NO: 831 - DNA, 127 bp, Enterococcus faecalis; identical to SEQ ID NO: 740
  misc_feature (1)...(127): n = A,T,C or G

SEQ ID NO: 832 - DNA, 181 bp, Enterococcus faecalis
taaattcacggcctcttaataagccagaacgagggcagtttttcatcacgatattttgtttgaatttggtataaattcaaaggtaatcgtttgtaagaattgatttcatcacgaattaattctgtgaaggtttcttcatgcgttgggcctaagatatagtcacggtcattgcgatctttta

SEQ ID NO: 833 - DNA, 146 bp, Enterococcus faecalis
ccttcaaaaatacgcatcaccttctggatcgtctgttgggatggtttttggctcaatcccagataaatcttgtaacatccgaatcacggtcggatcatcatgtcctagaatatcaagttttaaaatattatcgtgaatggaatgga

SEQ ID NO: 834 - DNA, 221 bp, Enterococcus faecalis
tcctacgaataaagcaacgccgccttcttctgcaacgtttttcatgtaatcgtaagcctgcatctacctaatttcacctgttttttgtaagtcaatgatgtagataccgtttctttctgtgaagatatatttcttcatttttgggttccagcgacgagtttggtgaccaaagtgtacgccggcttctagtaattgtttcatagaaattactgccatgttgt

SEQ ID NO: 835 - DNA, 220 bp, Enterococcus faecalis
  misc_feature (1)...(220): n = A,T,C or G
taataccaagancttccagcccattgtggcatagtattcgtttcacagttttcccttcatgccagtttcagggtcgacgacattgacccattcatcaatgtttgctaatggcgattccccagttccacttgggcgaatatccgatgttactggtaaacgtagaggtaacctcagattcaggaaccgttgtggttgttccatcttcccaatggatcacagg

SEQ ID NO: 836 - DNA, 221 bp, Enterococcus faecalis; identical to SEQ ID NO: 834

SEQ ID NO: 837 - DNA, 131 bp, Enterococcus faecalis
aattgacgttcttcttcttgtaaaagttgatacagccttctttactcgtcactgcttcaatacaggcagtacctcctgcaccaattccagattcagaaacaattttgaaaatcccgatatcttctgtatta

SEQ ID NO: 838 - DNA, 166 bp, Enterococcus faecalis
tccagaaacagcaattcgaattggcataaacaagtttttgcctttaacgccggtttctttttggacggcctttaatcgctgctttaatacttgggacatcgaaaacgtccaaggcttctaattgttctttaaacgcatgtaacacagttggcactgtttctccttg

SEQ ID NO: 839 - DNA, 113 bp, Enterococcus faecalis
tatgcaagacaaaaaaagctgaatccggagattcagctttttaatcgtattagttagcctacctggataaactgataccttgttttttgtcgcaggcctttacgttcgaaacg

SEQ ID NO: 840 - DNA, 138 bp, Enterococcus faecalis
ccatcacggtcgcatcataaattgggtcaaaattgtgtaacatttttgagccagcctgttgttaaaatatcttttgtgacaatgttgtctttaatcccaattggaatcccagctaatggattactttcagtgatgcct

SEQ ID NO: 841 - DNA, 138 bp, Enterococcus faecalis
gggatgctgcccagtcgtccgtttaacccctgttgaacctttggctaagcgatcaatttcagcaccacgcaaatgtaaattatgatctctttcatatcctttaacaaagccatacgctgttttgtcggctactgtacc

SEQ ID NO: 842 - DNA, 116 bp, Enterococcus faecalis
tgaaacgaactgagaagctacttctttgagtaagtgtggaataaaaattattctacgatgatacccatgcttcgtgcagttcctgcaaccatgcgcattgctgcttcaacgtcagc

SEQ ID NO: 843 - DNA, 279 bp, Enterococcus faecalis
tcattacttgttcttttgctgatttaaataaagtatgttttgatccgtagtagcctttcgctaacttaaggacttttttacgacgtttacagggttacctgttccacctttaacacgtgccatgttgaattcctcctaatatcttgtttctcttgacggtaatctaaaagtcaccgagttgttttatttcattcttgctaattgttggcggatacgtttgtaatcgccttttgcaaccatgcttgctttacgcaattgacggcgttgttttttagtttt

SEQ ID NO: 844 - DNA, 134 bp, Enterococcus faecalis
caactgttactttgtcaccaggtaagatacggatgtagtgcatacggattttacctgaaacagtagcaagaacttggtgtccattttctagttcgactttaaacattgcattcggcaaagtttctacgactgta

SEQ ID NO: 845 - DNA, 116 bp, Enterococcus faecalis; identical to SEQ ID NO: 490

SEQ ID NO: 846 - DNA, 275 bp, Enterococcus faecalis; identical to SEQ ID NO: 446

SEQ ID NO: 847 - DNA, 249 bp, Enterococcus faecalis
tatcccaaacttcatcttcgccacgttcgattttacagtttcgcatttttaatgtttgtcgcaatttcacgttgtacctaattcacgcattacaaatggtttgaataattcaatcgccatttcttttggtaaaccacattggtacatttttaagaacggaccaacgacgattacggaacgaccagaatagtcaacacgtttacctagtaagttttgacggaaacgaccttgtttccctttcaacatgtg

SEQ ID NO: 848 - DNA, 173 bp, Enterococcus faecalis
tgcatttgtccagaaacagcaattcgaattggcataaacaagtttttgcctttaacgccggtttctttttggacggctttaatcgctgctttaatacttgggacatcgaaaacgtccaaggcttctaattgttctttaaacgcatgtaacacagttggcactgtttctccttg

SEQ ID NO: 849 - DNA, 221 bp, Enterococcus faecalis
taattgaggtgatttaactaatgtagcaatctctttcaattgacagttcttcttcttgtaaaagttgatacgccttctttactcgtcactgcttcaatacaggcgtactcctgcaccaattccagattcagaaacaattttgaaaatcccgatatcttctgtattagcaacgtgtgttccaccacataattcgatagagtaatccccaatattaactacac

SEQ ID NO: 850 - DNA, 227 bp, Enterococcus faecalis; identical to SEQ ID NO: 558

SEQ ID NO: 851 - DNA, 117 bp, Enterococcus faecalis
cagctccaccgtatacagttcaatttagtaaattgtttacagtcctaaagtgtttttaggtagcataccttttacagaagtttcgataagacggcgagagtttttgtcgcgtaattc

SEQ ID NO: 852 - DNA, 571 bp, Enterococcus faecalis
  misc_feature (1)...(571): n = A,T,C or G
tactgcgttaattttcctgttaaaacaacctgttttgtctttgaaaggtgactccaccttctgctaattgttctgtccggagacctttatatgtcaagttcaccttgggctttttccagttcagccattaattcatgaacttcctcattttcaaaatacgtcacaacgcctgtctgcgattgtttcgccaattgaatccaaagccacaatttcttccgcagttgcacgacttaaggttggtaaatcaccaaaatgctccgctaaaattttcgccgctttcgcacccacatggcgaatccctaagccaaaaatcaaacgttcgacagagttttctttactcccttgaatggcagtataaatgttgtttgctgatttttctttgattttatccaaagtcattaattgttcttctgttaagaaatacagatccgctacgtctttcactaatcctttgtcatacatttgtgctaacactcgtggccccaagccatcaatgttcattgcgtttcgtgagacaaagtgattcagcccttctttantttgcgcagggcattttggattaatacaacgt

SEQ ID NO: 853 - DNA, 183 bp, Enterococcus faecalis
tccacgccattgtggtgaacggattgaaccttgacgagcacgaccagttcctttttgacgccatggtttgcaggccaccgccacagaacagcagcctacaggtttttaacctgcgtgtgttccttgtcttaatgaagcacgttgcatgatgattgcatcatagacaacactttcattaggttc

SEQ ID NO: 854 - DNA, 362 bp, Enterococcus faecalis
ccttggttttccatcacctgttttcacagtcagcaaagtccaagtttacagtaacctggtgcagtgattaaatctgaaattccttgaacaccttgacgtaatacattatcagcttctctaaatgcttcaagcattggcgttttcttgtcaacgacttctaataagcggttgtttgagataattagtagtgtatcaacgttttcttttaataaggcaattccttcagcggcaaaacgaccacgttttggaccttcaaaactaaatggacgagttactacaccaactgttaaagcgcctaattctttagcgatttttgcaactactggggcagcacctgtaccagttccgccacccataccagc

SEQ ID NO: 855 - DNA, 91 bp, Enterococcus faecalis
gacaaaatacgcttcaaagccctgtgcattgatttcacgaataacagggagcaggccttctttaaattcgtttggaatagttgtcaatttc

SEQ ID NO: 856 - DNA, 122 bp, Enterococcus faecalis; identical to SEQ ID NO: 310

SEQ ID NO: 857 - DNA, 233 bp, Enterococcus faecalis
cccacatcaacggttcgtttaaaaatttgcttaatctcttctggataggcacttgtcgcaatatcgacatcatggattggtttatttaataaagcatcacaggacgcctgcccccgacaaaatacagccttcaaagccctgtgcattgatttcacgaataacgggagcaggcttctttaaattcgtttggaatagttgtcaatttcatagcatctgttccaatccgtaaagta

SEQ ID NO: 858 - DNA, 158 bp, Enterococcus faecalis
tacagttacgtccactgtccgcacatcaccaaaataatcataaccccaaacggtttgtaacaaatgttcacgagtcatcacttgtccgatatgttttgctaagtaataaagtaactcaaattcacggtgggttaattcaattttttcaccccgttttg

SEQ ID NO: 859 - DNA, 96 bp, Enterococcus faecalis
tgacggtgcggttttctatccttttttgattcatcaatacctgtagcgattactgttacacgaatttcgtcgcctaaatcttcattgattgatgta

SEQ ID NO: 860 - DNA, 241 bp, Enterococcus faecalis
ggatgacgttctgtttgttcaaacaagaaaggctgtaaagcggtcgtcatggcttcgcctaattttgcttcggtacagtttttatctttcattgcttcacgtagagcattgaataaaagacgttggccttcatgaatcatatcaccagactcacgcatgtagacaaaaccacgggaaagaatgtctggaccagccataatttctttatttttaatatcaactgttgctaccgctaaaacta

SEQ ID NO: 861 - DNA, 230 bp, Enterococcus faecalis
tccctttcaacatgtgagaaagagatttcaatggacggttacctggtccagtaactggacggccacgacgaccattatcgattaaagcatcgaccgcttcttgtaacatccgtttttcgttttgaacaatgatgcttggcgcatttaagtctaataaacgttttagacggttgttacggttgataacacggcggtataagtcgtttaagtcacttgttgcaaaacgacca

SEQ ID NO: 862 - DNA, 132 bp, Enterococcus faecalis
acaactaaagctgcgaaacgtaaacgacgtccacctttaacaacttttgttacacggttgatcgctacaacgcggtcttctaattccaaatgttttggatcaatataaaccatgaatggtgttcctccttct

SEQ ID NO: 863 - DNA, 168 bp, Enterococcus faecalis
tgccgtaaaatcaggaacagaaacgcctgcagaagtgccgtctttttcgtcataaccactaattgcatttaaagctaaggcattgtctttaacatttcgtgtcaatggaccaatttggtctaaatttgaagcaaaagcaatcaaaccaaaacgagatacacgtccata

SEQ ID NO: 864 - DNA, 169 bp, Enterococcus faecalis
tgcttaaagcgtcttttgcttgttcagctaacgctgtaaatgctgctgcatcgttaacggctaagtcagctaacattttgcggttgatatcaatctctgccaatttcaaaccgtgcattaatttagaatagcttaagccattcatgcgagctgccgcgttgatacgtgc

SEQ ID NO: 865 - DNA, 247 bp, Enterococcus faecalis
agtaaaggctaagacaccattgccatcaggagaaggatcgccttcttgaacaaagcgtaaatcttcgtaactaattggttggaaatcacgatctggatttacatttgtcaaatgatagccatcttcgttagctccaacaatggcgttggctaaatcttgaacagctaaatctgcataaattttaacatcttcggaaacattgactggaccaattgaaccaaagccagctcctaagacacggcgagca

SEQ ID NO: 866 - DNA, 214 bp, Enterococcus faecalis
accattacacggttgattaagcgagttactaattttgagttataaattggatctggtaaaacatcacgttttgcaacaggacctttacgaggcatccgtaactcctccttccgaaatatgatttttcaagttgttattgtcttattataattaagctttaggacgttttgtaccgtatttagagcggctttgtttacggtcgttaacaccggca

SEQ ID NO: 867 - DNA, 127 bp, Enterococcus faecalis
tgctgtcatttctttgaaccaacgaccgcttttcttaatggtccgtttcgcatcatcatctaaatccacagcgatgaagccataacagatttttataggcattgagccaagaccagttatccataca

SEQ ID NO: 868 - DNA, 100 bp, Enterococcus faecalis
cttctttactcgtcactgcttcaatacggcgtactcctgcaccaattccagattcagaaacaattttgaaaatcccgatatcttctgtattagcaacgtg

SEQ ID NO: 869 - DNA, 164 bp, Enterococcus faecalis
atctatgcaacgtaggtgcccggttaagtaaaactgggtgttcttggataacttcttctaagatatcccaaacttcatcttcgccacgttcgattttacgtttcgcatttttaatgtttgtcgcaatttcacgttgtactaattcacgcattacaaatggtttg

SEQ ID NO: 870 - DNA, 126 bp, Enterococcus faecalis
taacatccgaatcacggtcggatcatcatgtcctagaatatcaagttttaaaatattatcgtgaatggaatggaaatcaaagtgcgtcgttttccattctgcctcttgatcatcagcagggtattg

SEQ ID NO: 871 - DNA, 101 bp, Enterococcus faecalis
gcttcgcgaattttttcaatcaattcttttttatcgcctgcaaagttaaaggctgcaggttttgataaaatgccacttgcttttacgcgttcttctttgta

SEQ ID NO: 872 - DNA, 292 bp, Enterococcus faecalis
caccacccatttcctcacgttttacgatcttagtttttaccggcaatttgtgagatgcaagacgaagagcttcacgagctacttcttcaggaacgcctgcgatttcaaacatgattttaccacgtttaactggtgatacccagccttctggtgcccctttacctttacccatacgtacgccgatagctttacttgtgtaagacttgtgagggaaaattttaatccatactttcccgccacgtttcatgtaacgagtcattgcaatacgggctgcttcgatttgacggttagt

SEQ ID NO: 873 - DNA, 180 bp, Enterococcus faecalis
gtctaagccaccagtaatgtttaataagacttgttccgcaccatcgattgatgtttctaacaatggtgaagaaatagccttttttcgttgcttcaattacacgttcttcgccgctcgctacaccaattcccattaaagctgttccttggttttccatcactgttttcacgtcagcaaagt

SEQ ID NO: 874 - DNA, 114 bp, Enterococcus faecalis
tagttgtaaccttcccatgtcatgaaggcaaccaagacgttttgccctaaagccatttcgccttcttccatagaaggtccatccgctaaagtatcgcctttttcaactttttca

SEQ ID NO: 875 - DNA, 172 bp, Enterococcus faecalis
ttcagctccgattggaatttgaattggatgagcgtttgcttgtaaacgatcatgtaatgattctactgaatagaagaagtccgcaccgattttatccattttgttacagaatacaatacgaggaactttatattcagtcgcttgacgccaaacagtttctgtttgaggttct

SEQ ID NO: 876 - DNA, 99 bp, Enterococcus faecalis
tgctgtcgagcgccaaggcattaatcgtaaaatctcgccgttttaagtcttctttcaaggagcgaacaaaggtgacttcatctggtcgacgaaagtctt

SEQ ID NO: 877 - DNA, 254 bp, Enterococcus faecalis
taatatcttctccattaatagttgcaaaggcttgaacgcggaccaaagcaccctctaattcacggatgttggaatcaatttgaccagcgatataacttagtgtatcatccggaatttctaaacgctcggcatctgcttttttgcgcaaaattgcaatccgtgtttctaaatcaggcggggtgatatcgacagacaaaccccaagcaaagcgagaaactaatcgttcaggtaattttggaatatcattcggcggg

SEQ ID NO: 878 - DNA, 271 bp, Enterococcus faecalis
gttcccacatacaagaattctgttgcaggtgcttcttttttgacgtgttcgacgaaggataacgcaggatagatatgcccacctgtgccaccaccagttactagtatcttcattttctcacatttcactttcttttaattgttgaacagcttgcataaaggcttccccgcgtacttcaaaattcgggtattggtcccaacttgcgcaagcaggtgatagtaaaatagtatcatctttttccgaataatcaaaggcaatggtaaccgccgtt

SEQ ID NO: 879 - DNA, 212 bp, Enterococcus faecalis
tgctaagttttccaactgacttttctcgccgtcttcgatgttccgtttttggtcggtatcctcgatacgaatgataaattctccgtcattgtggcgggcaaataagtagttaaataatgctgttcttgcattcccaatgtgcaagtgtccagttggacttggtgcgtaacgcacacgaactttcgtcatgttcattcctctttccatttttt

SEQ ID NO: 880 - DNA, 197 bp, Enterococcus faecalis
cgcctactgaacggatacgacgattacctaagtggtcgatgtcatcgacattgccgatatcttccattaagttgaagaagtagctcattgaagcaacgatatctgctggacgaactgtttttacgctgtcgtctggatagccgttaccaatcacatttacgatacgttcaggatcttttggtgaaagaacttgaatc

SEQ ID NO: 881 - DNA, 255 bp, Enterococcus faecalis
taatatcttctccattaatagttgcaaaggcttgaacgcggaccaaagcaccctctaattcacggatgttggaatcaatttgaccagcgatataaccttagtgtatcatccggaatttctaaacgctcggcatctgcttttttgcgcaaaattgcaatccgtgtttctaaatcaggcggggtgatatcgacagacaaaccccaagcaaagcgagaaactaatcgttcaggtaattttggaatatcattcggcggg

SEQ ID NO: 882 - DNA, 121 bp, Enterococcus faecalis
aacaatatttactaatttatctggaacagcaatcactttgcgcactgtttttccttcaataaattctttaacagcttcatggttcattgcaatttgttctaattcttctttgcttaaccca

SEQ ID NO: 883 - DNA, 173 bp, Enterococcus faecalis
tacttgttctaatgaagattcatcaacttttggacgtgtattttgttctctgcgaatatcccaatcgccaaaagcacttgcttcttcttgtgattttggttgatccatttccacagattgagttgtttgttgcattggttgaaccgcttgtcttgtttgacggtgcggttttc

SEQ ID NO: 884 - DNA, 192 bp, Enterococcus faecalis
ccaaagacaggtggtgtccattcaaacgcttcgtaaatcattaattgttttggtgtgttcgcaatgtgatcatcgccacgtaaaacgtgagaaattttcattaagtgatcatctactgcaacggcaaagttatacgttggcatcccatcgcgtttttggatgacaaaatcgccaccaatgttatctgactca

SEQ ID NO: 885 - DNA, 135 bp, Enterococcus faecalis
tctactgcaacggcaaagttatacgttggcatcccatcgcgtttttggatgacaaaatcgccaccaatgttatctgactcaaaagtaatttcacctttcacgatgtcatcaaatttgtattctgtattacgtggc

SEQ ID NO: 886 - DNA, 209 bp, Enterococcus faecalis
gcccaacccttgggaccgactacagccccaggatgcgacgagccgacatcgaggtgccaaacctccccgtcgatgtggactcttgggggagataagcctgttatccccagggtagcttttatccgttgagcgatggcccttccatgcggaaccaccggatcactaagcccgactttcgtccctgctcgacttgtaggtctcgcagtcaa

SEQ ID NO: 887 - DNA, 290 bp, Enterococcus faecalis
cctttgcctttataaggttctggaggacgaacgccacggatgttagcagctaattcaccaacaacttctttgttgatgcctttaacgataacttgtgtgttcgcaggtacttcaaatgttacgccttctggtgctgtcatttcgacaggatgagaataaccaacgtttaaagttaatttgttgccttgtacttgggcacggtatccgaccccgataagttcaagtgctttttggaaaccttcagaaacaccaacaaccatgttgttgaagtttgcacgagttgttccgtg

SEQ ID NO: 888 - DNA, 236 bp, Enterococcus faecalis
tcctttggcaaagttactcatttcaaatacgcccattggtccattccaaacaactgttttcgcaccttgtaattcgttagcgaataattcaattgttttttcaccaatatccaagccttcttcatcatctgggatttcagttgaaggaaccgtgtggaaaggagcgtcattgctgaactctttagagacaactgtatcaaccggtaaaactaatttgtcgccagctttttccatta

SEQ ID NO: 889 - DNA, 246 bp, Enterococcus faecalis
caacgcggaatgatggatcttcttcagcaagtttttgtagagccacgcccattttatcttggtcagcttttgatttaggttcaacagcgacttggataactgggtcagggaattcaatagattcaagaataactggtgcatctaatgcacataatgtatcaccagttgttgtgtcttttagaccaacagcagcagcgatatcaccagagtacactttgtcaatttcttgacgagtgttggcgtgca

SEQ ID NO: 890 - DNA, 120 bp, Enterococcus faecalis
tacttgtgccaatgcttcaataatcaaaacgcctggcattgttggatttccagggaaatgtccttggaaaaattcttcgttaattgttacattttttgttgcaataatcttttcatttgg

SEQ ID NO: 891 - DNA, 132 bp, Enterococcus faecalis
ttcaggtaagatagtattgcctaacgatttactcatcttacggccttcgccatcgagaaccatcccttgagaaatgattgatttataaggcgctaccccattgatagcaacacttgttgtaatacttgagtt

SEQ ID NO: 892 - DNA, 111 bp, Enterococcus faecalis
tcaaaactaaatggacgagttactacaccaactgttaaagcgcctaattctttagcgatttttgcaactactggggcagcacctgtaccagttccgccacccataccagca

SEQ ID NO: 893 - DNA, 176 bp, Enterococcus faecalis
aaggcatccgcaatccctgctggatttttcccaccagcttgagccatatcaggacgaccaccgccgccaccgccaacttttggcgcaattgctttgattaagtcaccggcttttaagccttttccgttcatgtcttttgtcatagccgctaacaagcttactttttcatcttgtgc

SEQ ID NO: 894 - DNA, 395 bp, Enterococcus faecalis
tcgaggtgccaaacctccccgtcgatgtggactcttgggggagataagcctgttatccccagggtagcttttatccgttgagcgatggcccttccatgcggaaccaccggatcactaagcccgactttcgtccctgctcgacttgtaggtctcgcagtcaagctcccttctgcctttacactcttcgaatgatttccaaccattctgagggaacctttgggcgcctccgttaccttttaggaggcgaccgccccagtcaaactgcccatctgacactgtctcccaccacgattagtggtgcgggttagagggttcataacacaagggtagtatcccaccagcgcctcctccgaaactagcgttccggtctcatcggctcctacctatcctgtaca

SEQ ID NO: 895 - DNA, 274 bp, Enterococcus faecalis
gatgcctttaacgataacttgtgtgttcgcaggtaccttcaaatgttacgccttctggtgctgtcatttcgacaggatgagaataaccaacgtttaaagttaatttgttgccttgtacttgggcacggtatccgaccccgataagttcaagtgctttttggaaaccttcagaaacaccaacaaccatgttgttgaagtttgcacgagttgttccgtggattgttttcatttcttttgaatcgtttggacgagtgaatgtcacttcgtttccttc

SEQ ID NO: 896 - DNA, 150 bp, Enterococcus faecalis
agcaggtaagctttagcaacagcaacgccatcacttgcggcaatcccttttagcatctcagacattattcagccaatccttctttttgtaatgtttcaacgattgctgccattccttcagcttcgtcagcaccatcaacagtgattgtta

SEQ ID NO: 897 - DNA, 183 bp, Enterococcus faecalis
tcgatgattttagctggtgctactacatcgtcgttgctgaatgcgacagcagttgggcctgtaaagacttcgtctaagccgtctaaaccaacttttttagctgcacgagaaaggattgagtttttgatgactttcatttctacgcctgcatcacgtaattgtttacgtaagttagtgacttct

SEQ ID NO: 898 - DNA, 257 bp, Enterococcus faecalis
aaagattttttcgctccaggaatgtttcctttgattaagataacatttctttctacgtccactttaacaacttcaaggttttgaattgttacgcggtcgccacccatacggccggctagtcgtttatttttaaatacacggttaggcgctactggacccattgacccaggacgacggtgataacgagaaccatgagacataggtccgcggctttggccgtgacgtttgattgccccttggaatcctttacctttcgt

SEQ ID NO: 899 - DNA, 267 bp, Enterococcus faecalis
gcctaattgaatcactgtttctgcttttgaatgttttaatgcttgaacgtctgtattggctgtgataaattccacacctttaacgttttcttcgatcatacggtttacagcgtttccgccgccgccacctacaccgataactttaatgactgcaccgttgttaatgttattgtctaatgaaaattccatgatatcgtatcctcctgtttgtgtgattagtcgaaaatgttcgagaagaagtctttgattttgcctgtcactttttca

SEQ ID NO: 900 - DNA, 111 bp, Enterococcus faecalis
ccattcttgttccctcctatcaaattcgtttagaatggtaaatcatcatctgaaatgtcgatagatgaacctgagccaccaaatggatcagaatctttatcgaaatcaggc

SEQ ID NO: 901 - DNA, 131 bp, Enterococcus faecalis
tgatacctgcttgacctaacgctggacctactggtggagctggtgttgctttccccgcaggaatttgtaatttaacgattttttctacttttttagccacgaaaatacctccttaagttctcgtgcgtggt

SEQ ID NO: 902 - DNA, 106 bp, Enterococcus faecalis
ttgtgtattttttagaattaccatacgtaggcgattacttcgccgccgatatttttcgctctagccttctttgtcagtaattacaccctctgatgtagagatgatt

SEQ ID NO: 903 - DNA, 254 bp, Enterococcus faecalis; identical to SEQ ID NO: 877

SEQ ID NO: 904 - DNA, 150 bp, Enterococcus faecalis
tgcttccatcccaacatacatttcgcccgtttctttgtgataccaagcaggaatttggtggccccaccataattgtcgcgaaataacccagtcatgaatattttccatccaacgtaaaaatgtttgattgaagcgtggtggataaaattc

SEQ ID NO: 905 - DNA, 124 bp, Enterococcus faecalis
ctacgtggacttctaatccaatgacagtttcaaagttcattaatcgttcccccctaaaatgactggttttttcgtatggaaatctgtcgcttgttcaaaagcataggctgctttatacattgta

SEQ ID NO: 906 - DNA, 124 bp, Enterococcus faecalis; identical to SEQ ID NO: 905

SEQ ID NO: 907 - DNA, 147 bp, Enterococcus faecalis
tacacggttgatcgctacaacgcggtcttctaattccaaatgttttggatcaatataaaccatgaatggtgttcctccttctcctaaaattctagtccattttcacgagcagcttcagctaaagcttgcacgcggccatggtaaagg

SEQ ID NO: 908 - DNA, 225 bp, Enterococcus faecalis
gttggaatccataacgaacggtttcttcctctaccacttcatcttcatataatgggaattcaggcgttacttccaacaagtcagctgttgcatttaataaaggttcaatacctttacgagtaaccccagaaattgggaaaataggtagctcatcggcatactcatcggtgcgttccttcgcaagttgctctttaaatttcgctaaattctcttctgcttcaggca

SEQ ID NO: 909 - DNA, 230 bp, Enterococcus faecalis; identical to SEQ ID NO: 861

SEQ ID NO: 910 - DNA, 140 bp, Enterococcus faecalis
cataagactcgtcgccttctaaagctttcaaagcagaacctgcgataactggaacatcatcgcctgggaaatcgtattctgataataagtcacgaacttccatttctactaattctaataattcttcgtcatcaaccata

SEQ ID NO: 911 - DNA, 114 bp, Enterococcus faecalis
gttcgattatagacgcgtttaacagctgtgagggtatcatcaatgatggataaatttcttaagcccaagaaatccattttcagaagaccaattttttcaacatcattcatagta

SEQ ID NO: 912 - DNA, 185 bp, Enterococcus faecalis
gaagttccgttaattcatccatttgggctttaatttctgcatggtttcctttttctaaagcaaacgttgcttgcaagacaatacaatgtaattcttgaatttcactatgacgataacggaaattcaggtcttctttcgtcattgtttggatagttccatctgccaacagcacttctgcagattgg

SEQ ID NO: 913 - DNA, 124 bp, Enterococcus faecalis; identical to SEQ ID NO: 905

SEQ ID NO: 914 - DNA, 163 bp, Enterococcus faecalis
cttcatagaactcagaatattgacactcaggacaataataatgtggcgctaaaggatttacttcagtaatccctgtcattgtcgcaacaaaactcgaaccgacagagccccgtgaaccaactaaatagccgtcttcattacttttatgcaccagtttttgaga

SEQ ID NO: 915 - DNA, 102 bp, Enterococcus faecalis
  misc_feature (1)...(102): n = A,T,C or G
gtagagatgattgcaattcctagaccgtttaatacttttggtacttcgtcagcttttacgtatgcacgtaaacctggtttagaaatacngttttaagtttgt

SEQ ID NO: 916 - DNA, 275 bp, Enterococcus faecalis
cccataccagagataactgtttcaccagtttcaacgtttgtttcaacgcggaatgatggatcttcttcagcaagtttttgtagagccacgcccattttatcttggtcagcttttgatttaggttcaacagcgacttggataactgggtcagggaattcaatagattcaagaataactggtgcatctaatgcacataatgtatcaccagttgttgtgtcttttagaccaacagcagcagcgatatcaccagagtacactttgtcaatttcttgacg

SEQ ID NO: 917 - DNA, 261 bp, Enterococcus faecalis
tccgattggaatttgaattggatgagcgtttgcttgtaaacgatcatgtaatgattctactgaatagaagaagtccgcaccgattttatccattttgttacagaatacaatacgaggaactttatattcagtcgcttgacgccaaacagtttctgtttgaggttctacacctgattgagagtcaagaactgttaccgcaccatctaatacgcgtagagaacgttgtacttcaattgtgaagtccacgtgtcctggagtatc

SEQ ID NO: 918 - DNA, 248 bp, Enterococcus faecalis
  misc_feature (1)...(248): n = A,T,C or G
agtaaaggctaagacaccattgccatcaggagaaggatcgccttcttgaacaaagcgtaaatcttcgtaactaattggttggaaatcacngatctggatttacatttgtcaaatgatagccatcttcgttagctccaacaatggcgttggctaaatcttgaacagctaaatctgcataaattttaacatcttcggaaacattgactggaccaattgaaccaaagccagctcctaagacacggcgagca

SEQ ID NO: 919 - DNA, 267 bp, Enterococcus faecalis
gaaccgacaacatctcctataaataatatacgcaaaaaggttcctcttctctttttaacatctcttgtttattatagttgttttcgctttgaaaagaaagttttggttttaaaagattaaaaaaagtgtctcaacgaacaatccttacaattgttcgttgagacactacacgcgatacttattcgctttttattttatttcgcatagtcaacggcacgtgtttcacggataaccgttactttgatatgtcctggataatccaagtca

SEQ ID NO: 920 - DNA, 118 bp, Enterococcus faecalis
tacaccaattcccattaaagctgttccttggttttccatcactgttttcacgtcagcaaagtccaagtttacgtaacctggtgcagtgattaaatctgaaattccttgaacaccttga

SEQ ID NO: 921 - DNA, 147 bp, Enterococcus faecalis; identical to SEQ ID NO: 907

SEQ ID NO: 922 - DNA, 144 bp, Enterococcus faecalis
cctgtttttttagaaacgcggacttttttgccgtcgacttctttaaacgcaactttagtagcttctccgtttgaaggatcaatcaccattacattagaaacatgaattggcgcttccacttcaaggattccaccttgtggggct

SEQ ID NO: 923 - DNA, 182 bp, Enterococcus faecalis
tgagaaaataagtccattcttttttgctctttgcgttctaaaacagcacttgggtcaaactctttcacttcaccagccaaagccaccccagtatcttcagaatcaaatttagtaattttgccaattcctagcttgccatccactagattatgccaaaattcttttacggtattgcctaatgg

SEQ ID NO: 924 - DNA, 125 bp, Enterococcus faecalis
atacggattttacctgaaacagtagcaagaacttggtgtccattttctagttcgactttaaacattgcattcggcaaagtttcgacgactgtaccttcgacttcaatcatatcttcttttgccac

SEQ ID NO: 925 - DNA, 204 bp, Enterococcus faecalis
ttctgtttcaataaacggagctaagccaccttgtcgattaacccctaaaagcatttttacaaattcaatcgtaatgcgttctactgaaattttttctaataaaggatgaaattcagcgatagcggctaaggttttttcttcaattttaaaatctaattggctagcaaagcgtaagccccgcatcattcgcagagcatcttcatg

SEQ ID NO: 926 - DNA, 143 bp, Enterococcus faecalis
  misc_feature (1)...(143): n = A,T,C or G
cgagaatctttgtatttatgagtcgcacgaataactgtgtaaagtgagcgttctgttggtaatggaatcggacctgatacngtcagctccagttctttttgctgtttccacaattttatccgctgattgatctaaaatacngg

SEQ ID NO: 927 - DNA, 235 bp, Enterococcus faecalis
taagctacagtatgctcagctggattaaaatcactcgtattcgctaacaagaaacgcatagtattacggattttccggtacacttcagataccttggtttaagatatccattgagacacgcacatcggcttccgcgtcaacactacttacccacaagcgtaagatatctgcacccatttggttgataactttttcaggtaagatagtattgcctaacgatttactcatcttacgg

SEQ ID NO: 928 - DNA, 247 bp, Enterococcus faecalis; identical to SEQ ID NO: 865

SEQ ID NO: 929 - DNA, 282 bp, Enterococcus faecalis
tgaactaatgggaaggtccagcctttatcttcaataattcggataacgccataggtttgacgacgaagtgcataaggatcgttagaacctgttggaatcataccaactgagaagaatgaaaagacgctgtcaagcttatcggctaaggccaaaacagccccgattgctgtttctggcaattcaccttcactagaagttggtaaataatgttctcgaatcgccgttgctacggctggtttttcgccttgtaataaggcatatttttctcccataattccttgt

SEQ ID NO: 930 - DNA, 230 bp, Enterococcus faecalis; identical to SEQ ID NO: 861

SEQ ID NO: 931 - DNA, 144 bp, Enterococcus faecalis
ccaacacgaaccccttctagtacgaccgcattcgctccaatgacaacctcgttttcaataaccacaggtgcggcacttggtggttcaatgacaccagctaaaaccgttcctgcgccaatatgacaatgcttccctacagttgca

SEQ ID NO: 932 - DNA, 124 bp, Enterococcus faecalis; identical to SEQ ID NO: 905

SEQ ID NO: 933 - DNA, 120 bp, Enterococcus faecalis
tacaccaattcccattaaagctgttccttggttttccatcactgttttcacgtcagcaaagtccaagtttactgtaaccttggtgcagtgattaaatctgaaattccttgaacaccttga

SEQ ID NO: 934 - DNA, 175 bp, Enterococcus faecalis
ggttttcatctggcaagtcttttaagacaccattttcattcatgtattcaatcaatgttttagaaactttacctcgtgttgccaaatcttctttcgacaagaacggttgctcttctcgcgcagcgacaatggctttcgctacgttgaggcctaaacttggcactgctcggaaagg

SEQ ID NO: 935 - DNA, 133 bp, Enterococcus faecalis
  misc_feature (1)...(133): n = A,T,C or G
acaactaaagctgcgaaacgtaaacgacgtccacctttaacaacttttgttacacggttgatcgctacaacgcnggtcttctaattccaaatgttttggatcaatataaaccatgaatggtgttcctccttct

SEQ ID NO: 936 - DNA, 222 bp, Enterococcus faecalis
ggtgtgccactaaaccaggtaagcggacactatggattcgcagaccctcgaaatcagccccgcgtgcccctggtattgattctacctcttgcggattcccttgtttttttgctggccgaacttcttgaatcatttctgcagtttttatagccgttccgctcggtgcatccaatttgttatcatgatgtaattcaatgatttccacatccggaaaatactgtg

SEQ ID NO: 937 - DNA, 254 bp, Enterococcus faecalis; identical to SEQ ID NO: 877

SEQ ID NO: 938 - DNA, 109 bp, Enterococcus faecalis
  misc_feature (1)...(109): n = A,T,C or G
caccacgttcaacacggcctgtagcaacagtaccacgtccagtgattgagaatacgtcttcgactggcatcatgaatggtttgtcagtatcacngttctggagttggga

SEQ ID NO: 939 - DNA, 389 bp, Enterococcus faecalis
taccttctacattcatgataacgaagcgacttgcattccagatcttattgataaagttccaagaagcatccattttttcataactaaaacgaacatcttgaccaggtgcctgaaccatttgataagaaccaacgtaacgcatctgcgccatatttttcgatgacatccattggatcaatcccattccccaatgatttactcattttgcgtccttgctcatcacgaattaagccgtgaattaagacattttggaagggacgttcgcctgtaaactctaagctttggaaaatcatacgacttacccaaaaggcaataatatcatagccagtaactaatgtgcttgttgggaagtaacgttgataatcttcgcttgcttcgtccggccaacc

SEQ ID NO: 940 - DNA, 166 bp, Enterococcus faecalis
  misc_feature (1)...(166): n = A,T,C or G
cctcgtattttagcggcaagagcacagctcttgcggcgttctttctttaatgattgctttctggctcccaatttggtagaaatgtttcttgtaaaaagcttgtgtcatagtcacctgtcaaaannttgtcatgtgtaattaaatctaattggaattcggcattcgt

SEQ ID NO: 941 - DNA, 172 bp, Enterococcus faecalis; identical to SEQ ID NO: 875

SEQ ID NO: 942 - DNA, 291 bp, Enterococcus faecalis
cctttgcctttataaggttctggaggacgaacgccacggatgttagcagctaattcaccaacaacttctttgttgatgcctttaactgataacttgtgtgttcgcaggtacttcaaatgttacgccttctggtgctgtcatttcgacaggatgagaataaccaacgtttaaagttaatttgttgccttgtacttgggcacggtatccgaccccgataagttcaagtgctttttggaaaccttcagaaacaccaacaaccatgttgttgaagtttgcacgagttgttccgtg

SEQ ID NO: 943 - DNA, 144 bp, Enterococcus faecalis
aactgtttcaccagtttcaacgtttgtttcaacgcggaatgatggatcttcttcagcaagtttttgtagagccacgcccattttatcttggtcagcttttgatttaggttcaacagcgacttggataactgggtcagggaattc

SEQ ID NO: 944 - DNA, 141 bp, Enterococcus faecalis
cataagactcgtcgccttctaaagctttcaaagcagaacctgcgataactggaacatcatcgcctgggaaatcgtattctgataataagtcacgaactttccatttctactaattctaataattcttcgtcatcaaccata

SEQ ID NO: 945 - DNA, 219 bp, Enterococcus faecalis
cgtgcgtagttaactacccaacgtaaacctaaagttgtacgacgttctggacgaacttcaactggtacttggtagttagaacccccaacacgacgtgctttaacttcaagaacaggcataacgtttttcattgcttgttcaaaaacttccaatggatcgttacctgtagattctttgatgatatcaaatgaattatagataatgttagcagcaatcccg

SEQ ID NO: 946 - DNA, 228 bp, Enterococcus faecalis
cgacaacggtcacacgtttcgccttctgctttttcaactaaaatagccatgtcttcaaattgaacagcttcactaggtgctacttcttttgatacttcaaagtcggaaacaattagtaattgagcaatatctgcatcaacagctgtcattaattgacgaatttgttcatttggataaacggtcactttagcttctaacgatttaccgattaatttagaatgacgagct

SEQ ID NO: 947 - DNA, 146 bp, Enterococcus faecalis
tgttgacgtggcgcatctgcttctttggcagctacaccgtgtttctttaattcagccagttctttcttcagttgcccgatttgattttgtaaatctgctaattctggatttccctctgcactaccatcttgattagctgtttctgg

SEQ ID NO: 948 - DNA, 107 bp, Enterococcus faecalis
cccatcgaaaacaggtgttgcgacgtgaatacctaattggcgagcagccatacctaagtgtaattcaagtacttgtccgatattcatacgagaaggtacccctaatg

SEQ ID NO: 949 - DNA, 179 bp, Enterococcus faecalis
ggccgtgacgtttgattgccccttggaatcctttacctttcgtagtacctgtaacatcaacaacgtctcctgcttggaaaacatctactttgatttctttacctacttcatattctcctagctcaacattcttgaattctttaatgaagcgcttaggagccgtgtttgcttttgcaaca

SEQ ID NO: 950 - DNA, 139 bp, Enterococcus faecalis
cgcagacctttttatcttccacgtaagcagtcgctttgccgatgccgacaaagtcacgtaatttgacgatttcaaaatgtaatttcaagacatcaccagggaccactttttgacggaatttggctttgttgataccgcc

SEQ ID NO: 951 - DNA, 54 bp, Enterococcus faecalis
gcaggtttcataaggatacggccgccaccgaatacgccaattacttcgtgcggg

SEQ ID NO: 952 - DNA, 268 bp, Enterococcus faecalis
gcctaattgaatcactgtttctgcttttgaatgttttaatgcttgaacgtctgtattggctgtgataaattccacacctttaacagttttcttcgatcatacggtttacagcgtttccgccgccgccacctacaccgataactttaatgactgcaccgttgttaatgttattgtctaatgaaaattccatgatatcgtatcctcctgtttgtgtgattagtcgaaaatgttcgagaagaagtctttgattttgcctgtcactttttca

SEQ ID NO: 953 - DNA, 174 bp, Enterococcus faecalis
taatgaagcacgttgcatgatgattgcatcatagacaacacctttcattaggttcgattccgaagatttcttcatttaaagtgatttcaccgttttgagttccatcttgtttgaataatgctacattcggcattccttagttcctcctttccctacacttatttagctttcaca

SEQ ID NO: 954 - DNA, 285 bp, Enterococcus faecalis
aaaccacggtagtccacgattacaactgatgctgctgattcaaatttctcagcggctgcttgaactagggtttcttttttagcgattgctgcttcacctcatttatttcacctcctgattttgatggtggagttggacttggtttacgttatgtaaagtagaagaatcaaatgaaacttcgctcacttcgttcgccaagtattgttttacatcggctttttttcaaaaagtcgtgtaaaacaacaaaactccatgccaccgtagacatagagggaccgaattgta

SEQ ID NO: 955 - DNA, 132 bp, Enterococcus faecalis
cataacgatgacggtgacgttcttggacaacatcttcatttccgtatgctgccgcagttttcgttccttttttcaatttacatggatataaacctaaacgtagtgtgccacctaaattctcgatgttttctt

SEQ ID NO: 956 - DNA, 152 bp, Enterococcus faecalis
aagtattcttttggtaaagcaattttcatgcctttgatgtcgccagttaaatctgccgtaaaatcaggaacagaaacgcctgcagaagtgccgtctttttcgtcataaccactaattgcatttaaagctaaggcattgtctttaacatttcg

SEQ ID NO: 957 - DNA, 219 bp, Enterococcus faecalis
taatcctaatcctagatcatgcaatttaagttttacttcttcaagagatttacgacctaaattacgtactttgatcatttctggttcagatttgtttgtaagttcttgtacagtattaatgcctgcacgttttaaacagttatatgaacgaactgataaatcaagttcttcaatcgtcatttctagcattttctctttttgagtttcttctttttccac

SEQ ID NO: 958 - DNA, 183 bp, Enterococcus faecalis; identical to SEQ ID NO: 897

SEQ ID NO: 959 - DNA, 145 bp, Enterococcus faecalis
tgcgataactggaacatcatcgcctgggaaatcgtattctgataataagtcacgaacttccatttctactaattctaataattcttcgtcatcaaccatatccattttgtttaagaatacaacgatgtatggtacaccaacgtta

SEQ ID NO: 960 - DNA, 109 bp, Enterococcus faecalis; identical to SEQ ID NO: 938
  misc_feature (1)...(109): n = A,T,C or G

SEQ ID NO: 961 - DNA, 388 bp, Enterococcus faecalis
taccttctacattcatgataacgaagcgacttgcattccagatcttattgataaagttccaagaagcatccattttttcataactaaaacgaacatcttgaccaggtgctgaaccatttgataagaaccaacgtaacgcatctgcgccatatttttcgatgacatccattggatcaatcccattccccaatgatttactcattttgcgtccttgctcatcacgaattaagccgtgaattaagacattttggaagggacgttcgcctgtaaactctaagctttggaaaatcatacgacttacccaaaaggcaataatatcatagccagtaactaatgtgcttgttgggaagtaacgttgataatcttcgcttgcttcgtccggccaacc

SEQ ID NO: 962 - DNA, 127 bp, Enterococcus faecalis
cctcgagctgctgcttcatcgttaaattcttcatgaacaactgggtactctgccacaaccaatgactcaccttgatgcggaattttttcccaaatttcttctgttacaaacggcataattggatgca

SEQ ID NO: 963 - DNA, 224 bp, Enterococcus faecalis
gaccaaatgccgacattgctctatctacaaagtttgttcctggcaatttaccagcagattcaccacttaaacctgaatgctgtgctcgtaccaaaaccaaattttttcaaatactccatccatttttcatcacccattttttgttctagttttaccataccaatattactagaccaagaaatggcttgacgataattcaaatattctttgccgttcaaccgagt

SEQ ID NO: 964 - DNA, 116 bp, Enterococcus faecalis
cattttttcagttcgttgatctggttggcaccccattaaaataatcattgaacaaaataacccgacaactatctttttagttttcatttttcctccttttaaaactcattgaatta

SEQ ID NO: 965 - DNA, 230 bp, Enterococcus faecalis; identical to SEQ ID NO: 861

SEQ ID NO: 966 - DNA, 224 bp, Enterococcus faecalis
agtagacaattaaattttatagatattttactaacggtagttgttttagcaaaagacaactaccgtttgctataaaaaaagaacccttgcaacacaagggttctcgaacattcaaaagttgaatgaattattttactgttactgaagcgccaacttcttctaaagcagcttttaaagcttctgcttcttctttagaaacagcttctttaactggtgcaggagcg

SEQ ID NO: 967 - DNA, 324 bp, Enterococcus faecalis
aacctaattcacggtattgttcaataaattgtaaaattgtttcatcacgtttgctcaattttttgccagtttctgaattaatgattaaggtcatatggccaaagacaggtggtgtccattcaaacgcttcgtaaatcattaattgttttggtgtgttcgcaatgtgatcatcgccacgtaaaacgtgagaaattttcattaagtgatcatctactgcaacggcaaagttatacgttggcatcccatcgcgtttttggatgacaaaatcgccaccaatgttatctgactcaaaagtaatttcacctttcacgatgtcatcaaatt

SEQ ID NO: 968 - DNA, 169 bp, Enterococcus faecalis; identical to SEQ ID NO: 864

SEQ ID NO: 969 - DNA, 168 bp, Enterococcus faecalis
tgccgtaaaatcaggaacagaaacgcctgcagaagtgccgtctttttcgtcataaccactaattgcatttaaagctaaggcattgtctttaacatttcgtgtcaatggaccaatttggtctaaacttgaagcaaaagcaatcaaaccaaaacgagatacacgtccata

SEQ ID NO: 970 - DNA, 132 bp, Enterococcus faecalis; identical to SEQ ID NO: 955

SEQ ID NO: 971 - DNA, 169 bp, Enterococcus faecalis
gcccccgacaaaatacgcttcaaagccctgtgcattgatttcacgaataacgggagcggcttctttaaattcgtttggaatagttgtcaatttcatagcatctgttccaatccgtaaagtagttctgttctctgtaccacttgccgacaagctaacgctactcctgtca

SEQ ID NO: 972 - DNA, 155 bp, Enterococcus faecalis
ccatccatttttcatcacccattttttgttctagttttaccataccaatattactagaccaagaaatggcttgacgataattcaaatattctttgccgttcaaccgagtgtagtcatggtcattcacagttacatccccaacctgaattccacca

SEQ ID NO: 973 - DNA, 204 bp, Enterococcus faecalis
cagctaaagcaggggttcctaaaacttctaagtcaccagaaccgagcattttagccgtttgtgattctttcaccaagaattcttttgtaaacatttctgttggcattatgctttctctccttttgaacgttgttttttggcaaacgaaagcagaacttcttgtttattctctaagctaccttcaacaacgtgttgctcgatttc

SEQ ID NO: 974 - DNA, 221 bp, Enterococcus faecalis
  misc_feature (1)...(221): n = A,T,C or G
taaacggaattgcaataatttatctgctcctttgacttttttacagtcaataacttcggcaacttttaattccactttatcgaaatcatcgtacttaatttgtttttctttcgttgaaaccaacgttgtttcttctggattccatttaatatcctcttctgtagcactttcggcnttttnggggnacaattttcttttgaatatacgttacttctgtttca

SEQ ID NO: 975 - DNA, 272 bp, Enterococcus faecalis
ttcactggctgggtcatcggttgttaggactgcaacatcagccaattcagaaagaaccctaccaaagtctttgcggcgagaaatcgctttgtctcccgtactaccgacaagaacaattaagcggccgtcaggatgttcttcacggacaaaggttaaaagattcttcaaactgtcattaagttatgagcgtaatcaacatagacggttgcaccgttggtattcgttaaagattccatccggccagggacggtggttgctgcgatcccttgttg

SEQ ID NO: 976 - DNA, 184 bp, Enterococcus faecalis
aaatcacacagttgataaagtctgcttcacggtcaccattttgattcgtaaagttacggtttacagcaagtgtaaaggtcgcaacagctgaaccactagcggtgtaacgtaagtcaggatcttttgtcaatcttccgactaatacaacgttattaatcattcaaaacatctcctttcgtcaata

SEQ ID NO: 977 - DNA, 132 bp, Enterococcus faecalis; identical to SEQ ID NO: 862

SEQ ID NO: 978 - DNA, 149 bp, Enterococcus faecalis
agcagctgcctttaacatcactgggtaaccaatttcttcagcaatcgtcaacgcttcttcgacagaatcaatgacgccatcactcccaggaataacaggtaccttggctttttgcatcagttgacgtgcgtttattttattgcccattg

SEQ ID NO: 979 - DNA, 84 bp, Enterococcus faecalis
tgatttcgcctgtgctgtcgagcgccaaggcattaatcgtaaaatctcgccgttttaagtcttctttcaaggagcgaacaaagg

SEQ ID NO: 980 - DNA, 170 bp, Enterococcus faecalis
cgacctgatacttgagttttgattcctttagcgccagcacgcattgcgcgttggatggcttgtttttgagcacgacggaaagcaacacggttttctaattgacgtgcaattccttcgcctactaattttgcatctaaatctggttttttgatttcaacgatgttgatgtg

SEQ ID NO: 981 - DNA, 125 bp, Enterococcus faecalis
taaaccagaaattaagttcatacgtaacacagaacgctcttcactcattggccattgcaaacgtgttgtttgactttctttcatcataaattgacgggatttttcttctgttgtcaacgcatagc

SEQ ID NO: 982 - DNA, 255 bp, Enterococcus faecalis; identical to SEQ ID NO: 881

SEQ ID NO: 983 - DNA, 226 bp, Enterococcus faecalis
gcatggaaaggtcgagctcgtttgtatgagtctccttcgccaatatgacgattcaaatcatcatggaaatgcatatcatgattctctttcgcttcttttaagaaaatccagcacaaatgacctgttgattccgagtcataaatggcgcggtgatgttgttctaagttgacgccaaattttttcgataaggtatttagacgatggcttttgaaatgcggatacaaga

SEQ ID NO: 984 - DNA, 246 bp, Enterococcus faecalis
acaaatcggatagcgattaggaatcatttccataatttctgttgcagtcattacttttttcatactagttttcctcccatttcttcaagcaaattacaccattatggccaccaaagccaaacgaattactaattgtatagtccgctgtaatgtcacgtgcaccttctgtgacataatctaaatcacaatctggatcagcaacttggtagcctactgtcggatgagcttttccttcttgcaatgttt

SEQ ID NO: 985 - DNA, 135 bp, Enterococcus faecalis
catttaataaaggttcaatacctttacgagtaaccccagaaattgggaaaataggtagctcatcggcatactcatcggtgcgttccttcgcaagttgctctttaaatttcgctaaattctcttctgcttcaggca

SEQ ID NO: 986 - DNA, 89 bp, Enterococcus faecalis
cacggagagcgtggttgaattaacggcaccgcttgacgctgcatgttggcacccatcaaggcacggttggagtcatcgttttctaagaa

SEQ ID NO: 987 - DNA, 150 bp, Enterococcus faecalis; identical to SEQ ID NO: 904

SEQ ID NO: 988 - DNA, 81 bp, Enterococcus faecalis
taaccaaacatttcagctaaaggtaccatcgcattaacgatttgagagttaccgtgtgcttccataccttcaacacgtcca

SEQ ID NO: 989 - DNA, 73 bp, Enterococcus faecalis
gctttgacagcgtaagccacgttgcggactggcgcttgtaatacagataatagcatagatagtaaaccttcgc

SEQ ID NO: 990 - DNA, 275 bp, Enterococcus faecalis
tacctaattgtgccaacaattcgcgagactcttcgtcagtgttcgctgttgtaacaattacgatgtccataccgcgtactttatctactaaatcataatcaaccttctgggaagattaattgttctttaatacctaaagtatagttaccacgaccatcgaaagcttttttgctgacaccgtggaagtcacgtacacgaggtaaagaaactgttactaatttatctaaaaattcgtacattctttcgccgcgtagcgttactttcgcaccgattgg

SEQ ID NO: 991 - DNA, 201 bp, Enterococcus faecalis
tgcttttgcaacacgcccttgtttaccaatgatacgtccaatatcttctttggccacagtcaaattatactcgaggaaatcagttgattcctcaatttctaatgagactgcttcaggttgactgactaacggacggacaatagttaaaattaactctttcacatctgccatattcaatcaccttatttcttaacgttttta

SEQ ID NO: 992 - DNA, 162 bp, Enterococcus faecalis
ccaacgtttggaatttcacgggtaatttcttcaggtcctaattttgtatcacgtgcttctgattcatattcttcaatatgcacagaagtgtagacatcgtctttaactaaacgacggctcatgataatggcatcctcgtagttgtaaccttcccatgtcatg

SEQ ID NO: 993 - DNA, 146 bp, Enterococcus faecalis
catttgcaatagctgagaaacctttcatcatttggaaattagtaaccgtaattgcttgaccaaatgccgacattgctctatctacaaagtttgttcctggcaatttaccagcagattcaccacttaaacctgaatgcgtgctcgta

SEQ ID NO: 994 - DNA, 212 bp, Enterococcus faecalis
gaaaacccaccaatctcaatccaaccacgtgcgccgttaatttctttcccgataccaggaatccgaacggctaaaaccataaccgtaattactgcaatggcaaacataataaaacttcgattctggaaaacggatgttttcatcttataaataaaaaacattgcaactaaccctactacccaaaaggcaacctggttaataacgaatgaggt

SEQ ID NO: 995 - DNA, 276 bp, Enterococcus faecalis
tacctaattgtgccaacaattcgcgagactcttcgtcagtgttcgcctgttgtaacaattacgatgtccataccgcgtactttatctactaaatcataatcaacttctgggaagattaattgttctttaatacctaaagtatagttaccacgaccatcgaaagcttttttgctgacaccgtggaagtcaccgtacacgaggtaaagaaactgttactaatttatctaaaaattcgtacattctttcgccgcgtaacgttactttcgcaccgattgg

SEQ ID NO: 996 - DNA, 128 bp, Enterococcus faecalis
tacggacttgaccagcctttttaaagtgcgcatcataataaccagcacttaaagagaatgttcctaacataatccgacgtttgacttcagtaccaaagccttcggaacgcgaattaacatagacgtct

SEQ ID NO: 997 - DNA, 142 bp, Enterococcus faecalis
tccctgtaaagcctgctccgcagacaacaatttttaagaattcttcgttttgagttgctttgtattgacgcatttgttcttggatatgttcatacacgtttaaagccgttttcacatctaccatttgtagagcatgttcttg

SEQ ID NO: 998 - DNA, 222 bp, Enterococcus faecalis
gactaataataagtcaacattgcgatattctttccgaaattgttcggatgtctttgtttgaattgagttgataaattcattcgtaaacgtttcgcgtactaacatatttgactttggcatctggttgattcactaacatttgatgaccaatagcatgcatcaaatgggttttccctaaccctacaccaccatagaagaaaaggggattgtaaatcgaacctg

SEQ ID NO: 999 - DNA, 169 bp, Enterococcus faecalis; identical to SEQ ID NO: 971

SEQ ID NO: 1000 - DNA, 197 bp, Enterococcus faecalis; identical to SEQ ID NO: 880

SEQ ID NO: 1001 - DNA, 207 bp, Enterococcus faecalis
caccgtaactggtttcccttgcaaagtagcaacaccaccgactacagctaaatcatcggcaaagtaacgatccccatgaaattctaaaaagtcctcaaaaatggcttctatatattctaaagttgtcaaacgatcttggtctcttgccaaggtaacaacatcattggctgttttcttttccatgttagcgccacccttccaaagaat

SEQ ID NO: 1002 - DNA, 222 bp, Enterococcus faecalis; identical to SEQ ID NO: 936

SEQ ID NO: 1003 - DNA, 121 bp, Enterococcus faecalis
gtcaaaggttggatgttcaattggactgatatggtcgggggtaatgtttaaaaaaatgccgacatcaaaaaataacttgtagacacgattagttttgtaggcttgggaagaaacttccata

SEQ ID NO: 1004 - DNA, 183 bp, Enterococcus faecalis
ccctcaccaatgatgactgaaatgattggcactttcaaatcagacatttctaacaagttttgcgcaatggcttccccttctccccgctcttcggcaccaatcccacaataggcaccagcagtgttcacaaaggtaatgactgggcggttaaatttttccgcttgtttcattaaacgtaacgct

SEQ ID NO: 1005 - DNA, 105 bp, Enterococcus faecalis
ttgtgtattttttagaattaccatacgtaggcgattacttcgccgccgatatttttcgctctagcttctttgtcagtaattacaccctctgatgtagagatgatt

SEQ ID NO: 1006 - DNA, 230 bp, Enterococcus faecalis; identical to SEQ ID NO: 861

SEQ ID NO: 1007 - DNA, 228 bp, Enterococcus faecalis
tctaacggtttgatggtgttgaatcaattgttttcctaaggcggtgtcaaagaaggccacgatttgttccagattcattttttcagcaattgctggtaaaatcaatttattttccactaagcgttcttgaacagctcgcacttcctcgtaagaaggttgcttacttaaatcaattagttgtaataaataatgggttgctgtcccaatctcagctgctgagggcgcttg

SEQ ID NO: 1008 - DNA, 234 bp, Enterococcus faecalis
tcgtttccttcgatgttcattttgatatcagaagaaaattcgcgtgttaattcacctttaggtcctttaactgtaatgttgtttccgtcttgcttgatttcaacaccagcaggaagaacaacaactttattaccaatacggctcacttagagacacctccttgtgtattttttagaattaccatacgtaggcgattacttcgccgccgatatttttcgctctagcttctttgtc

SEQ ID NO: 1009 - DNA, 118 bp, Enterococcus faecalis; identical to SEQ ID NO: 920

SEQ ID NO: 1010 - DNA, 194 bp, Enterococcus faecalis
agccagttctttcttcagttgcccgatttgattttgtaaatctgctaattctggatttccctctgcactaccatcttgattagctgtttctggcgtgttgtgtttattgggttgcaccgttttttttaatttgacagtggctacttccagatagatattcgcattgttggtaaagcggatctcattttgtgtgt

SEQ ID NO: 1011 - DNA, 182 bp, Enterococcus faecalis; identical to SEQ ID NO: 923

SEQ ID NO: 1012 - DNA, 99 bp, Enterococcus faecalis; identical to SEQ ID NO: 876

SEQ ID NO: 1013 - DNA, 150 bp, Enterococcus faecalis
gcttttgtagcatcaacttttttcaatgcttcttgcatttttttgctctttttagccattttgtttcctccttgattgtggttataacggttgtacctcccacgtctttcatatctttaaatatgaaacgaactgagaagctacttcttt

SEQ ID NO: 1014 - DNA, 169 bp, Enterococcus faecalis
acttcggcaacttttaattccactttatcgaaatcatcgtacttaatttgtttttctttcgttgaaaccaacgttgtttcttctggattccatttaatatcctcttctgtagcactttcgctttgggacattttcttttgaatatacgttacttctgtttcaatttcta

SEQ ID NO: 1015 - DNA, 158 bp, Enterococcus faecalis; identical to SEQ ID NO: 858

SEQ ID NO: 1016 - DNA, 211 bp, Enterococcus faecalis
tgccattttcaagcacacgaccttcacctactgcgataacttcacctgtttgtggtttttcttttgcaacggatgcaagaacaattcctccaacagttttttcttcttctttcgcgactctaattacgacgcgatcgcctaatggttttaacacaataaatccctccaaataaaaagttttcgcttattttagcactcgatacacaagagt

SEQ ID NO: 1017 - DNA, 225 bp, Enterococcus faecalis
gaattggcgtaaagtcataaacatccatgtaatcaggaattacaataataccgccgggatgctgcccagtcgtccgtttaacccctgttgaacctttggctaagcgatcaatttcagcaccacgcaaatgtaaattatgatctctttcatatcctttaacaaagccatacgctgttttgtcggctactgtaccaatggttcctgcccggtagacatattcttcac

SEQ ID NO: 1018 - DNA, 140 bp, Enterococcus faecalis; identical to SEQ ID NO: 910

SEQ ID NO: 1019 - DNA, 189 bp, Enterococcus faecalis
aatttgttccggcgtaatccctgcttccgcaatcgccatttccatcgcagccgccgcgccactaccgtcttttaaaggagcggtcatgtggctagcatcacagttgctgccatagccaacaatttcgccgtagatagttgcgccacgtttctgtgcatgctcgagttcttctaaaaccagcattcctgc

SEQ ID NO: 1020 - DNA, 225 bp, Enterococcus faecalis; identical to SEQ ID NO: 1017

SEQ ID NO: 1021 - DNA, 76 bp, Enterococcus faecalis
taaacggaatccagcgatagattttttagcttttgtgataagtggtttttgaccagtgattaatgctaattcttca

SEQ ID NO: 1022 - DNA, 191 bp, Enterococcus faecalis
catattagcaattaccatgggcacgaaaaatggtgttacgcgttttgcgccttttttatccattacccgtacttggtcttgtaaggtagtcattccgccaatcccactaccgacaatcacacctaaacgagtcgggtcaatcgttgcttctgttaaaccactcatttcccacgcttctaaagcagcgacca

SEQ ID NO: 1023 - DNA, 132 bp, Enterococcus faecalis; identical to SEQ ID NO: 862

SEQ ID NO: 1024 - DNA, 231 bp, Enterococcus faecalis
tccctttcaacatgtgagaaagagatttcaatggacggttacctggtccagtaactggacggccacgacgaccattatcgattaaagcatcgaccgcttcttgtaacatccgtttttcgttttgaacaatgatgcttggcgcatttaagtctaataaacgttttagacggttgttacggttgataacacggcggtataagtcgtttaagtcaccttgttgcaaaacgacca

SEQ ID NO: 1025 - DNA, 223 bp, Enterococcus faecalis
gaccaaatgccgacattgctctatctacaaagtttgttcctggcaatttaccagcagattcaccacttaaacctgaatgcgtgctcgtaccaaaaccaaattttttcaaatactccatccatttttcatcacccattttttgttctagttttaccataccaatattactagaccaagaaatggcttgacgataattcaaatattctttgccgttcaaccgagt

SEQ ID NO: 1026 - DNA, 422 bp, Enterococcus faecalis
cacggcccgctttaatctgatcattttgaatggcagtctttaacatacgaagtacggctaaagtttctttgtctttagctttcatcgctgttttaatgtcgtcattcaatgtggttagcaatgacataccaccaactccaattcattcaaaactagaattttttacgttttctagctgcttcagattttttcttacgctttacacttggtttttcgtagaattcacgtttacgtgattcttgtaaagtacccgcttttgaaacggaacgtttgaagcgacgaagagcatcatcaagagattcgtttttacgaacgactgtttttgacatgttattccctccctccgagcttaaaaagtaaccgtttttcttatttgtgggaaaaacccacaaattaaaatactgtccttgttatattatagc

SEQ ID NO: 1027 - DNA, 199 bp, Enterococcus faecalis
cgttgagtgtttgtaacctaagtctttcatgcggtcaagcattttagaggtttccgtaatgtggaatctcttgaagacttcagcaatgatatttccaagatttttcttcttgaatggtaaaactaattcttgctctttaatgtgtgcaggaatgtctgtaccagcttctacgaagtatttatctggtgtttgaacagtt

SEQ ID NO: 1028 - DNA, 258 bp, Enterococcus faecalis
aacttctggctgagccagattggaaaggaaagaaatttcctgagcatgatccatgcccatttctaaaatcagtttttctgtttcatcaggcatgtgtaaaatagtatagggtaagccaatttgattattgtaattgccttgcgttttgtaagtcacaaacttttcagataaaacagcagcaattaaatctttagtggtagtttttccattactgccagtcacagcgatgacattcggttgcattttatttaaataata

SEQ ID NO: 1029 - DNA, 224 bp, Enterococcus faecalis
gctaactggcggtattcaccttggacaggaatgaaatattttggtttcattaagttcaacatcaattgcaagtcattcggattagcgtgaccagacacacgtaaattgtcggaaatttgcttcaccgtagcaccggcccgatagacaatatcctctgttttggcaaccgttgtttccatggccgttgtcggcgttgtcgtaatataaactaaatcgccttcttc

SEQ ID NO: 1030 - DNA, 474 bp, Enterococcus faecalis
atctcacgagacaatacagtgagttcttcttctccgttcaattcacggcccgctttaatctgatcattttgaatggcagtctttaacatacgaagtacggctaaagtttctttgtctttagctttcatcgctgttttaatgtcgtcattcaatgtggttagcaatgacataccaccaactccaattcattcaaaactagaattttttacgttttctagctgcttcagattttttcttacgctttacacttggtttttcgtagaattcacgtttacgtgattcttgtaaagtacccgcttttgaaacggaacgtttgaagcgacgaagagcatcatcaagagattcgtttttacgaacgactgtttttgacatgttattccctccctccgagcttaaaaagtaaccgtttttcttatttgtgggaaaaacccacaaattaaaatactgtccttgttatattatagctaaagcata

SEQ ID NO: 1031 - DNA, 226 bp, Enterococcus faecalis; identical to SEQ ID NO: 983

SEQ ID NO: 1032 - DNA, 177 bp, Enterococcus faecalis
cctccatgtggcgggaagccgtaatctaatgcatctagcaagaaaccaaattggtcttgtgcttcttcttttgtaaaacctaacgtttcaaacattttttcttgtaattctcgtgtatggatccgtaatgagccgccacctaattcgtagccgtttaagacaacatcgtaagcttca

SEQ ID NO: 1033 - DNA, 165 bp, Enterococcus faecalis
tcattgcttcaacttcttgtgatagttttgtttggtactcatctttcacattcatttggaccacgtgtaaatcaaatggcgcaattcctgttggccaattaataccgcgctcgtctgcattttgttcaacgattgctgaaagtaaacgactaacgccgatgccat

SEQ ID NO: 1034 - DNA, 403 bp, Enterococcus faecalis
aatgctcgttcaacatcaccggcgacacaacactgaatataatgatccatcatttcataggttaggctgcctgtcacttgcattgcatcttccagtgttactttttcatcactaaaggaaatcgtttgatccaagatactcaaggcatctcgcatcccaccttccgcagcacgcccaatcacataaagggcttgttcctcataatcgagagccatttcctgcatgatatgggccatatgatcgacgatatcttgcgtactaattcgcttaaaatcaaagcgttgcgtccgtgagataatcgttaacggaatcttgtgtggttcagtcgttgctaagataaaaataacattttgtggcggttcttccaaagtttttaaaagtgcattgaacgcgcctgttgata

SEQ ID NO: 1035 - DNA, 268 bp, Enterococcus faecalis
cgccacgtgctcgtaatgcctcatcgacacccataccacgtaattgacgtgcaaaacgcattactgtttcatcatgatcgaaattcgtcatttcaaataatttttctaatttttcaccagataaaacccatgaagcatctggttcacgatcaatcgtaaattctggaccttctggttggaatccataacgaacggtttcttcctctaccacttcatcttcatataatgggaattcaggcgttacttccaacaagtcagctgttgcatt

SEQ ID NO: 1036 - DNA, 99 bp, Enterococcus faecalis; identical to SEQ ID NO: 876

SEQ ID NO: 1037 - DNA, 150 bp, Enterococcus faecalis
tgtaacatcaacaacgtctcctgcttggaaaacatctactttgatttctttacctacttcatattctcctagctcaacattcttgaattctttaatgaagcgcttaggagccgtgtttgcttttgcaacatgacctttcgcaggtttgtt

SEQ ID NO: 1038 - DNA, 111 bp, Enterococcus faecalis; identical to SEQ ID NO: 892

SEQ ID NO: 1039 - DNA, 230 bp, Enterococcus faecalis; identical to SEQ ID NO: 861

SEQ ID NO: 1040 - DNA, 117 bp, Enterococcus faecalis
cccatagcagctttgaaggcttggccatattgttcacgtttttcacgatattcgcgttccgttaacaattgttttttctctaatgttgtgtcacctggttcgatgacaacgtatgaa

SEQ ID NO: 1041 - DNA, 194 bp, Enterococcus faecalis
tgcctttaacgccggtttctttttggacggctttaatcgctgctttaatacttgggacatcgaaaacgtccaaggcttctaattgttctttaaacgcatgtaacacagttggcactgtttctccttgcaagaattctttcgcagcatcatctaaaactggatgttcattaaagaacaagtttgatagttccaca

SEQ ID NO: 1042 - DNA, 275 bp, Enterococcus faecalis
tgaacaggcatgaaatatttaggcttcatcaaacgaagcattaatttttgctcttcttgtccaccgtgaccagaagtatggatattattgatttttccgtgaataacttctgcaccggcttcagataataagttgattaaacggttaacgcttgtcgtattcccaggaattggtgaacttgagaaaacaaccgtatcgcctggttgaatactaatttggcgatgtgtaccgttagcaatccgactaagcgcggccataggttctccttgagagcc

SEQ ID NO: 1043 - DNA, 118 bp, Enterococcus faecalis; identical to SEQ ID NO: 920

SEQ ID NO: 1044 - DNA, 199 bp, Enterococcus faecalis
taatggaataatcccagtaatcccaccaacattaataaagacttgaattaataacattgtaccaattccaatacacattagtgaattaaaaggtttcttcgagcgtacaccgactaaaataattcgcgcaatcataaacatcaacaatcctaaaatcgctagaccgccgataatgcctaactcttctaaagtaatcgca

SEQ ID NO: 1045 - DNA, 118 bp, Enterococcus faecalis; identical to SEQ ID NO: 920

SEQ ID NO: 1046 - DNA, 114 bp, Enterococcus faecalis
tgaattaattgatttgaaagtttccaagcctttaagaaggagcgaatttctgcttctggtaaattcaacgattgaataagtaacgtccacgcttctgcttctgtttcaatttga

SEQ ID NO: 1047 - DNA, 105 bp, Enterococcus faecalis; identical to SEQ ID NO: 1005

SEQ ID NO: 1048 - DNA, 118 bp, Enterococcus faecalis; identical to SEQ ID NO: 920

SEQ ID NO: 1049 - DNA, 99 bp, Enterococcus faecalis
caactaagccaacatctgctaaaacttttaattctaattcaattttacgttcttggcccggttcgccgttttcggcaatttctggtgcagggtttcttg

SEQ ID NO: 1050 - DNA, 194 bp, Enterococcus faecalis
agccagttctttcttcagttgcccgatttgattttgtaaatctgctaattctggatttccctctgcactaccatcttgattagctgtttctggcgtgttgtgtttattgggttgcaccgttttagctaatttgacagtggctacttccagatagatattcgcattgttggtaaagcggatctcattttgtgtgt

SEQ ID NO: 1051 - DNA, 247 bp, Enterococcus faecalis; identical to SEQ ID NO: 865

SEQ ID NO: 1052 - DNA, 145 bp, Enterococcus faecalis
gagctagactcggagtcgcctccaacatcataacactctaaaagaaacatctataaagtgatcggtttattaattatttaacaaattcgataactaccattggtgctgcatcgccgcgtcttggttctgtcttcaagatacgagt

SEQ ID NO: 1053 - DNA, 193 bp, Enterococcus faecalis
tcctaaaaatataaattttattgtttgttttatatgtgatagacgttactaaaaatcgtctgatcatcataagctattttacacgaaatcttgaaaaaaggatagttctaaaaacaaaccttttattctcaaggaaaattatgcgttgccgccgtttttcttgatgatttcttcttgaacagacttaggtacg

SEQ ID NO: 1054 - DNA, 173 bp, Klebsiella pneumoniae
ggggatcagcgccgccagcacaaacacagtgccgataaagaaaataatcagccgggcgatggtggtgcggatggcaaccggaataaccttatgcgggttttccgtctctccggcggcaatgccgataagctccgtcccggagaaggcgaagttcaccgccaccatggtcatca

SEQ ID NO: 1055 - DNA, 195 bp, Klebsiella pneumoniae
ggggatccacagaggtctgaatctctgaggccagcgctttaatagtcacatctgtcatgctgttccttcctgctacagtttattacgcttcgtcgccgaaccaacaaatgttgcgagcggccatgatgagctcgccagctttctcgtcggtcatcccttcgatatcagccaggtcatcaacgccctgctcggcga

SEQ ID NO: 1056 - DNA, 179 bp, Klebsiella pneumoniae
gatcaggctgacaatcagcgccgcctccaggccttcgcgtaacataatgagaaatgggacaaacatgccaatacccttaaatgtaaagcaccgtcaacgaatgcaaaaacaggtaatatttatgatagtgattatcattacaatgctcagaaacacaagcgaaatgtgcagagaatgat

SEQ ID NO: 1057 - DNA, 501 bp, Klebsiella pneumoniae
gatctcctgacccgggcgcagccacaggtggaaggtgttgccgagaataatctgcgcgccggtggcttccacctcttccggcgtcatccctttgacggtgccgtaggtgccaacgggcataaaggccggtgtttccaccacgccgcgctcaaacaccaggcgaccgcggcgggcgcgaccgtcggtggtatccagttcaaatttcatgcttgctcctgcgtcagaaaaacagtccgacgttttcatactcgccacggaatgattccgtagctaaaaaatgcgttatggcgtctacaagccggcgtaccggccttttcagggacgctcagaaatagcctgcggattgtacgtgataaacatcgcatccccgtagctaaaaaagcgatatttctgctcaaccgccaccttataggcgttcatggtgtgctgataacccgcaaacgccgacaccagcataatcagtgtggattcagggagatggaagttagtcaccagcgcatc

SEQ ID NO: 1058 - DNA, 585 bp, Klebsiella pneumoniae
gatcccgtaactgctgacgttgctgctcggttaaacttatgccgtcaaacatatggctttggctaccgcgctgtcccccgtcgtctccggggagccagttaacgctggtaacgacttcagcggcctggctatatgcacttagcgccagcgttgaggccatgacggcagcgataacattgcgcatcacatactcccaaaacgtttgtgtcgcgattcaacgagagacagtctacgattcaggctgcaaacatgcgtcagggggtgtaaaacaacgtaaagtcatggattagcgggccttgatgacgtaatttctgcctcggaggtatttaaacaatgaataaaatcctgttagttgatgatgaccgggagctcacctccctgttaaaagagctgctcgatatggaaggttttaacgtgctggtggcccatgatggggaacaggcgctggcccttctggacgacagcgttgatttattgctgctcgacgtgatgatgccgaagaaaaacggtatcgatacgctgaaagagctgcgtcagacacaccagactccggttatcatgctaacagcgcgcggaagcgagctg

SEQ ID NO: 1059 - DNA, 258 bp, Klebsiella pneumoniae
gatccagtgatgacatagtcattccttaatggttaggcatgacttgaattagcaaaccttatgccatattgcagggcaggcgtggcgcggaggtggaggcaggatgatataaagagagagcagaggctgcaccatccggacgcgcttgcgcccggctggtgcaacaggcctatttgccaagcatgcctttgtcttcgaggaaggcgataatggtgctcaggccgtcgccctgcttcagattggtgaaggtccatgggc

SEQ ID NO: 1060 - DNA, 414 bp, Klebsiella pneumoniae
gatctaagcgttgaccgagttgattttcggtcaccgttgcggtgagttgtactcgttgtgccatatacagcttcttcgtttaacgttgggttttacggctttgccgtttaatatagtgtgctattgtagctggtcttaatcgggagcaggaacagagattctcccgcataaacattttgaggaagtcaaaacgtcatgacgcgcatgaaatacctggtggcagccgccacactgagcctggctttggtgggttgctccggctctaaggaagaggtgcctgataatccgccgaatgaaatctacgcgaccgcccagcaaaaactgcaggacggtaactggaaacaggcgataacgcaactggaagcgttggataatcgttatccattcggcccttattcccaacaggtacagctg

SEQ ID NO: 1061 - DNA, 271 bp, Klebsiella pneumoniae
gatcttctccctgcgagtactcattggccggcgtcgaaacgtgaagcaggcgctgcatcagcgtagtcatcacatctttgttatcggtcagggtggcaatctcctgcgccggcgtgcccggccagtgaataaccagcggcacctgcagctgctcgcgcgaccagtcgaacgcgtcgtgtttcgcattcagcggcttgccgtggccgccggtaataattaccaccgtattatcgagtttgccggcttcgcgcagcgcagtcagcacccgatc

SEQ ID NO: 1062 - DNA, 136 bp, Klebsiella pneumoniae
gatcctcacccattatgttaataagatagtcgatatgccggacaatggtggttaagggcgtgtcgctatcgcgccggccgtcggcgcgcaggaaagcattgccgaaattgacgcccaccacgccgccgctgtcgcg

SEQ ID NO: 1063 - DNA, 153 bp, Klebsiella pneumoniae
gatcaccaggcagaccccggccagcagcaagcgcttatgccgcgagctgtcggtgatgaagccggcgggcagggtcgccagcaggccggcgataccgccgacggacatcagcaggccaatgtcctccgcctgccagtgacgctgggtgagaaa

SEQ ID NO: 1064 - DNA, 193 bp, Klebsiella pneumoniae
gatcacatcacgccaatccagttgccgcgctgggtgcgtttcagatagctggcgatcaggctgacaatcagcgccgcctccaggccttcgcgtaacataatgagaaatgggacaaacatgccaatacccttaaatgtaaagcaccgtcaacgaatgcaaaaacaggtaatatttatgatagtgattatcatta

SEQ ID NO: 1065 - DNA, 217 bp, Klebsiella pneumoniae
gatctattgcagggcaggcgtggcgcggaggtggaggcaggatgatataaagagagagcagaggctgcaccatccggacgcgcttgcgcccggctggtgcaacaggcctatttgccaagcatgcctttgtcttcgaggaaggcgataatggtgctcaggccgtcgccctgcttcagattggtgaaggtccatgggcgatcgccgcgcatacgctggg

SEQ ID NO: 1066 - DNA, 579 bp, Klebsiella pneumoniae
gatctctgctaatcctgttaccagtggctgctgccagtggcgataagtcgtgtcttaccgggttggactcaagacgatagttaccggataaggcgcagcggtcgggctgaacggggggttcgtgcacacagcccagcttggagcgaacgacctacaccgaactgagatacctacagcgtgagctatgagaaagcgccacgcttcccgaagggagaaaggcggacaggtatccggtaagcggcagggtcggaacaggagagcgcacgagggagcttccagggggaaacgcctggtatctttatagtcctgtcgggtttcgccacctctgacttgagcgtcgatttttgtgatgctcgtcaggggggcggagcctatggaaaaacgccagcaacgcggcctttttacggttcctggccttttgctggccttttgctcagcggccgcttctttcctgcgttatcccctgattctgtggataaccgtattaccgcctttgagtgagctgataccgctcgccgcagccgaacgaccgagcgcagcgagtcagtgagcgaggaagcggaagagcgcctgatgcgg

SEQ ID NO: 1067 - DNA, 278 bp, Klebsiella pneumoniae
gatcggccagcgatgagagtttcatcaggttaagatactggccgacaatcggctgccaggcgttggccagcccctgcggcaggaggataaagcgcagctcctgccacggcgtaaagccctgcgacagcgcggcttcccgctgcccggggctgacggcgcgcagtccggaggcgatctcttccaccagaaaggcggaggtaaagacccccagcccccacattgagcagaggaactccggcgtcagccaccagacgttgcccggcagaatggaccaggcg

SEQ ID NO: 1068 - DNA, 195 bp, Klebsiella pneumoniae
gatgacgtgctagacgtcaatggcccgcaggtcttcgcagcgccaggcgctgccgacgccaaggccggaaacgtaacgccggcgctaacaatacaggctaaagtcgagtcgttagactagactttaggtccacaacactaaacctataagttggggaaatataatgttccagcaagaagttaccattaccgctcc

SEQ ID NO: 1069 - DNA, 195 bp, Klebsiella pneumoniae; identical to SEQ ID NO: 1068

SEQ ID NO: 1070 - DNA, 135 bp, Klebsiella pneumoniae
gatcatgcaggtcaaaggagacatcgcgaatggagggctggcgcagcgaggtgagattgcgcacctggaggatcacttcgcccggagtgttttcgcgatccggaaaacgctggttaagcgaacgcccgaccatca

SEQ ID NO: 1071 - DNA, 257 bp, Klebsiella pneumoniae
gatcagccatagcccggcgttattggcatccgcgccgcggatgtccgccgccacgatgatcccggcgatcgccgcgcagacgccgctcaggacataggccagcatcaccacgatgcgggtattgacgccggcgtttttcgccgcgcggatgttgatccctaccgcctcaataaacatgcccagcgccgttttacgggtaaacagccagaacagcagcagcgtagcggcggcgacgatcaccggcgtcggaaacagca

SEQ ID NO: 1072 - DNA, 578 bp, Klebsiella pneumoniae
gatctctgctaatcctgttaccagtggctgctgccagtggcgataagtcgtgtcttaccgggttggactcaagacgatagttaccggataaggcgcagcggtcgggctgaacggggggttcgtgcacacagcccagcttggagcgaacgacctacaccgaactgagatacctacagcgtgagctatgagaaagcgccacgcttcccgaagggagaaaggcggacaggtatccggtaagcggcagggtcggaacaggagagcgcacgagggagcttccagggggaaacgcctggtatctttatagtcctgtcgggtttcgccacctctgacttgagcgtcgatttttgtgatgctcgtcaggggggcggagcctatggaaaaacgccagcaacgcggcctttttacggttcctggccttttgctggccttttgctcagcggccgcttctttcctgcgttatcccctgattctgtggataaccgtattaccgcctttgagtgagctgataccgctcgccgcagccgaacgaccgagcgcagcgagtcagtgagcgaggaagcggaagagcgcctgatgcg

SEQ ID NO: 1073 - DNA, 217 bp, Klebsiella pneumoniae; identical to SEQ ID NO: 1065

SEQ ID NO: 1074 - DNA, 217 bp, Klebsiella pneumoniae
gatctattgcagggcaggcgtggcgcggaggtggaggcaggatgatataaagagagagcagaggctgcaccatccggacgcgcttgcgcccggctggtgcaacaggcctatttgccaagcatgcctttgtcttcgaggaaggcgataatggtgctcaggccgtcgccctgcttcagattggtgaaggtccatgggcgatcgccgcgcatccgctggg

SEQ ID NO: 1075 - DNA, 238 bp, Klebsiella pneumoniae
gatctccagacgtttatacagacgctgcagctggatctgggcaatagaggcaatatgtttctcgcccagcggatggaagaccaccacttcgtcgatacggttgatgaactccggacggaagttctggctgactacccccagcaccaggtccttcatatgtccgtagtccagctcgccgaaccgttcctgaatcagatcggaaccgaggttcgaggtcatgatgactaccgtattacgg

SEQ ID NO: 1076 - DNA, 389 bp, Klebsiella pneumoniae
gatgactggcgacggaatcgcaggtacaagccctgatgcactatctggtacaggcaggcaacacgcgcgagccgattaaattcattcgcgagctggcgttacgtacgccgcagcataaggagacgttgatgacgattgcggaatatctggaacaacaggggctggagcggggcctggcgcaaggccgtcaggaaggacggaaagaagaggcgcagcgcatcgctgtcgctatgctgcacagcggccttccgcgcgacctggtcgcccggttgaccgggctgacggagcaggagctgactcccctggcggactaaagcttaaggatctctttcacgaaggggatcgtcagcttgcgctgagcggtaatcgaggcatgatccagctgatcg

SEQ ID NO: 1077 - DNA, 118 bp, Klebsiella pneumoniae
gatcacggccatagccgctggcctgaaccttcaccagcataatttcgcgttcaacatgagccccctgccccagctcgctgacccgcaggacatccaccagcttgtgcagttgcttttc

SEQ ID NO: 1078 - DNA, 177 bp, Klebsiella pneumoniae
gatcttccttttttcggtatatccggaatggaccaggtttcatctacggtaatattaccagtaacgtaaacacgcatagtgttcccttaacaggatggataagatggttgctatctcagcagaaaaaacgaatgcaatacaagctattttttcacgaagcaaggctgttattggtgt

SEQ ID NO: 1079 - DNA, 215 bp, Klebsiella pneumoniae
gatctaatcgggagcaggaacagagattctcccgcataaacattttgaggaagtcaaaacgtcatgacgcgcatgaaatacctggtggcagccgccacactgagcctggctttggtgggttgctccggctctaaggaagaggtgcctgataatccgccgaatgaaatctacgcgaccgcccagcaaaaactgcaggacggtaactggaaacaggc

SEQ ID NO: 1080 - DNA, 519 bp, Klebsiella pneumoniae
gatctctgctaatcctgttaccagtggctgctgccagtggcgataagtcgtgtcttaccgggttggactcaagacgatagttaccggataaggcgcagcggtcgggctgaacggggggttcgtgcacacagcccagcttggagcgaacgacctacaccgaactgagatacctacagcgtgagctatgagaaagcgccacgcttcccgaagggagaaaggcggacaggtatccggtaagcggcagggtcggaacaggagagcgcacgagggagcttccagggggaaacgcctggtatctttatagtcctgtcgggtttcgccacctctgacttgagcgtcgatttttgtgatgctcgtcaggggggcggagcctatggaaaaacgccagcaacgcggcctttttacggttcctggccttttgctggccttttgctcagcggccgcttctttcctgcgttatcccctgattctgtggataaccgtattaccgcctttgagtgagctgataccgctcgccgt

SEQ ID NO: 1081 - DNA, 294 bp, Klebsiella pneumoniae
gatccgatcgggtgaatgctggaggtggcatggttgatgtacgagatcgagccggtgggcggcaccgcctgcagatagcgattgtagatgccatagcgcatgacatcgtcgcgcagctggcgccagctttcccggtcgggcagagagatgccggcgcgggcgaacagcgtgcgcaccctttcggttttcggctgccactcctcctgcagatatttgtcgaagtacgccccgctggcgtagcgcgactgctcgaagccggcgaagcgctggccgcgctcgcgggccagctgcatc

SEQ ID NO: 1082 - DNA, 431 bp, Klebsiella pneumoniae
gatccccggctttgacccgttggttatcggttacgttcaactgcagaatactgccggagacctgaggggtgatcccaacctgctcggcgcgcactttgccgtcgcgggtccagggtgactgagtgtagaaattccataacaaccatgcggcaatcagggcgacggccgcgaccagcagcgttgacagatattttaatcttttcataacagggagatcaccaggcaatgagtaataccagggccagacagaccgagagcgcgaacagtgagagatccattagtagcgggtgccagatgtcgcccgcatacatccagtcacgcagctggcgatgtaaaaacaaccagataaagaaacccaacaagacggctttgaacagcggagggaaatagacggatgcgccgaacaccaggtcctgcagcggcaatccgga

SEQ ID NO: 1083 - DNA, 579 bp, Klebsiella pneumoniae; identical to SEQ ID NO: 1066

SEQ ID NO: 1084 - DNA, 162 bp, Klebsiella pneumoniae
gatcaataggcaagacatcggcaggaatgtgcattgagggtcaacggcgccaggaccacaataaccttcatcgggcagcggtatcgtccctgtcgacggttttactctttggaggacttaagcaatgaataatttcgacctgcataccccaacccgcattct

SEQ ID NO: 1085 - DNA, 521 bp, Klebsiella pneumoniae
gatctctgctaatcctgttaccagtggctgctgccagtggcgataagtcgtgtcttaccgggttggactcaagacgatagttaccggataaggcgcagcggtcgggctgaacggggggttcgtgcacacagcccagcttggagcgaacgacctacaccgaactgagatacctacagcgtgagctatgagaaagcgccacgcttcccgaagggagaaaggcggacaggtatccggtaagcggcagggtcggaacaggagagcgcacgagggagcttccagggggaaacgcctggtatctttatagtcctgtcgggtttcgccacctctgacttgagcgtcgatttttgtgatgctcgtcaggggggcggagcctatggaaaaacgccagcaacgcggcctttttacggttcctggccttttgctggccttttgctcagcggccgcttctttcctgcgttatcccctgattctgtggataaccgtattaccgcctttgagtgagctgataccgctcgccgcag

SEQ ID NO: 1086 - DNA, 210 bp, Klebsiella pneumoniae
gatcttatgcaccgggtagggagaaaccatattgaacggaccgcgcagatcgttatccagcagccacagaatgccgttaaccatatcgtcgatatggatccaggccaggtactgtctgccgttgccgataggcccgccgaggccgagcttaaaggcgggtgtcattttgccgagaataccgccccgcggagccagtaccacgccggtgcg

SEQ ID NO: 1087 - DNA, 230 bp, Klebsiella pneumoniae
gatcctgcgtcttccgttgcgccaatcccaaaggagtccagcaccatgataaatgcacgtttcatcttgttctccatacatcttgcgctgcaaaaaagcgatcagatcagtatatcgctattcagtgatacggcgatagactgtcggtgtaatttccggggctttatcgtccagtttaatggccgctttgaccgctttcgcggcctcctgccagctgttctcgtctttgg

SEQ ID NO: 1088 - DNA, 294 bp, Klebsiella pneumoniae; identical to SEQ ID NO: 1081

SEQ ID NO: 1089 - DNA, 682 bp, Klebsiella pneumoniae
gatcccgacccttccaggcagcagacaccaaaaaggaaatcctagctatgaatgcagcagtaaagcggctcgacgtcatctgtataggtcgggtggccgtcgacctctatgcccagcagattggttcgcggctagaagacgttgccagtttcgcgaaatatctgggcggctcctccggcaacgtggcctttggcaccgcgattcaggggctgaaatcggccatgctggcgcgcgttggcgatgaacacaacggccgtttcctgcgcgaaacgctcaaccgcgccggggtggataccgagtatctgattaccgacaaatctcgcctgaccgcgctggtgatgctggggattaaggatctccgtcacctgcttatcggcaaaatccaccagctggcggccatagccggtgagggttaaaaaaggcgtctccgtgaggccagcgcgcagtgtctcccaggcctcgtggatggcgtcggcggggcgaaagggggtggggcagaggaagcggcgcacgatgacgccgtccgccaacaggatgccttttgtggcggtggagccggaatcaatgccaaccgtatagttcacgccagctccttacagcatttcgataaaggcggcgacgcgggtgctgagctggccgaggtccgctgtcgaatagtcggtttcaatcgccatgtaaggaa

SEQ ID NO: 1090 - DNA, 475 bp, Klebsiella pneumoniae
gatcaaaatggcgcaggttggcagggccgtccatccagaccagcggttgttgcaacagcgaaattttcaggccaggcacaatggtcaactccattctcatgagggggttaggttaactgtaacaccatatcagccgcgcggcggtccgcggaatattttgttaaaaaaatgctactgatggaaacgaaaggggaggagaaggcgaaaaaaggcggggaaagttccccgcccggcgtgtgatgtggtagtggttttattatgcagcttcaactttacgaactttttccggcagctttaccggctttgtcgccagctcctctggcgcaaagtcgtcgacgttaatgctgcgcagacggctatgctctgcacgggtaagaatggcggcctcatcctgactgattaatcctttggccagcgcgttgtgggccagctcatccagacgggtgaacggcagatttttacccaactctttgca

SEQ ID NO: 1091 - DNA, 79 bp, Klebsiella pneumoniae
gatccgcgggtgcaagtgcagtaatagctcagcccttgctcgcccagccacgtcagcgcctcgcggtaggcttcgtgcc

SEQ ID NO: 1092 - DNA, 122 bp, Pseudomonas aeruginosa
ggggatccgcccgacatattccagcaccccgtcggcgcgccgccgcgccaggtcgccggtacggtacagacgctcgcccggcgcgccgaacggatgcgggacgaaggcctgagcggtgcgca

SEQ ID NO: 1093 - DNA, 73 bp, Pseudomonas aeruginosa
aggctggagaccggcagcaggcgccgggcgaagggttccaggtggcgccagaggccgcgaccgagcgcctcga

SEQ ID NO: 1094 - DNA, 66 bp, Pseudomonas aeruginosa
gatcaccaccttgatggcatccgtggccgctccggtgaccatggtcacgttgaaggtgatgcgcga

SEQ ID NO: 1095 - DNA, 607 bp, Pseudomonas aeruginosa
ttcttaccgtcttctaccttgaagccaacgcggtcagccttgctggtttcagtattgaagatggcgacgttggagacgtgcagaggcgcctccttctcgacgataccgccctgttggccgagcatcggattgggcttggtgtggcgcttgatcaggttcaccccgccgacgaccagacggtcgtcagcgagaaccttcagcaccttgccacgcttgcccttgtccttgccggcaatgacgattacttcgtcgtcacgacgaatcttttgcatgacggctactccttacagcacttcgggggcgagcgagacgatcttcatgaacttctcggtacggagttcacgagtcactggcccaaagatacgggtgccgatcggctcctgcttgttgttcagcaggacggcggcgttgccgtcgaagcggatgatggaaccgtcggtacgacgcacgccgtgcttggtgcgaacgaccacggcagtcatgacctggcccttcttcactttgccgcgcggaatcgcttccttgacggtgaccttgatgatgtcgccgatgccggcgtaacggcggtgggaaccgccgagcaccttgatgcacatcacacgacgcg

SEQ ID NO: 1096 - DNA, 150 bp, Pseudomonas aeruginosa
ccatggccgagcagcgcctgttgcaacacgtggcgctgcaacgaggtgtcggcgatcaccgcaacccgtggcgtgacgcgctcactcatgctggccgaccagggactggatggcttcgagcagctcggtttcctggtaaggcttgccgag

SEQ ID NO: 1097 - DNA, 193 bp, Pseudomonas aeruginosa
cggcgaacagcagcaggcgcagggtgttggccttctgttcctgcagctcgatgccgaacagctcgacgtgaccgtgcaacaggccgaggaaggcggcgccgaagcgccgcagggaggggcggccgtccgccgggtcctttccttcgctcatggctcagcgccggctgaccaacaggccaagcaggaagccgac

SEQ ID NO: 1098 - DNA, 228 bp, Pseudomonas aeruginosa
gcagatcggtatgcgccacggccgcctcggccagcgggtagcgccgccagacccggggctgaatgacaccgtctgcatgggcgcgcagcacagcctgcgcgcgtagccggtattcctccgggttggcggtgtgggcggcgagcgagggacgggtgaggaacagcgaacccttggcgttgagggtggcgacttcgacggctggcggcacgccggaggtagcgccgaagg

SEQ ID NO: 1099 - DNA, 240 bp, Pseudomonas aeruginosa
ccttgcgggtcggcagagggattggaccacgcacctgagcaccagtacgtttcgcggtttccacgatttcctgggttgattgatcgatcaggcgatggtcaaaagccttcaaccgaatccggatttgttggttttgcatttgacctcagactccaatttaccattcccaacggacggactacgcccgttaaaaggaggcgcaattgtacggatgcccccacagggtgtcaatatttaacc

SEQ ID NO: 1100 - DNA, 240 bp, Pseudomonas aeruginosa; identical to SEQ ID NO: 1099

SEQ ID NO: 1101 - DNA, 214 bp, Pseudomonas aeruginosa
tgtaggtgaaggtcaggccgagctgggtgtcgctgtcgacagtcgccttggtaccgcgctgcttggcgccgtccagcttgatgtcggaactgctgtcgtcgggatcgacggtggcgaagccgccacggatgatgaagtcaccggccttgtgtccttgaatatccgcagcggcgaacggggaggcgacggtgagggccagcagggaagcggtaag

SEQ ID NO: 1102 - DNA, 214 bp, Pseudomonas aeruginosa; identical to SEQ ID NO: 1101

SEQ ID NO: 1103 - DNA, 462 bp, Pseudomonas aeruginosa
atggtgaactcggtctgctcttcggcagcggcagcagccgggccagcagcggcaacggtagcggcagcagcggtaacgccgaacttctcttccatcgccttgatcagttcgaccacttgcatgacggacatttcggatacggcgttgatgatgtcttcgttggtcagagccatgactctaattcctgtattgggggacggcctgcggccatcgtattaaacaaataagattgaaagcgcttgcgagccgacttaggcggcagcagcttctttctggtcgcgaatggccgccagagtacgagccagcttgctggtagcgccttgaatcacgctcatcagctgcgatacggcttcgtcgtaggtcggcaggcttgccagtacgtcgatctgattggctgcgaggaactgaccctcgaaggcagccgccttgatctcgaacttgtcctgacccttggcgaactca

SEQ ID NO: 1104 - DNA, 296 bp, Pseudomonas aeruginosa
ggttttatccgtcggctggacgatgtccagtacacgcttatgtgtacgaatttcgtactgatcacgcgcatctttgttgacgtgcggagagatcagcacggtgaaacgttccttgcgggtcggcagagggattggaccacgcacctgagcaccagtacgtttcgcggtttccacgatttcctgggttgattgatcgatcaggcgatggtcaaaagccttcaaccgaatccggatttgttggttttgcatttgacctcagactccaatttaccattcccaacggacggactacgccc

SEQ ID NO: 1105 - DNA, 202 bp, Pseudomonas aeruginosa
cagctcgcggttcttcatgctctctttagccatgttcctactccaatcagttacggaacgggaatttgaaagcacgcagcagggcgcgaccttcgtcatccgtacgagcggtggtggtcagggtgatgtccaggccacgcagcgcatcgatcttgtcgtaatcgatttccgggaagatgatctgctctttcacgcccatgct

SEQ ID NO: 1106 - DNA, 84 bp, Pseudomonas aeruginosa
cgctggcgtggaggccgatgcagtggtcctgcaggttgaccggcatgttcggcgtggagaacagccggctgctttccgccggcg

SEQ ID NO: 1107 - DNA, 276 bp, Pseudomonas aeruginosa
acatcctggaccttgaagggaccaagcccggtttccctggtacgtccctgattgaaacctgccacatcactcaacgacggaggcaaaatcgctatgcgggcctcatagacaggagtactgagaaaagcgtagatagctgcaaacaaaatacctagcaaagaaaatataagaactatccacttctcctcccataatcctcgaaccagctcaaccagatcgatatcgccagctacaccgccgtgcttttgtatttcgtcagtcatcgaaaagtccagc

SEQ ID NO: 1108 - DNA, 107 bp, Pseudomonas aeruginosa
agggtacgcaggcgcagggcatcgagttcggcgccgaaggccgccagttgttccggggtcagttcgcggtcgtcgcgcatcgcagggctcgcaggtcggttcacagg

SEQ ID NO: 1109 - DNA, 353 bp, Pseudomonas aeruginosa
tcgctgtctcgccgctagccaccatgcagcgcccggctcggctgttgcaccggcatcttgccggtgcgtcggcgctgcctagaatcggccccattcgcacctacccccgcttcgcctacaggagttaccgccatgatgaatgccatgcagatgccgatgaacatgaatgccgccatgccgatgatgcccatgatgggcatgccgatgatgatggcgaccatgcagtgcgaaacgatggacgacggcatgctgtgcaagatgatgccggcgatgggtatggacatgggccagttccgcaacagcgccgagatgatggcgatgatgatgaactgcggcatgcccatgatgatgca

SEQ ID NO: 1110 - DNA, 427 bp, Pseudomonas aeruginosa
tatctggccctctttatcgaaggagagggccagataacactagatcgctgcaaaataggccagcagcaaggttactgcggtcgtatagcggagacccgatttgatcgtattgaatacgtcgctgaagttgggagcgtccagacgtaaaccaacaccaggtccgactaacgctttgatatcctcagggagcgtcattgcctgccaagtaccaggagtcagtgtcctcagattcacaccgtaggaaaccagtagtccggattcctgcgaaatgcctccggatgcatccgtagagaaaccaacgtcggttggatagacgttcggactgcccttgaagcggtcaagatatccactgccgaaacgggcttttattcgatcaagattctgcgccatggaggtgagcaaaggaagtatctcaacgttgcaaaca

SEQ ID NO: 1111 - DNA, 422 bp, Pseudomonas aeruginosa
  misc_feature (1)...(422): n = A,T,C or G
gaagccaccgccaatgcgaaccagtattcaccgatcacaactggcatcgactcaatcagatgnctacctataacaacagcaatcgccacggcaacgaaaatcaatagtgtcaactgaagtatcagcttgacgattgcctggagttcgccctcttctcgagtcgaaaaaatagccaactcatagcgcccagtaactacaactgcaaaaatcgtagcgaacgatagccaaacactgaaagcgcccatttcagcaggagaatacagacgaaccagtagcagagtgacaccaatcgttatgagctgtgctcccaaggtgcctactaatactcgtgcgacacggttgataaaagccgcactcatagagtttttcctaaagacatcttgagtggaaaagaanttagcgcaaggaaaagcagcatcaag

SEQ ID NO: 1112 - DNA, 422 bp, Pseudomonas aeruginosa
  misc_feature (1)...(422): n = A,T,C or G
gaagccaccgccaatgcgaaccagtattcaccgatcacaactggcatcgactcaatcagatgtctacctataacaacagcaatcgccacggcaacgaaaatcaatagtgtcaactgaagtatcagcttgacgattgcctggagttcgccctcttctcgagtcgaaaaaatagccaactcatagcgcccagtaactacaactgcaaaaatcgtagcgaacgatagccaaacactgaaagcgcccatttcagcaggagaatacagacgaaccagtagcagagtgacaccaatcgttatgagctgtgctcccaaggtgcctactaatactcgtgcgacacggttgataaaagccgcactcatagagtttttcctaaaganntcttgagtggaaaagaaattagcgcaaggaaaagcagcatcaag

SEQ ID NO: 1113 - DNA, 266 bp, Pseudomonas aeruginosa
ccattaggaagaacattaagccccagcagcttaattttccccccctttcttaggtactttgtcttctgtgaatttattcccatccgccctgaaaactcagattggagggtacgacacacgaccccaaacaaaggatcaagcgcctgcttgttcgacgaggaaaaaatcagatcatctgcataacgagtatatataacaccattacttaaacaatgcgtctttaatatcccatccagagagtataagcatgcattgctaattgcagg

SEQ ID NO: 1114 - DNA, 163 bp, Pseudomonas aeruginosa
atccgtagagaaaccaacgtcggttggatagacgttcggactgcccttgaagcggtcaagatatccactgccgaaacgggcttttattcgatcaagattctgcgccatggaggtgagcaaaggaagtatctcaacgttgcaaacacgttccttttcattaacc

SEQ ID NO: 1115 - DNA, 170 bp, Pseudomonas aeruginosa
gccgatgctcgacttcaccacgtactggctgcccaggtacttgttgatggtcttggccttggccggggattccacgatgaccagcgatttacccatggatcggaaggttcctgcgtcgaaaagatgaatataaaggagggagcgactagcgcggcaccgctatatatagt

SEQ ID NO: 1116 - DNA, 79 bp, Pseudomonas aeruginosa
ggtgataccctgtcccaggcccacgcacatggtggacacgccaagggtaccgccgttctgcttcatcacgttcaacagg

SEQ ID NO: 1117 - DNA, 368 bp, Pseudomonas aeruginosa
ccgcactcatagagtttttcctaaagacatcttgagtggaaaagaaattagcgcaaggaaaagcagcatcaagaaaacaccagagccaagcattacagttagcagggactgctcaagaatctttgtagtaaataacaaagcaaccggaatggccatgaatgcaccatacctcgaaaataagaaattcatgagaacgacactaccgcccaccaacatcgactcagccataacccccacataacccaactgcatataggctatcgcgaagaagtttacattcgcattcatatcgggattattgaaaatttccgtccccagacgaaagctcaacggctcagtcctaccctgacccaagagcgcgcccaaca

SEQ ID NO: 1118 - DNA, 359 bp, Pseudomonas aeruginosa
caggggcacacgaccttcgcgataccattcggtacgggcgatttcagccccacccagacgaccgctgacctgaatcttgatgcccttggcaccaatgcgcatggcgttctgtacggcgcgcttcatggcgcgacggaacattacgcgacgctccagctgctgggctacgctctgcgcaaccagcatggcatcgagttccggcttgcggatttcctcgatgttgatgtgcacgggcacacccatttgcttggtcaggtcctggcgcagtttctcaacatcttcacctttcttgccgatcacgatgccgggacgagcggtgtggatggtgatgcgtgcggtttgagccggacgatgaatat

SEQ ID NO: 1119 - DNA, 368 bp, Pseudomonas aeruginosa; identical to SEQ ID NO: 1117

SEQ ID NO: 1120 - DNA, 383 bp, Pseudomonas aeruginosa
cgctagccaccatgcagcgcccggctcggctgttgcaccggcatcttgccggtgcgtcggcgctgcctagaatcggccccattcgcacctacccccgcttcgcctacaggagttaccgccatgatgaatgccatgcagatgccgatgaacatgaatgccgccatgccgatgatgcccatgatgggcatgccgatgatgatggcgaccatgcagtgcgaaacgatggacgacggcatgctgtgcaagatgatgccggcgatgggtatggacatgggccagttccgcaacagcgccgagatgatggcgatgatgatgaactgcggcatgcccatgatgatgcagtgcggcaacctggcgatgatgggcatgtcccaggcctgcat

SEQ ID NO: 1121 - DNA, 111 bp, Pseudomonas aeruginosa
ccagcgccgccgggcggtcgccggagctgcccagggcggtggcgtaggagggcaccaggtgatcgaagggatagccgagtttcttccattgctggtgcaggtcgaggaagg

SEQ ID NO: 1122 - DNA, 353 bp, Pseudomonas aeruginosa
cctgcctggaacagatcgacagtgatctggtcaccagcggcatactgctcttcgcccagacggaattcccacacgccgcgaccggcggcgacattcgccttggcaaagtgaccagcttgcgctttggtaacgcgagaagcacgacgctcgccggcggtgacttgcactgcacggtagccatcggtttcttcagtcttgaactgggtgacgcgattcggctcgacctcgatgaccgtaaccggaatagagacaccttcctcggtgaaaatgcgggtcatgccgcatttacgaccgacaacaccaattgtcatgttgtaaacctcttgagtgtacggggctttcacccgctatgg

SEQ ID NO: 1123 - DNA, 129 bp, Pseudomonas aeruginosa
ccgatgatgatcaccgccggcagggtcagccacaggttggcgtgctcttccaccagcaagaccagcgcaaccgccaccatcagcttgtccgcgaccgggtcgaggaaggcgccgaacggcgtgctctgg

SEQ ID NO: 1124 - DNA, 128 bp, Pseudomonas aeruginosa
gatcaaaataccaaaagcaattgccagaggcacgccagcccatggttgcgcatccggagaatattgattagctccattaagaaccaatgaatgaggaacaagtattacaactaataatgtaactaaca

SEQ ID NO: 1125 - DNA, 88 bp, Pseudomonas aeruginosa
ccgtcgaattcgcgccagagccgctccatgccctcgagcgcttcgcgatggcgcggatcggcgcgtagccaatcctccagctcggggg

SEQ ID NO: 1126 - DNA, 124 bp, Pseudomonas aeruginosa
ccgagcgcctcggtcaggcagttcatcgagttggcggtgaacatgccggagcaggagccgcaggtcgggcaggcgctgcgctcgtactcggcgaccttctcgtcggagcaggagtcgtcggcgg

SEQ ID NO: 1127 - DNA, 154 bp, Pseudomonas aeruginosa
ccgaaggtctcgtccttggacaccagggcgttcttcggcacgtcgaccaggatggtcggctcgaagaaggtgccgccgagggcgtgcggcttgccgccggaaaccaccttggcgcccttggagaccgcgtcggcgatgtgttcctcgaccttgg

SEQ ID NO: 1128 - DNA, 107 bp, Pseudomonas aeruginosa
cctgcaccacttcgttgagcaggatcttgatgttgacctcatggtcggagcagtccacgccaccggcgttgtcgatgaagtcggtgttgttggcaccgccgtgcagg

SEQ ID NO: 1129 - DNA, 91 bp, Pseudomonas aeruginosa
cccggacggtgcttttcgcgacgggcacccggcgcggaacgcagatcgttcagttgcatggattaaccctccacacgcagcaggtagtagg

SEQ ID NO: 1130 - DNA, 60 bp, Pseudomonas aeruginosa
ccgcgctgagggcgatgacgaaggaggacagccatacgccgcccaccggtaccagcccgg

SEQ ID NO: 1131 - DNA, 97 bp, Pseudomonas aeruginosa
ccgatgttgtcgcccggatgcggatcgccgcgatgcggggaatacggcggcgcgctactgcgcagggggatcgcggtgaagcgcaggcgcggacagg

SEQ ID NO: 1132 - DNA, 55 bp, Pseudomonas aeruginosa
cccgccaacgcgcccggcgacaagcccgccggcgtgagcatctaccagtacctgg

SEQ ID NO: 1133 - DNA, 124 bp, Pseudomonas aeruginosa
caacgcgagacatgctgattccccttagaacacagtgcagagcacttcgccgccaacaccagcagcacgggcagcacgatcggtcatcacacctttgttggtggagacgatcgacacaccgagg

SEQ ID NO: 1134 - DNA, 109 bp, Pseudomonas aeruginosa
cgcgacgctcgatcagtacggtgacggtcttgtccattttgtcgctgacgacgcggccggtcagcgtacggacggttttctgagcttcagccatgatcacttacctgct

SEQ ID NO: 1135 - DNA, 205 bp, Pseudomonas aeruginosa
tcttgaaccacttgtcgtggatgcgctgataggtgccgtcttcgcggatctgatggaggaagttgttgatgaaattgatgctgtcgtagtcgcctttcttcaggccgaacgccagcggctcgtaggtgaacggctggtcgaggtagaccagcttgccggcgccgaacttgctcaccgccaccacgttgtagggcgagtcgtagat

SEQ ID NO: 1136 - DNA, 70 bp, Pseudomonas aeruginosa
tgcaacgccccgccctcgtccgccaccgcccacggctgcagttctccggcgcacacctgctgcaccagca

SEQ ID NO: 1137 - DNA, 134 bp, Pseudomonas aeruginosa
tgatcaggtccaggtcgacctggtccagcacgcgcggcagcagggccgattcgagttccttgaatttcaggttcttcgggttctcggcgatgtccttgggcgtggccagggcgttgttcggatccttcaacttg

SEQ ID NO: 1138 - DNA, 128 bp, Pseudomonas aeruginosa
tcgaagccgagcacctgcacggcgtggctggcatttttccgcaccgccggcgacgccgaccactcggcagcccttgagcttgccgatctgtccgacggtggccccgaccggcccggtggcggcggcca

SEQ ID NO: 1139 - DNA, 70 bp, Pseudomonas aeruginosa
tgatcgtcgccagcaacagccagaccccggcggccagcaaggccgagagcatgccgaagaccagcaggtc

SEQ ID NO: 1140 - DNA, 247 bp, Pseudomonas aeruginosa
  misc_feature (1)...(247): n = A,T,C or G
gccttgtccggcanttgccgatcggtgatgtancggtgcgacagcttggccgcggcgatgatcgcgccgtcggtgatgctcaccccgtggtgcacttgatagcgttccttgaaaccacggaggatggcgatggtgtcttcctcgctcggttcgtccaccagcaccttctggaagcggcgctccagcgcggcatccttctcgatgtactggcgatactcgncnagggtagtagcaccgacgcagtgca

SEQ ID NO: 1141 - DNA, 79 bp, Pseudomonas aeruginosa
tcgcgtcccggggtcaggccggccgcggcgagcgccgggccgccctcgcgggaaagctgggcatagaggtcgtcgaggt

SEQ ID NO: 1142 - DNA, 185 bp, Pseudomonas aeruginosa
cagcaggtcgtcgggggtgaatgcgccggtgatttcgcccaggtgctgctgggcctggcgcagatcctcggccagcagttcgccggcgccattgtggataagttggctgtggccatgctccagcgcctgccctgccaggcgtagcgcttccaagtggcgccggcgggcgctgaaaccgctttccg

SEQ ID NO: 1143 - DNA, 104 bp, Pseudomonas aeruginosa
cgcaggcgacgttcttcgatgtccggcggcggcgcattgccaagcgggtcgcgcaggtgccgggcgaggctgaactgctgttggcgcaggcgctcatccatgac

SEQ ID NO: 1144 - DNA, 263 bp, Pseudomonas aeruginosa
cgttgcgcgcgcgccctccgccggccagcagcggcgttccggaaaggtcgagctggttgagcccggcgacgtccggcggggtgtccggacggtcgtcggcgagccagtcttcgaccgccagttggccactgctgagcgcgctggccagcagcttgtgcggcaggttgtactgctgccattggtcggcatcgctcggacgcaggtattgcaggccgacatgcgccgccaggaacgccgccggcagcgcgtaggcatagcgcggc

SEQ ID NO: 1145 - DNA, 198 bp, Pseudomonas aeruginosa
accttcaggctgtccggcaactgctcccaggagcgccagtcgcgctgcaggtcgatgggctggccgtcgacccaggagccgaccttgcgttcgaccatgaccatggtccccggtggcggcacccagcgcaggaccgcgaccagcacgacgctggcggccatgaaccagagcaggtacttgaacaggcggcggaacagg

SEQ ID NO: 1146 - DNA, 147 bp, Pseudomonas aeruginosa
tcagcaacgggtgctcctgcaaggcttccagggtggcgcggctgacgcggagtttgatttcggtttctttctgcatggggcgatgtccggctcgggacgccaggcgtccgcgggtgaaggtgttccagatcaaaggcgcgcggggtg

SEQ ID NO: 1147 - DNA, 201 bp, Pseudomonas aeruginosa
ccaggttcccggcggcgctggggttggtggcctggaacagggtggtgaaatgctcgtcggccgtcggcgcgacgcaatcggtgagttgcagggtgaaggcggtttcgccggcgctgcggcccactgcgccatcgagggcgctcaccggtacgctgtcgaggatcaccgtggggtcggtgaagccgttgaccgcgacctggc

SEQ ID NO: 1148 - DNA, 263 bp, Pseudomonas aeruginosa; identical to SEQ ID NO: 1144

SEQ ID NO: 1149 - DNA, 101 bp, Pseudomonas aeruginosa
tcgatcagtacggtgacggtcttgtccattttgtcgctgacgacgcggccggtcagcgtacggacggttttctgagcttcagccatgatcacttacctgct

SEQ ID NO: 1150 - DNA, 146 bp, Pseudomonas aeruginosa
cgctcaccggtacgctgtcgaggatcaccgtggggtcggtgaagccgttgaccgcgacctggcaggtctggtcggtcacttcgccgctgaatgtgatagtgtttgccgccatcgcggttcccgaagcggcaattgccgcaaaggcc

SEQ ID NO: 1151 - DNA, 93 bp, Pseudomonas aeruginosa
gcttatcctggtaggcggctaccgcccggccgcggacgttgccggactcggtcagtgggccgctgacgtccagttcggagcggtaattgtccc

SEQ ID NO: 1152 - DNA, 227 bp, Pseudomonas aeruginosa
ccggcaaggtgctgaccacccgcccgtcgtcgagctgggtggtcagcaccgaacccttggccagattcagcttgaacgggaaattgagacggccgagagtcaccggcgccagggtgctgcccttgttgctgccagtggcggcgacgtacagctcctttaccgtaatcggcacgttctgcccggtggcggtgttggtcacgccattgatcgcgatggtggccttgttg

SEQ ID NO: 1153 - DNA, 185 bp, Pseudomonas aeruginosa
tccaagcttgaactgctagaacaggaggtgcagctgatgtgaccgcatatggaaaatccagtgagaaccactgacttgtctcgacttcaatatttctttccaacagaagagaaaggttatgaaactctccatctattacagtctgccccaagccattccttaccaagaccccatactcactcata

SEQ ID NO: 1154 - DNA, 344 bp, Pseudomonas aeruginosa
taccgtcttctaccttgaagccaacgcggtcagccttgctggtttcagtattgaagatggcgacgttggagacgtgcagaggcgcctccttctcgacgataccgccctgttggccgagcatcggattgggcttggtgtggcgcttgatcaggttcaccccgccgacgaccagacggtcgtcagcgagaaccttcagcaccttgccacgcttgcccttgtccttgccggcaatgacgattacttcgtcgtcacgacgaatcttttgcatgacggctactccttacagcacttcgggggcgagcgagacgatcttcatgaacttctcggtacggagttcacgagtc

SEQ ID NO: 1155 - DNA, 278 bp, Pseudomonas aeruginosa
gccaatggagccggcccggcgcatggagttccgcccggagcacagagaaaggagaaaggagaaaggagaaaggaaaacggcgccctggggcgccgtctgcgatcaggccttggcgggcgtcttgttccgcgggcgcagttgcgccccggccagcagcggatcgtcgatgccgctctcggcgcgcatgccggcagcgaagaacggcaccatcaggtgcatcacctgctcggtggaagtgttcacgccgaaatcggtttccgccatcgcccgcagggcct

SEQ ID NO: 1156 - DNA, 79 bp, Pseudomonas aeruginosa; identical to SEQ ID NO: 1141

SEQ ID NO: 1157 - DNA, 375 bp, Pseudomonas aeruginosa
tgacgcgctgtacgtgctggttgatcaggttggcatccttcagggtctgcaggctgacgacgtcgccttcgaccttggccagctcggaggtgcgtacttcagcacgatccatagccttcagggaaacgaagccgaacttcggcaggcgacggtgcagaggctgttgaccaccctcgaagcccggagcgaccttgccaccggagcgggaggtcagacctttgtgaccacggccaccggtcttgcccagaccgctaccgatgccacggcccggacggtgcttttcgcgacgggcacccggcgcggaacgcagatcgttcagttgcatggattaaccctccacacgcagcaggtagtaggccttgttgatcatgccgc

SEQ ID NO: 1158 - DNA, 244 bp, Pseudomonas aeruginosa
  misc_feature (1)...(244): n = A,T,C or G
ggtccgccggtcgaacagcgtaggtacgatggtatagggcaacgcctgtttgcgcgaccggttgatcatcgccagggtgttgaccatccgctccagccctttcaccgcgaggaactcggtctgcaccgggataccaggtgctggctggcggccagggcgttgaccatcagcacgccgagcagcggcgggctgtcgatgatcgcatggtcgaaatcctgccanagctgcgccaggctcttcgaga

SEQ ID NO: 1159 - DNA, 169 bp, Pseudomonas aeruginosa
tcgtccgccgcgaccagatcgcgccaaccggcgtcgagcaaatgcgcttcccaggggcgccaggcctccagccggaagacttccatcaccgagcgcaacggacggcgccgggcctggcccggagaggacctgtcgctggcttgcgcggcactacccagtcgtggagcgg

SEQ ID NO: 1160 - DNA, 91 bp, Pseudomonas aeruginosa
cgcgccaccttcgccaggaacgcgcgcggttcgcgcaggccgggcagctccgggcggccgaggaggcgaacgaaggtgtcctggctgaggt

SEQ ID NO: 1161 - DNA, 79 bp, Pseudomonas aeruginosa; identical to SEQ ID NO: 1141

SEQ ID NO: 1162 - DNA, 118 bp, Pseudomonas aeruginosa
tccgccggccagcagcggcgttccggaaaggtcgagctggttgagcccggcgacgtccggcggggtgtccggacggtcgtcggcgagccagtcttcgaccgccagttggccactgctg

SEQ ID NO: 1163 - DNA, 278 bp, Pseudomonas aeruginosa; identical to SEQ ID NO: 1155

SEQ ID NO: 1164 - DNA, 108 bp, Pseudomonas aeruginosa
ggcggctgcgctgcaggcgtcccagcggcgcgtgctggcgctcctgggtgaacaacgcgtcatcctgcccgtcgcggcgggcgtcgcgacgcacctcacggtgcaggg

SEQ ID NO: 1165 - DNA, 74 bp, Pseudomonas aeruginosa
gttcctcgcgcgacagcgcggtgttgatcagcagcggctcggccaactggtcgccgatcttctgtcgcggattg

SEQ ID NO: 1166 - DNA, 138 bp, Pseudomonas aeruginosa
cccgacagcttagcggctacttccatcttccttaccccttaacgcttggctttcttgtccgcagcatgcccgcggtaggtgcgggtagcggcgaactcgcccagtttgtggccgaccatgtcctcgttgacgagaacc

SEQ ID NO: 1167 - DNA, 104 bp, Pseudomonas aeruginosa; identical to SEQ ID NO: 1143

SEQ ID NO: 1168 - DNA, 351 bp, Pseudomonas aeruginosa
tgccagtacgtcgatctgattggctgcgaggaactgaccctcgaaggcagccgccttgatctcgaacttgtcctgacccttggcgaactcacggaagatacgagcggcagcgcccggatgttcgttggagaaagcgatcagggtcgggcctttgaacacgtcgttgagcacgtcgaactgggtgccttcaacggcgcgcttgagcagggtgttacgtacgactttcacgtacacaccagcttcgcgggcctctttacggagtccggtcatggcgcctacggtcacgccacgggcatcggccacgacagcggacagggcagctttggcagcctcgttgacttcagcgacgat

SEQ ID NO: 1169 - DNA, 60 bp, Pseudomonas aeruginosa
ggtcttcgcgccacgccggttgcaacggggcgtgctggccctggtcctgctcctggccgg

SEQ ID NO: 1170 - DNA, 174 bp, Pseudomonas aeruginosa
aggcagcttgacggggttcttagcaacgcgagacatgctgattccccttagaacacagtgcagagcacttcgccgccaacaccagcagcacgggcagcacgatcggtcatcacacctttgttggtggagacgatcgacacaccgaggccgccacgaactttcggcagttgctca

SEQ ID NO: 1171 - DNA, 150 bp, Pseudomonas aeruginosa
ggcgaagtattgctggaactggccgccgaggccatcgctgcccagccgggtcagcggcgaggtggcgctgaggcgggtttccgcgcggttctcgccgccggccggacgggtggtgatggagatgatcccgccggtggcgccgctgccgta

SEQ ID NO: 1172 - DNA, 133 bp, Pseudomonas aeruginosa
cgttgcgcgcgcgccctccgccggccagcagcggcgttccggaaaggtcgagctggttgagcccggcgacgtccggcggggtgtccggacggtcgtcggcgagccagtcttcgaccgccagttggccactgct

SEQ ID NO: 1173 - DNA, 362 bp, Pseudomonas aeruginosa
attgaaataggctggatttgccttgatgcagatcaaccctggagcagaaagatgagtgtgacagtgaccgagcgtgacgatgaccacaaatcccgcgagctgcgtgcgcttggccgccgctgctgggacgtgcatcagcagggactgctggttggcgtcttccataacgaggatgacgcccacgcctatcggatcaagctggagaaagaagaagaactgcggcagataggtgaatcggcctgaaccatgcgcccccgcgtacttcgggggcgcacctttgatctcaggtccctgaaaggctccggtcgaggctgacgactcccggcggcaggctatcttcctgtacccgttgccgaggggta

SEQ ID NO: 1174 - DNA, 205 bp, Pseudomonas aeruginosa; identical to SEQ ID NO: 1135

SEQ ID NO: 1175 - DNA, 144 bp, Pseudomonas aeruginosa
tgtgccggcgcggcgtaccgttcgcctgggattcgcgttcgtcctcgcggatgtcgcagtacagcgcattgctgcgggcgaacagttcgaggcactcggcatccttgcccagcaatgggttggcgctgtcctcggcggacttgg

SEQ ID NO: 1176 - DNA, 177 bp, Pseudomonas aeruginosa
tcgagggcacgcagtccgcgatcgagggcctcttcccaggtcagcgcccagacgatcagcttcaggcacatcgagtcgtagtacggcgggatggtgtagccggtgtagatcgccgtgtcggtacgtacgccggggccgccgggggcgtagtagcgggtgatcttgccgaacgagggc

SEQ ID NO: 1177 - DNA, 216 bp, Pseudomonas aeruginosa
tcgcggtcggcgtgggtggccagggtcgagccgttgcccggcagcgacaggccgagcgcctcggtcaggcagttcatcgagttggcggtgaacatgccggagcaggagccgcaggtcgggcaggcgctgcgctcgtactcggcgaccttctcgtcggagcaggagtcgtcggcggccaccaccatggcatcgaccaggtccaggccgtggctggcc

SEQ ID NO: 1178 - DNA, 320 bp, Pseudomonas aeruginosa
tggattgagtctgaatcatataatttctccgacccctagtccttagacttccaccgcgcgttcaacgatatcaaccagggtccaggccttggtcttggccagcggacgggtttcgcgaatggtgaccaggtcaccaatgcggcactgattggattcgtcgtgtgcgtgcagtttggtcgaacgcttgacgtatttgccgtagatcgggtgcttgacgcgacgctcgatcagtacggtgacggtcttgtccattttgtcgctgacgacgcggccggtcagcgtacggacggttttctgagcttcagccatgatcacttacc

SEQ ID NO: 1179 - DNA, 123 bp, Pseudomonas aeruginosa
gcctggtcgaacaccgtcgccggatcggcgctggccggcagggcgacgatggccgcggtgtagccggccaggacgaaaccgtaggacgcatgattgtgcagcagcgacgcgccggcggtgcag

SEQ ID NO: 1180 - DNA, 198 bp, Pseudomonas aeruginosa
tcttgaaccacttgtcgtggatgcgctgataggtgccgtcttcgcggatctgatggaggaagttgttgatgaaattgatgctgtcgtagtcgcctttcttcaggccgaacgccagcggctcgtaggtgaacggctggtcgaggtagaccagcttgccggcgccgaacttgctcaccgccaccacgttgtagggcgagt

SEQ ID NO: 1181 - DNA, 126 bp, Pseudomonas aeruginosa
tatagcggccgttgccggaggtcttggggttcggcaccactacctggacgccgtccttgagcaggtccggccagtccttcagggccttggggttgcccttgcgaacgatgaacacggtggccgagg

SEQ ID NO: 1182 - DNA, 187 bp, Pseudomonas aeruginosa
cagcagtagcccttgatcgcttccaggcaggcctggtggcgttccggggtatgggtggcgcaggcatcctcgaccagggtgaccaggtaaccgcggtcggcggcatcgcgcacggccatgtccacgcactggtcggtgaccaccccgcagacgatcaggtggcgggtgccgaggttgcgcagtacgt

SEQ ID NO: 1183 - DNA, 69 bp, Pseudomonas aeruginosa
gccaggccgatccagaggaagtccagcaggcgccgcgaggagaggatcgccaccagcagcggcccggtg

SEQ ID NO: 1184 - DNA, 401 bp, Pseudomonas aeruginosa
cacgatgcgatcagcacggcctttggcacgcggcatgatgcgcttgagcgaacgaccttcgttgacgaagacggtggagaccttcaggtcatccacatcggcgccttcgttgtgctcagcgttggcaacggccgactccagcactttcttcatgatctcggcggctttcttactgctgaaagccaggaggttgagcgcttcgcccaccttcttcccgcggatctggtcggcgaccaagcgggctttctgggcggagatacgagcgcccgacagcttagcggctacttccatcttccttaccccttaacgcttggctttcttgtccgcagcatgcccgcggtaggtgcgggtagcggcgaactcgcccagtttgtggccgaccatgtcctcgttgacgagaa

SEQ ID NO: 1185 - DNA, 161 bp, Pseudomonas aeruginosa
tgatccggaaatgaaaaaccccggccggagccggggttttcgcgaggcgggccgggcagatcgtggctgcccggctggcccctgttccttagtggaactggttcatggtgttgtctttgccgctggccttcagagcggcttcgcctgcgaagtactcttta

SEQ ID NO: 1186 - DNA, 198 bp, Pseudomonas aeruginosa; identical to SEQ ID NO: 1180

SEQ ID NO: 1187 - DNA, 177 bp, Pseudomonas aeruginosa; identical to SEQ ID NO: 1176

SEQ ID NO: 1188 - DNA, 112 bp, Pseudomonas aeruginosa
tccagttcgggcatcttcgcccgcacttccttgatcacgtccagcgggttggcgctgggcgtgcccttgatgccgatgtagaccgagggaatcccattgaacgaactgatcg

SEQ ID NO: 1189 - DNA, 297 bp, Pseudomonas aeruginosa
tgatagttgccatctatagctccactgattgtcttacgacacacaaacgaaatgacagagcgtgcgccctgccaattttcggggtacaaaatagtaaagaggttcttgtacaccgtcaagacaaagccccggctatcgggatagccggggcttgtcgttgatgcttagttaccgctcgagttcagcgcttcggtcagtgcggcttccgcctcgctggcactcacacgctgcggcttgccgaggtcgcgctgacgcttgcgttcgctgtggtaagccagaccggtaccggccgggatc

SEQ ID NO: 1190 - DNA, 139 bp, Pseudomonas aeruginosa
gcctgtttccgcctcgcctcaaggcgtacggttgcgccgcgcctcgatgatgttgggcagttgcgagacgcgcgccagcaggcgtccaagagcgtccagaccgggaatctcgatggtcagttgcatggtcgcggtgttg

SEQ ID NO: 1191 - DNA, 146 bp, Pseudomonas aeruginosa
ccctggcgccgcgtccggaggggcgcttcgaagcgttgtcggaattctggctggccttgcagaagccgctagcgcatccccagcgggtcttcgcgccacgccggttgcaacggggcgtgctggccctggtcctgctcctggccggg

SEQ ID NO: 1192 - DNA, 60 bp, Pseudomonas aeruginosa; identical to SEQ ID NO: 1169

SEQ ID NO: 1193 - DNA, 174 bp, Pseudomonas aeruginosa
tctgctcttcggcagcggcagcagccgggccagcagcggcaacggtagcggcagcagcggtaacgccgaacttctcttccatcgccttgatcagttcgaccacttgcatgacggacatttcggatacggcgttgatgatgtcttcgttggtcagagccatgactctaattcctg

SEQ ID NO: 1194 - DNA, 186 bp, Pseudomonas aeruginosa
cgtcgaaggtgaagctgccgtcgaagtcgttgaagcggccgtacagccagctatagcccaggtgcttgatgcggaactcgatgaaggcgtgctggccttccttgtcgatcttgtagtccgcggccattgcctggccggcggtgaacagtgcggagccgagcgccagcgcggcaagggtcttcttca

SEQ ID NO: 1195 - DNA, 156 bp, Pseudomonas aeruginosa
ggatgatcacgccctcctcgaagccgatggtgcggcagcgccaggccagatcgttctcgttggcgaagcgcttgcgggtcaccttgtcctcggcgaactgcagcgcggcgacgaagccggcgccctggacctcgccgaccagcggatggtcgccga

SEQ ID NO: 1196 - DNA, 228 bp, Pseudomonas aeruginosa
ggatatgccgtttgcgggcgatgtgcgccttgtgcttcggcgcctcgagcagcgccttgcgtagcgggtcggtgagcggcaggcgctccagcaactgcggttgcagggtggtcaggcgctcgccgaggtcctgcagggcatgcagctcgcgtttgatctgcgacttgctcttctcttcgaattgcgagtcgtcgtcgtgaaattcagccatggtggtggtccagtgga

SEQ ID NO: 1197 - DNA, 191 bp, Pseudomonas aeruginosa
ctcaggcgctggttgtcgctgccgcgcagggccaggctctgttcggcgtgctgttggtaggggtcgctgatcagcgcgtcgatcagcccggcggcctgttccagttgcgcgtgcagatgctccagcgggtagccgctgtagaccaggatgtcggcgcggctgcgccggcgcagttcgccgagcagggcgag

SEQ ID NO: 1198 - DNA, 290 bp, Pseudomonas aeruginosa
cagagctcggacagaccgccgttgcttagcgcagagagagcaccttgcttagccatttagtcctcgaatttaccgccagctgcttcgatagccgcacgcgcacccttggtggcggcgatacctttcagggtgaccgcacgaccaacttcgccggacagcatgactttgacgcgctgtacgtgctggttgatcaggttggcatccttcagggtctgcaggctgacgacgtcgccttcgaccttggccagctcggaggtgcgtacttcagcacgatccatagccttcaggga

SEQ ID NO: 1199 - DNA, 68 bp, Pseudomonas aeruginosa
catcgcctggcgcatttccgctccggcgccgctggccatgaccaacggcaccacgccggcgatgaacg

SEQ ID NO: 1200 - DNA, 68 bp, Pseudomonas aeruginosa
tacccagaccgttgatcggtggcggcgacacggccatgaccgtgccatcgtcgggcagcgcgaaatgc

SEQ ID NO: 1201 - DNA, 85 bp, Pseudomonas aeruginosa
accatgtcggcgcggctgggtttttcgaagcagggggtgaactggccgccgatcagttcgtgccggccgtggtgcaggcgatggt

SEQ ID NO: 1202 - DNA, 196 bp, Pseudomonas aeruginosa
tatcaaccagggtccaggccttggtcttggccagcggacgggtttcgcgaatggtgaccaggtcaccaatgcggcactgattggattcgtcgtgtgcgtgcagtttggtcgaacgcttgacgtatttgccgtagatcgggtgcttgacgcgacgctcgatcagtacggtgacggtcttgtccattttgtcgctgac

SEQ ID NO: 1203 - DNA, 67 bp, Pseudomonas aeruginosa
tgacgcttcagctcgcggttcttcatgctctctttagccatgttcctactccaatcagttacggaac

SEQ ID NO: 1204 - DNA, 264 bp, Pseudomonas aeruginosa
gcctcgatgccacgcttgtcgatgatacgcatgcccttggcggaaacgcgcagacgtacgaagcgcttctcggactcgacccagaaacggtggtgctgcaggttcggcaggaaacggcggcgggttttgttgtgtgcgtgggaaatgttattcccggtaaccggacccttaccggttacttgacagactctagacatgcctcagccctctataacctcatgcccaacccggcatgggttggctgctttaactcaagttcgatac

SEQ ID NO: 1205 - DNA, 140 bp, Pseudomonas aeruginosa
cgttgtttgccataacttagaactccagtccgccttcacgagcggcatcagccagcgctttcacacggccgtggtacttgaagccagaacgatcgaacgccacctgggtgacgccggccgctttggcgcgctcggcgacc

SEQ ID NO: 1206 - DNA, 210 bp, Pseudomonas aeruginosa
gccgtagccggagatatcgcagacgatcagtcgcgggaagcgctcgcgcaacgcctcgtaggacaggcccaggcgcgcggcggcgcccggcgcgaggttctgcaccagcacgtcggcgccggccagcagcttctccagcaacggcagcgcctcggcctgcttgaggtcgaggctgaggctctgcttggaacgattggtccagacgaagtg

SEQ ID NO: 1207 - DNA, 172 bp, Pseudomonas aeruginosa
gttgctgaccagccagtttgatttcaacgccggcaggcagcttgacggggttcttagcaacgcgagacatgctgattccccttagaacacagtgcagagcacttcgccgccaacaccagcagcacgggcagcacgatcggtcatcacacctttgttggtggagacgatcgac

SEQ ID NO: 1208 - DNA, 55 bp, Pseudomonas aeruginosa
tgcaggccgccgagcggcgggctgcgcgggtcgccctcgtcgcgcagcatctgca

SEQ ID NO: 1209 - DNA, 108 bp, Pseudomonas aeruginosa
ggttcagtacctgggcctggatcgacacgtcgagggccgaggtcggctcgtccgccaccagcaccttgggttgcagcatcatcgcccgggccagggcgatgcgctggc

SEQ ID NO: 1210 - DNA, 145 bp, Pseudomonas aeruginosa
ctcgtcgagggtctgcacctgcaggcgcgagacctcgtcggcgatggcggcgatgccgcccttgcgctcggtgcgggtggtcggcacgttgtggtccggggtggcgatgttggcgtcgatccgccacggcttgcgcccggccagg

SEQ ID NO: 1211 - DNA, 196 bp, Pseudomonas aeruginosa; identical to SEQ ID NO: 1202

SEQ ID NO: 1212 - DNA, 108 bp, Pseudomonas aeruginosa; identical to SEQ ID NO: 1164

SEQ ID NO: 1213 - DNA, 123 bp, Pseudomonas aeruginosa
catcacgtacatcgacgtgcgccaggttgcgcgcagcgaggtacaggttctcgtcgacaccatcggtcacgatcagcacgtctttcagacccagggtgtccagcttggcaaccaggcccttgg

SEQ ID NO: 1214 - DNA, 111 bp, Pseudomonas aeruginosa
cacctcgaccttgcatttcttcgggatcggcggcggcgggggaccgccgccgatagcgatggaggccgggccgatcagcgaatagggctttcggcaaaccccggtggggta

SEQ ID NO: 1215 - DNA, 116 bp, Pseudomonas aeruginosa
gggtgtatacgcgggtgcatacgccacgacgttgcgggcagttttgcagcgcaggcacgtcgctcttgtcgaccatgcgcttgcgcggcttacgcaccagctggttgatagttgcc

SEQ ID NO: 1216 - DNA, 152 bp, Pseudomonas aeruginosa
agcccgtcgcgcgaatgcaccaccagcacatgctcgctgccgagacgcttgagcacttcagccagcggcttgcacagttcctgggtgaacaccccgaccacctggtgcctgactcccgccgggttggtcagtgggccaagcatgttgaacag

SEQ ID NO: 1217 - DNA, 365 bp, Pseudomonas aeruginosa
tgcagtagagcagggcaaaggtggcgaaaccgccggagaacagcgccagggaggtgcgcatgaactgcggggtgcctttttcgatatagcgttcgacttcggtggcggcttccagcacctcgttggctgcttcgcgggccgcctcgattaacgcgggttcttcttcggcctgtggccggacttgcggattgctcacggggcacctctggggacggtggcgagcaggcacaacgaggccgcgccacctggatttcagggacaaggggtcgttgttggaggttatgtggcaaaggatatagataggtttatatgatttccaatatattgatcgacacgattgatatgtaaaaagacctaattggagg

SEQ ID NO: 1218 - DNA, 219 bp, Pseudomonas aeruginosa
tcgacaccaggtagaacaggccgatccgccagatcaccgagttggtggcgcgggtgatctgcttcgccgggtccttggactcggcggcggcgatggtgacgatctcggtgcccatgaagctgaacatggtcgtcagcagggcgccgagcaccgcgccgtagccgttcggcacgaagccgccgtggctcgccatcaggctggacaggccgctgacctcac

SEQ ID NO: 1219 - DNA, 157 bp, Pseudomonas aeruginosa
tgccagttgtcgaccagaacctgcagttcggggaaggtctgcggtgccaggtaagggcggttcggtaccttcgagaacaggtacatcaggcagttgatcggagcgaggaagctggagtggtcgctcaattggcgcgacagcttgtggcgtacccggc

SEQ ID NO: 1220 - DNA, 141 bp, Pseudomonas aeruginosa
ccatccgccccaccacccttaccggcaccaactcctcgggcaccagcttggtggggtcgagcaggtcgaagtcgaagctgtcctgctggttctccgggatcacctgcaggcccagctcccattcgggatagtcgcccttct

SEQ ID NO: 1221 - DNA, 149 bp, Pseudomonas aeruginosa
gggatcggcagggcggtccagaagccgaacccggcgtactcggcgagcagcgcgtaggtgtaggcacctaccgcgtagaagccgacgtagccgagatcgagcaggccggccaggccgaccacgatgttcaggccgatgccgagcatcac

SEQ ID NO: 1222 - DNA, 76 bp, Pseudomonas aeruginosa
cccatcgcctggcgcatttccgctccggcgccgctggccatgaccaacggcaccacgccggcgatgaacgccagcg

SEQ ID NO: 1223 - DNA, 287 bp, Pseudomonas aeruginosa
tgtagagcatcgccaccacggaggatttcaatggcgcgaactcgtagtcctcctgccagtccagtccggaagaccagttcagcaggtggcgcaacgtcacctcgggatgacgggcgaacggcgggtagtagcgcgccaccgggtcgtcgagctggaagcgcccttcgccctcggcgacgccaagcagcgtggcgagcaggctcttgctcaccgaccaggtaaggtgcggggtctctgcacggctcgggccggcgtagcgctcatagaccagacgaccgtcgcggatc

SEQ ID NO: 1224 - DNA, 287 bp, Pseudomonas aeruginosa; identical to SEQ ID NO: 1223

SEQ ID NO: 1225 - DNA, 138 bp, Pseudomonas aeruginosa
gacttgtctcgacttcaatatttctttccaacagaagagaaaggttatgaaactctccatctattacagtctgccccaagccattccttaccaagaccccatactcactcataccttggccaccacatataaggttcc

SEQ ID NO: 1226 - DNA, 287 bp, Pseudomonas aeruginosa; identical to SEQ ID NO: 1223

SEQ ID NO: 1227 - DNA, 99 bp, Pseudomonas aeruginosa
tgtgcatcaccgcgaaggtgccgatcagcgacaccggcaccgcggccagcgggatgatcgaggcgcgccaggtctgcaggaacaggatcaccaccagca

SEQ ID NO: 1228 - DNA, 186 bp, Pseudomonas aeruginosa; identical to SEQ ID NO: 1194

SEQ ID NO: 1229 - DNA, 179 bp, Pseudomonas aeruginosa
gccagtagttctgggtcagccccagcaacgcggtaccgatggagaacagcacgatggtccaggtcaccacccgcacccggccgaagcggtcgcagcaccagccgccatagatgccgccgacggccatgccggcgagagtcaggctgccgagggagccggcttcgaagttgctcaggccg

SEQ ID NO: 1230 - DNA, 155 bp, Pseudomonas aeruginosa
gacccggctggcgaccagctcgccttcgctgacctgcaacagcgcggcggcgtcgcgcgcgcgtagctgcggtcgctcggcgcgcaggtcctgccaggcgcggtaaagctcggcaggggaatgggaaaggctgggagtgctgctcatcgacggtt

SEQ ID NO: 1231 - DNA, 71 bp, Pseudomonas aeruginosa
tgcgccaccaatgcccgacaggacgacggaagcggcaaacacgatggccaagcgacgcaggaacggacgag

SEQ ID NO: 1232 - DNA, 112 bp, Pseudomonas aeruginosa
gcaaccagtcctcgaattccggcgccggcttcaggcccagcgtctggcgcgcatagagggcgtcgtggaaggaggtggtctggtagttgagcatcacgtcgtcggagccggg

SEQ ID NO: 1233 - DNA, 273 bp, Pseudomonas aeruginosa
tccacaggttgcggctggcgatgcgcttgccgttgcgcgcccagaactcggggtcctcggggcgccagtcgagcagcagcggtccccgtgcggctttcagttgggtattggcgatcatgcccatgacggcattcctcaggagtgggtgggaagggtgggaggaaggtcgacgtcggccgaggcggcctggccgtcgatgcggcgttgctgcttgatcgcgtagtgcatccagaccatgcagaccacggtcaggccgaacagcaacatgaagca

SEQ ID NO: 1234 - DNA, 115 bp, Pseudomonas aeruginosa
aacggtattcactggctgtcgccgttgtaaagcggcgggagggatatcaggcgaagtcgccccagagttgctgggccaccgccaacgctaccaccggcgcggtctcggtgcgcag

SEQ ID NO: 1235 - DNA, 92 bp, Pseudomonas aeruginosa
tacttgggttgcaaccagcgctcgtgcaactggtccagggacttgcgcggcagcgagcgcaacgcctggtcgaccaccatcgccagttccgg

SEQ ID NO: 1236 - DNA, 213 bp, Pseudomonas aeruginosa
cgcgtacctgcagggcgtagaaccggccgttctcgctcaggcgcaggccgcgcccctcgcggacgaacagggccaggccgaggaggttttccagcagcttgatctgctggctgatcgctgagtgggtgacgtgcagctcgctggcggcctggctgatgctgccgagccgggcgaccgcttcgaagctgcgcagggcggtgaggggagggaggt

SEQ ID NO: 1237 - DNA, 187 bp, Pseudomonas aeruginosa
cggcgttgatgacgacgatgtagtcgccggtgtcaacgtgcggagtgtactcaggcttgtgcttgccacgcaggcggcgggcaatttcggtcgccagacgacccagggtctggccggcagcgtcgacgacgaaccagtcgcgctgtacagtttccggtttcgcggtataggttttcattcgttatag

SEQ ID NO: 1238 - DNA, 194 bp, Pseudomonas aeruginosa
gctccaggcaagccaagtagccccgatcgttgagcgccagcacctggtcgatgtgaaagcgcgcctgctcgtattcgccggtggccagcgaagccatgtgctgatggttgctggctttcaggcgctgcggcaggtatttgccgacggtctcgttgagcagatggccgatcgccgacttgtcgtccagctcgatc

SEQ ID NO: 1239 - DNA, 91 bp, Pseudomonas aeruginosa
gccggcaatccgagccgcgcgcgggccgcagcgcgatccgcctgcaggggaatggtgttggccagggggtggccgacgaaacgcacgggcc

SEQ ID NO: 1240 - DNA, 87 bp, Pseudomonas aeruginosa
tgccgccgtgctgggcggcgatgcgcttgacgatcgccaggccgaggccggtgcccttgccgccacgcgccttgtcgccacggatga

SEQ ID NO: 1241 - DNA, 76 bp, Pseudomonas aeruginosa
gggtcgagccgttgcccggcagcgacaggccgagcgcctcggtcaggcagttcatcgagttggcggtgaacatgcc

SEQ ID NO: 1242 - DNA, 120 bp, Pseudomonas aeruginosa
ttgtccttgaagcgggcgatgtcggcgaaggtcttcagcccgccctcggcgacgtagctcggcaccgcataggtggactgcgcgtcggccagggtcggcggctcgatcacttcgatccgg

SEQ ID NO: 1243 - DNA, 351 bp, Pseudomonas aeruginosa
ggcaggtaataaaaaaaccgggcctgggcccggtttcttgtgcagcagatgccttattcggcagcttctacgacttcaccgccgacaggacgatcaaccagctcgacgtacgccatgggggcgttgtcgccagcgcggaaaccgcacttcaggatgcgcaggtagccgcccggacggttggcgtagcgcttgcccaggtcgttgaacagcttgccaacggcagctttcgaacgggtacggtcgaaagccaggcgacggttggcgacgctgtcttccttggccagggtgatcagcggctcggcaacgcgacgcagttccttagccttgggcagggtggttttgatcagttcg

SEQ ID NO: 1244 - DNA, 120 bp, Pseudomonas aeruginosa
tgcaggacggtctcgttgtccagcgccagcagctcttcggcggtcagcgtgtcggccagggtggtcaggtgctgccaactggcctcgcgggcctcggggtccttcaggcggtcggcggga

SEQ ID NO: 1245 - DNA, 250 bp, Pseudomonas aeruginosa
cccttggcatccaccagttgggagcccttgccgatgacgctggcgctcatcacgccgtcgtggaggtcgcccaggctctcgtaggccacggccttctgttcgccggtagcgaggttgatgatccacttctcctcgccacgctcggcgctgatcaagccaccgtgttcggcgacgctgccgttgaccagggtggtgtcgtagagcgcctcggtgagctgcttgcccttggcatcgaggatgccgcgcttgc

SEQ ID NO: 1246 - DNA, 344 bp, Pseudomonas aeruginosa
acgcttggccgctacacgacgtcttggcattgataagccctcaaacggtcttcaggttagcccgggaccataacagtcaagttacgcccgaccttactcttatcgactcagataaatataaaaacgctattacttcggacgcttggcgccgtacttcgaacgaccctgcttacggtctttgacacccgaggtgtccagcgaaccgcgcacggtgtggtaacgcacgcccggaaggtcctttacacgaccgccacggatcagcactacgctgtgctcttgcaggttgtgaccttcaccaccgatgtacgaggaaacctcgaaaccgttggtcagacgtacacggc

SEQ ID NO: 1247 - DNA, 218 bp, Pseudomonas aeruginosa
gctttctggatggcggccggcacttcacgcgccttgccacgaccgaaaccaacgcgacccttgccatcacccaccacggtcagtgcggtgaaagcgaagatacggccaccttttacggttttggcgacgcggttaacctgaaccagcttctcgatgtagccttcgtcgcgcttttgctcgttgtttgccataacttagaactccagtccgccttcacg

SEQ ID NO: 1248 - DNA, 207 bp, Pseudomonas aeruginosa
gcggcgagcggcttccattgctttctggatggcggccggcacttcacgcgccttgccacgaccgaaaccaacgcgacccttgccatcacccaccacggtcagtgcggtgaaagcgaagatacggccaccttttacggttttggcgacgcggttaacctgaaccagcttctcgatgtagccttcgtcgcgcttttgctcgttgtttgc

SEQ ID NO: 1249 - DNA, 187 bp, Pseudomonas aeruginosa; identical to SEQ ID NO: 1237

SEQ ID NO: 1250 - DNA, 71 bp, Pseudomonas aeruginosa
cgcggaggatgccgagcgcctgctgcacagggcggtcggagaaactgaacagcacgcagtcggtggcgccg

SEQ ID NO: 1251 - DNA, 92 bp, Pseudomonas aeruginosa
ggatacgctcgtcgcgcggcgcgatcggcgggatcaccggacgctggaacgggccagtggcggcgaccacgcggttggcctcgatggtccct

SEQ ID NO: 1252 - DNA, 182 bp, Pseudomonas aeruginosa
ggcccggtttcttgtgcagcagatgccttattcggcagcttctacgacttcaccgccgacaggacgatcaaccagctcgacgtacgccatgggggcgttgtcgccagcgcggaaaccgcacttcaggatgcgcaggtagccgcccggacggttggcgtagcgcttgcccaggtcgttgaaca

SEQ ID NO: 1253 - DNA, 94 bp, Pseudomonas aeruginosa
cgcaggcgacgttcttcgatgtccggcggcggcgcattgccaagcgggtcgcgcaggtgccgggcgaggctgaactgctgttggcgcaggcgct

SEQ ID NO: 1254 - DNA, 155 bp, Pseudomonas aeruginosa; identical to SEQ ID NO: 1230

SEQ ID NO: 1255 - DNA, 91 bp, Pseudomonas aeruginosa
acctccagcgtctgcggatggctgacctcacaacgcaggtgcaggcgatggtcggcgcgcgcgtcgccgctggcggcggcctcgccgatgg

SEQ ID NO: 1256 - DNA, 145 bp, Pseudomonas aeruginosa; identical to SEQ ID NO: 1210

SEQ ID NO: 1257 - DNA, 91 bp, Pseudomonas aeruginosa; identical to SEQ ID NO: 1255

SEQ ID NO: 1258 - DNA, 443 bp, Pseudomonas aeruginosa
tgacgcttcagctcgcggttcttcatgctctctttagccatgttcctactccaatcagttacggaacgggaatttgaaagcacgcagcagggcgcgaccttcgtcatccgtacgagcggtggtggtcagggtgatgtccaggccacgcagcgcatcgatcttgtcgtaatcgatttccgggaagatgatctgctctttcacgcccatgctgtagttgccgcgaccatcgaaggacttggcattcaggccgcggaagtcacgcacgcgcggcagggagatggacagcagacgatccaggaactcgtacatccggtcgctacgcagggtgaccttgacgccgatcggccagccttcacggatcttgaagcctgcgatggacttacgagcgtaagtcacgaccggcttctgaccagtgatcttttccagatcggctacggcgttct

SEQ ID NO: 1259 - DNA, 260 bp, Pseudomonas aeruginosa
acgcagcagggcgcgaccttcgtcatccgtacgagcggtggtggtcagggtgatgtccaggccacgcagcgcatcgatcttgtcgtaatcgatttccgggaagatgatctgctctttcacgcccatgctgtagttgccgcgaccatcgaaggacttggcattcaggccgcggaagtcacgcacgcgcggcagggagatggacagcagacgatccaggaactcgtacatccggtcgctacgcagggtgaccttgacgccga

SEQ ID NO: 1260 - DNA, 189 bp, Pseudomonas aeruginosa
tcggaagccagcagggtggcgaccgccttgcgcgacagaccgcggcgcaccggctggccgagcaggtcggtgaacagctcgtacttgatcgcggtggagaccaccacctggccgaggccgatggaggtgttggcgctcttgatgctgactgccgcctgatagtccttggcgtcttcgtcgcgggtctgg

SEQ ID NO: 1261 - DNA, 167 bp, Pseudomonas aeruginosa
tgccggtgaccttgtagctaccgtcggcctgcggctcggccttggtgcgcagcatgcccaggtcggtgccgcagtgcggctcggtcaggcacatggtgccggtccactcgccggagaccagcttggtcaggtaggttgcctgctgctcggcggtgccgtgggcatgc

SEQ ID NO: 1262 - DNA, 207 bp, Pseudomonas aeruginosa; identical to SEQ ID NO: 1248

SEQ ID NO: 1263 - DNA, 61 bp, Pseudomonas aeruginosa
cgccatggcagatcgcgcactgctgggcatagatcggcgccgcgcggctcgggtcgggggt

SEQ ID NO: 1264 - DNA, 160 bp, Pseudomonas aeruginosa
gcggcgttccggaaaggtcgagctggttgagcccggcgacgtccggcggggtgtccggacggtcgtcggcgagccagtcttcgaccgccagttggccactgctgagcgcgctggccagcagcttgtgcggcaggttgtactgctgccattggtcggcatc

SEQ ID NO: 1265 - DNA, 218 bp, Pseudomonas aeruginosa
ggtggcgtcggccaggtcggtcgagcgcatccagtggctgggggtcaggggaggggtgagcgtgagtttcatggcgcgggtccggggtcgctgaatctggagcaagggtggcgagcggcgccgtccgcgacaattggacgcaactaggaatcgaggaggtgctctcgtacgatcgtatgagtcttgtgaaggacaggcctggtcgggactgcccgccc

SEQ ID NO: 1266 - DNA, 61 bp, Pseudomonas aeruginosa; identical to SEQ ID NO: 1263

SEQ ID NO: 1267 - DNA, 54 bp, Pseudomonas aeruginosa
tgccggaatgggcgtcgcggtagcgggcgccggggaccggcatgtcgacggtga

SEQ ID NO: 1268 - DNA, 126 bp, Pseudomonas aeruginosa
ccgacctcggccagggtcgaagcgatgtcctcggcatgggtcagcagcttcagcggctgctccggctggttctcgtgatagacggtaaggctgctcatcggctcagactcagtactttcagttcac

SEQ ID NO: 1269 - DNA, 130 bp, Pseudomonas aeruginosa
cgcgcgccttcgttgaggatgtgctggcgcatcgcctggctcgcccgctcgctgtcgtgctggcggatcgcacggaggatggcgtcgtgttcctggaggatctcctcggcgtattccggctggcggcgca

SEQ ID NO: 1270 - DNA, 194 bp, Pseudomonas aeruginosa; identical to SEQ ID NO: 1238

SEQ ID NO: 1271 - DNA, 107 bp, Pseudomonas aeruginosa
ccagcaacgcggtaccgatggagaacagcacgatggtccaggtcaccacccgcacccggccgaagcggtcgcagcaccagccgccatagatgccgccgacggccatg

SEQ ID NO: 1272 - DNA, 263 bp, Pseudomonas aeruginosa
caccggagcgggaggtcagacctttgtgaccacggccaccggtcttgcccagaccgctaccgatgccacggcccggacggtgcttttcgcgacgggcacccggcgcggaacgcagatcgttcagttgcatggattaaccctccacacgcagcaggtagtaggccttgttgatcatgccgcggttctcaggagtgtcctgaacttcgacggtatgattgatgcgacgcaggccgagacccttgacgcaagccttgtgattggcc

SEQ ID NO: 1273 - DNA, 110 bp, Pseudomonas aeruginosa
tgccggtgttgtgcgacaggtcgaagttgatctggtatttccagtccttgtacgcggtgccgccgagttcgatgaaggcgcggcggaagtaggcggcgtcggcggtgttg

SEQ ID NO: 1274 - DNA, 175 bp, Pseudomonas aeruginosa
tcctcgtcgaagtccaccagcacccggaacatctcctggaagtccggatcgaggtcctgcagggtgtagtagatctgccgcgagccgatgatgatcaccttcagttgcagcgggatcacctggggggtcagggaaaccgcagccaggcggccgagttcggccagcggcgactcca

SEQ ID NO: 1275 - DNA, 196 bp, Pseudomonas aeruginosa; identical to SEQ ID NO: 1202

SEQ ID NO: 1276 - DNA, 300 bp, Pseudomonas aeruginosa
cagaaagagaaagaaagaaaactggcaagccagacttttctgagaagacaggctcatcacggagggaatgtgcgccccgtccccatgccgggaacggggcgcgatttcaccggtggatgtcggtatggcgggtttcgcggaggaacagcaaggcgcagaccaggctaccgccggtgatcagcaccggataccagaggccgtagaagatgtcgccggtgtacaccaccagggcgaacgagaccgtgggcaggaagccgccgaaccagccgttgccgatgtggtacggcagggacagcgagg

SEQ ID NO: 1277 - DNA, 228 bp, Pseudomonas aeruginosa
  misc_feature (1)...(228): n = A,T,C or G
gtcttcatcgccgtaccggccagttcgccggtcagggtttcccactggtgcangcancaggccttcggcgcgggtcgccttgaccgtctccaggtgctcgaaggcttccancagcacgccgttcttcatcgccccttcgcgcaggttctgccgcgacaggtggccgagcaggcgctgggtcagcagccccggcaggatcatcatcacgcaggccaccatcggcaccca

SEQ ID NO: 1278 - DNA, 173 bp, Pseudomonas aeruginosa
tgtcctgccagcgcttggcgtggcggctgccgggaacgttgctgtgggccagttcgtcgaccagggccagcgccggcgggtcggcgaggagaccgtcgaggtccatttcctgcagtttcatccctcgatactcgaggctgcgcagcggctgctgcggcacgcctgcgaggagg

SEQ ID NO: 1279 - DNA, 105 bp, Pseudomonas aeruginosa
gaaagcgcgcctgctcgtattcgccggtggccagcgaagccatgtgctgatggttgctggctttcaggcgctgcggcaggtatttgccgacggtctcgttgagca

SEQ ID NO: 1280 - DNA, 135 bp, Pseudomonas aeruginosa
gccccagcaacgcggtaccgatggagaacagcacgatggtccaggtcaccacccgcacccggccgaagcggtcgcagcaccagccgccatagatgccgccgacggccatgccggcgagagtcaggctgccgaggg

SEQ ID NO: 1281 - DNA, 68 bp, Pseudomonas aeruginosa; identical to SEQ ID NO: 1199

SEQ ID NO: 1282 - DNA, 183 bp, Pseudomonas aeruginosa
gtgactttgacagttgccatggttagagaatctcctcgacgctcttgccacgcttggccgctactgcttccggagcctgcatgttcttcaggcccttgaaggtggcgtaaaccacgttcaccggattggtggagccatagcacttggccaggacgttctgcacaccagccacttccagaacgg

SEQ ID NO: 1283 - DNA, 115 bp, Pseudomonas aeruginosa
cgagccgatgatgatcaccttcagttgcagcgggatcacctggggggtcagggaaaccgcagccaggcggccgagttcggccagcggcgactccatcttcaactggcgcgactgc

SEQ ID NO: 1284 - DNA, 115 bp, Pseudomonas aeruginosa; identical to SEQ ID NO: 1283

SEQ ID NO: 1285 - DNA, 115 bp, Pseudomonas aeruginosa; identical to SEQ ID NO: 1283

SEQ ID NO: 1286 - DNA, 73 bp, Pseudomonas aeruginosa; identical to SEQ ID NO: 1093

SEQ ID NO: 1287 - DNA, 268 bp, Pseudomonas aeruginosa
tcactcctaggcgaggtcagtgccgctctccggccgggttcggcccggtcagttcgaccggggggagcggtcacgggttccagcattgtagcgatggcggacgcaaaaaagggcagccgaggccaccctttttcatacatcttttttgccgtgctacgcagcgatcagtgcagaccctggatgtagctggaaatcgcggcgatgtccttgttcgacagcttggcggcgatggactgcatgatcttggtgtcgccgtcgttggtgcggg

SEQ ID NO: 1288 - DNA, 229 bp, Pseudomonas aeruginosa
tgccaatggagccggcccggcgcatggagttccgcccggagcacagagaaaggagaaaggagaaaggagaaaggaaaacggcgccctggggcgccgtctgcgatcaggccttggcgggcgtcttgttccgcgggcgcagttgcgccccggccagcagcggatcgtcgatgccgctctcggcgcgcatgccggcagcgaagaacggcaccatcaggtgcatcacctgctc

SEQ ID NO: 1289 - DNA, 121 bp, Pseudomonas aeruginosa
gcaatttgaataatttcacctgtcctatcgttcacaactatatatccattaggaggacttccatatactgttgcagagtcattccgccccagcccatctatcgtcttattaggccgacgct

SEQ ID NO: 1290 - DNA, 281 bp, Pseudomonas aeruginosa
catagccttcagggaaacgaagccgaacttcggcaggcgacggtgcagaggctgttgaccaccctcgaagcccggagcgaccttgccaccggagcgggaggtcagacctttgtgaccacggccaccggtcttgcccagaccgctaccgatgccacggcccggacggtgcttttcgcgacgggcacccggcgcggaacgcagatcgttcagttgcatggattaaccctccacacgcagcaggtagtaggccttgttgatcatgccgcggttctcaggagtgt

SEQ ID NO: 1291 - DNA, 153 bp, Pseudomonas aeruginosa
cgcgctgcacctggccgagccagcggtcgctgatgtccagcgcccagtagccctcgggcttgttcatcagcaggcggttctgccgcacgcgcgggcggctggccttgaacagttcggcgtgatcccactgcggatgttcctcgcgcatccggc

SEQ ID NO: 1292 - DNA, 130 bp, Pseudomonas aeruginosa
gctttcagctcggcacgcttcttggcgtacttggctaccgtcagctgacgcttcagctcgcggttcttcatgctctctttagccatgttcctactccaatcagttacggaacgggaatttgaaagcacgc

SEQ ID NO: 1293 - DNA, 130 bp, Pseudomonas aeruginosa; identical to SEQ ID NO: 1292

SEQ ID NO: 1294 - DNA, 281 bp, Pseudomonas aeruginosa
acagagaaaggagaaaggagaaaggagaaaggaaaacggcgccctggggcgccgtctgcgatcaggccttggcgggcgtcttgttccgcgggcgcagttgcgccccggccagcagcggatcgtcgatgccgctctcggcgcgcatgccggcagcgaagaacggcaccatcaggtgcatcacctgctcggtggaagtgttcacgccgaaatcggtttccgccatcgcccgcagggccttgatccccgacatgctgaaggcggccgcgccgagcatgaagtgc

SEQ ID NO: 1295 - DNA, 296 bp, Pseudomonas aeruginosa
tcgaagccgaagatgcgtacgctgccggcgctcggcgcgaggaagccggaaagcatcttcagggtggtcgacttgcccgctccgttggggccgaggagaccgacgatctctccccggtcgatgcggaagctcaagtcgtttaccaccgtccggccggaaaagcgtttgctcagtctgtctatgtcgatcatggtttcactggaagttgagccgtttgctgatatgcgtaggggatcgcatgagcgcggtagattaccgggagttattggctggtttttccagtgggctctttttaa

SEQ ID NO: 1296 - DNA, 95 bp, Pseudomonas aeruginosa
ccgatcgccaataaatccgtcatacaactgttgctcggggtcgtcgctggcggagaaactttcttcgccatatagcgctgtcagtttgtccgccc

SEQ ID NO: 1297 - DNA, 108 bp, Pseudomonas aeruginosa
tcgaaccctgcgggtcgaacagcaccaggtcggcggcctggcccaccgccaggcgcccggcaggcaggcgtagtgcctgggccgggccgtgggagaggcgggcgagca

SEQ ID NO: 1298 - DNA, 281 bp, Pseudomonas aeruginosa; identical to SEQ ID NO: 1294

SEQ ID NO: 1299 - DNA, 230 bp, Pseudomonas aeruginosa
gcttccattgctttctggatggcggccggcacttcacgcgccttgccacgaccgaaaccaacgcgacccttgccatcacccaccacggtcagtgcggtgaaagcgaagatacggccaccttttacggttttggcgacgcggttaacctgaaccagcttctcgatgtagccttcgtcgcgcttttgctcgttgtttgccataacttagaactccagtccgccttcacgagc

SEQ ID NO: 1300 - DNA, 277 bp, Pseudomonas aeruginosa
cgaccccacccttacctttacccatacgaacttcgaggggcttcttggtgacaggcttgtcagggaatacgcggatccagatcttgccgccacgcttcacgtgacgggtcagcgcacgacgcgcggactcgatctgacgagcagtaaggcggccacggctagtggccttcagtgcgtactcaccgaagctgaccttactaccacgatgagccagaccacggttgtggccggtcatttgtttgcggaacttcgtacgcttgggttgcagcatttgcgt

SEQ ID NO: 1301 - DNA, 230 bp, Pseudomonas aeruginosa; identical to SEQ ID NO: 1299

SEQ ID NO: 1302 - DNA, 281 bp, Pseudomonas aeruginosa; identical to SEQ ID NO: 1294

SEQ ID NO: 1303 - DNA, 162 bp, Pseudomonas aeruginosa
gccagcagcggcaacggtagcggcagcagcggtaacgccgaacttctcttccatcgccttgatcagttcgaccacttgcatgacggacatttcggatacggcgttgatgatgtcttcgttggtcagagccatgactctaattcctgtattgggggacggcct

SEQ ID NO: 1304 - DNA, 249 bp, Pseudomonas aeruginosa
ggcattgataagccctcaaacggtcttcaggttagcccgggaccataacagtcaagttacgcccgaccttactcttatcgactcagataaatataaaaacgctattacttcggacgcttggcgccgtacttcgaacgaccctgcttacggtctttgacacccgaggtgtccagcgaaccgcgcacggtgtggtaacgcacgcccggaaggtcctttacacgaccgccacggatcagcactacgctgtgc

SEQ ID NO: 1305 - DNA, 189 bp, Pseudomonas aeruginosa
caagccaacctgaagggctacggcagcggcatgctgcgctgatagacccgtaaggttcgaggagttggtgatgaaagttcgtgcatcggtcaagaagctgtgccgtaactgcaaaatcatccgtcgcgatggcatcgtgcgggtgatctgcagcgcggaaccgcgtcacaagcagcgccaaggctgatt

SEQ ID NO: 1306 - DNA, 281 bp, Pseudomonas aeruginosa; identical to SEQ ID NO: 1294

SEQ ID NO: 1307 - DNA, 159 bp, Pseudomonas aeruginosa
gatccgcctcgccctgggcgcgcgaaatcacctcgtcgcggtaaccgttggcttcttcgatgatgcgctgggcctggccacgtgcctccggcaccacgccgttggcataggcttcggcctggttcttctcgcgctgctcgtcctcgcgggcccggatca

SEQ ID NO: 1308 - DNA, 281 bp, Pseudomonas aeruginosa; identical to SEQ ID NO: 1294

SEQ ID NO: 1309 - DNA, 87 bp, Pseudomonas aeruginosa
tgaactccagctcgcggtacagggcgatcagcgcttcgcgctgcggctcgccgggatacagcttgtcgatctccacgtccagttcga

SEQ ID NO: 1310 - DNA, 303 bp, Pseudomonas aeruginosa
gcaggctcgcgccgagccacaactggtacagcgcgctggccatgtgccgggcatcgcagggcgcgagggagccgtcgtcgcggccctgcccgaggcagccgaccaggcgttcgatgatcccgtcggagccgtcgcgcagggtgatgcgcatgctttccgaaaggtccgcgacctcggcgctgagcttgaccaccaggcagcgctgctcgtcgcagggcgggcaggcgttgtccagccacttctgccagtagctcatcagtcgttcgcgggcattcagccctggcgcggagaagcgttggtcca

SEQ ID NO: 1311 - DNA, 162 bp, Pseudomonas aeruginosa; identical to SEQ ID NO: 1303

SEQ ID NO: 1312 - DNA, 281 bp, Pseudomonas aeruginosa; identical to SEQ ID NO: 1294

SEQ ID NO: 1313 - DNA, 116 bp, Pseudomonas aeruginosa
tcggaagaggcggaagtcaccatcaccaggccgaggccgagcagcgccaggcaacccgccagcagcgggaagtccaggtcgatgccgtgccggctcaacagcggcgacgggaaggg

SEQ ID NO: 1314 - DNA, 88 bp, Pseudomonas aeruginosa
cggccaggccgtcgacccgcgtggcgcgtaacgccgccgctaccgcgcgctcatccgccggcgaccactggcgcaggaacgactggtg

SEQ ID NO: 1315 - DNA, 66 bp, Pseudomonas aeruginosa
cgcaggtcggcttgccccagacgccgacggcggcagggaagggcggtttggaacgcgggttggcgc

SEQ ID NO: 1316 - DNA, 281 bp, Pseudomonas aeruginosa; identical to SEQ ID NO: 1294

SEQ ID NO: 1317 - DNA, 249 bp, Pseudomonas aeruginosa; identical to SEQ ID NO: 1304

SEQ ID NO: 1318 - DNA, 107 bp, Pseudomonas aeruginosa
ccgagccggcggctccactcgcgccagaagccgcggttctgctcctcgtcgacgtggcggcgggttgccggtcccatgccgcgggaaaaatcgctgtagccgagggc

SEQ ID NO: 1319 - DNA, 230 bp, Pseudomonas aeruginosa; identical to SEQ ID NO: 1299

SEQ ID NO: 1320 - DNA, 185 bp, Pseudomonas aeruginosa
gctggaaataccactggccctgctcctgggaggacggtttctccaaggctacgatccgcgcgccgcgcgggttcaggtgttccatgaagcgcttgatggtgccgcccttgccggcggcgtcgcggccttcgaacaggaccaccacgcgctggccggtctccttcacccagctctgcaccttgagc

SEQ ID NO: 1321 - DNA, 183 bp, Pseudomonas aeruginosa
ggtcggcttcggcttcgatgttgtcggtgtattcggcgatgaagtgcggcatggtggcgtcctcagaggcggctggcgcaactggcgccggccgggttgccggcctgggcggcggggatcgccgagccgtcctgggcggtgaccgggaataccgcgttgatctgcccggtgccggaggagccg

SEQ ID NO: 1322 - DNA, 279 bp, Pseudomonas aeruginosa
gccatgaattaatcctctaccttaataatcagcgcagacgcagggagcgttctacgcgcgcaacgtcagacttgttcagcatcgaggtgccgcgcagttgacgcttacgcttggtggtcatcttggtcaggatgtggctcttgaaggcgtgcttgtgcttgaggccaccagcagtcttcttgaagcgcttggccgcgccacttttggtcttcatctttggcatgttcggatactccgcattgagtgattacgcataaccgcaaggcctgccagtgccct

SEQ ID NO: 1323 - DNA, 241 bp, Pseudomonas aeruginosa
ctctagtcgagggatctaggagtaagaatagcttcgaattccctcagtgccgcgcgaggacctgccgggcgctctggcgaatcaccccccagcgcttgggatcgtcctgcagcatggcgccaagcaggtgcttggcctgctcgaaactgatgtgcggcggcagcggcggcacgttcgggtcggtgaccacctccagcagcaccgggcggtcggcggcgaaggcctcggcccaggcggcgtc

SEQ ID NO: 1324 - DNA, 279 bp, Pseudomonas aeruginosa
ctctagtcgagggatctaggagtaagaatagcttcgaattcccgccctcgctcagccgtgccggctcgctcggcgcccgcgccaggccttcgtcgttgcgttcgccacgctcgccggtgacgaactggcgcggctcgacctggatcatcagcagcttgcaggccagcgcgccgttccagaacgcgtattgcttatggctgcggatacccatgcgcttgcccagttccggcgccccggtgaacaccccggcgctccagccgatgcagctctggcgcaggc

SEQ ID NO: 1325 - DNA, 249 bp, Pseudomonas aeruginosa; identical to SEQ ID NO: 1304

SEQ ID NO: 1326 - DNA, 150 bp, Pseudomonas aeruginosa
ggccaaatcgttctatcattatatatggcaccccgaaaaacagcgccatctatcctcgctacatcaatattaacatctcgcaaattggaatttatgaaattagaaccgcctatatcagcattttttagactagccatggaaagatctgcc

SEQ ID NO: 1327 - DNA, 194 bp, Pseudomonas aeruginosa
acaaggctagctgccacaacaaatccatactctgccgctgggcaatatagattgtatagctgagcggactcaccacgaaacgcatataaaacaacggaaccatcaatacagcataacgccccgactcagcccacgcttcgccaaagactaacccaaaggcccactcgccaatgaaccaaaatataataaaagga

SEQ ID NO: 1328 - DNA, 232 bp, Pseudomonas aeruginosa
tcgccgctagccaccatgcagcgcccggctcggctgttgcaccggcatcttgccggtgcgtcggcgctgcctagaatcggccccattcgcacctacccccgcttcgcctacaggagttaccgccatgatgaatgccatgcagatgccgatgaacatgaatgccgccatgccgatgatgcccatgatgggcatgccgatgatgatggcgaccatgcagtgcgaaacgatggac

SEQ ID NO: 1329 - DNA, 198 bp, Pseudomonas aeruginosa
gcgcttcgcccaccttcttcccgcggatctggtcggcgaccaagcgggctttctgggcggagatacgagcgcccgacagcttagcggctacttccatcttccttaccccttaacgcttggctttcttgtccgcagcatgcccgcggtaggtgcgggtagcggcgaactcgcccagtttgtggccgaccatgtcctcgt

SEQ ID NO: 1330 - DNA, 312 bp, Pseudomonas aeruginosa
cattgccttcttttgaaaaaaaatctaggccattgtcaactatttcgacagagttaggattgatcattacttatttctccagatgattcgcccgtcaaccgcccatgcggaatcgttccgatctgcaatttgaataatttcacctgtcctatcgttcacaactatatatccattaggaggacttccatatactgttgcagagtcattccgccccagcccatctatcgtcttattaggccgacgcttatctgaagaactacctgttgcaccttttccgataacatctctaacttcaacctcagtccaccctct

SEQ ID NO: 1331 - DNA, 149 bp, Pseudomonas aeruginosa
tgcccttggcggaaacgcgcagacgtacgaagcgcttctcggactcgacccagaaacggtggtgctgcaggttcggcaggaaacggcggcgggttttgttgtgtgcgtgggaaatgttattcccggtaaccggacccttaccggttact

SEQ ID NO: 1332 - DNA, 279 bp, Pseudomonas aeruginosa; identical to SEQ ID NO: 1322

SEQ ID NO: 1333 - DNA, 227 bp, Pseudomonas aeruginosa
ggccggagtccttgacggtctggacgatgtcgtcctgggccatctgggtcagcgccttgcgcgccgcggcatagccgtccttgctctgatattcctcgagccagacgggctgggcgtcttcgcgcaggcgccaggtcagcggatgggtttccgccgaacgcgccatgcggttggccggaccaatggaggtaagggtcatacgtaggcctccagcagtttggcgacac

SEQ ID NO: 1334 - DNA, 249 bp, Pseudomonas aeruginosa; identical to SEQ ID NO: 1304

SEQ ID NO: 1335 - DNA, 203 bp, Pseudomonas aeruginosa
caccaggttcccggcggcgctggggttggtggcctggaacagggtggtgaaatgctcgtcggccgtcggcgcgacgcaatcggtgagttgcagggtgaaggcggtttcgccggcgctgcggcccactgcgccatcgagggcgctcaccggtacgctgtcgaggatcaccgtggggtcggtgaagccgttgaccgcgacctggc

SEQ ID NO: 1336 - DNA, 201 bp, Pseudomonas aeruginosa
cagatcttgccgccacgcttcacgtgacgggtcagcgcacgacgcgcggactcgatctgacgagcagtaaggcggccacaggctagtggccttcagtgcgtactcaccgaagctgaccttactaccacgatgagccagaccacggttgtggccggtcatttgtttgcggaacttcgtacgcttgggttgcagcatttgcgt

SEQ ID NO: 1337 - DNA, 392 bp, Pseudomonas aeruginosa
ccctggccgatcagcttggccttgatggtgaccggcttggtcacgccgttcagggtcaggttgccggtgatgtcggcgctgtcgccgttggccttcacttcggtggattcgaaggtagcggtcgggttcttgctgacgttgaggaaatcaccgctgcgcaggtgcttgtcacgctcggcatggttggtgtccacgctgttggtgttgatggtcaccttgaccttgtcggccgacgggttcttctcgtcgaaggtgaagctgccgtcgaagtcgttgaagcggccgtacagccagctatagcccaggtgcttgatgcggaactcgatgaaggcgtgctggccttccttgtcgatcttgtagtccgcggccattgcctggccggcggtgaacag

SEQ ID NO: 1338 - DNA, 131 bp, Pseudomonas aeruginosa
cccgataccatgcatcagcctgaggatctagagatggcaagtggtctttttcgttaacgcatataaaaggtcgtagttcagccgccatgacaggatttcccgacaacaaaaaaatcaagagaaaaaaacat

SEQ ID NO: 1339 - DNA, 147 bp, Pseudomonas aeruginosa
tcgatggacggccggtagacgaaagaacgcggttcggcggtgtacaccagcgaaccgttgcgcagcaggcggatgtgattgttggtccccgccagcaggatctgccccggtatcggcggctcgccatcgcgcgccaggcgcaccggc

SEQ ID NO: 1340 - DNA, 86 bp, Pseudomonas aeruginosa
  misc_feature (1)...(86): n = A,T,C or G
tcggcgcgcaccatcaggccgcgcttgccgcttccccggccatcctggccccgctcgccgtgcancgattcgccgatctccccgag

SEQ ID NO: 1341 - DNA, 88 bp, Pseudomonas aeruginosa
gaacaccatgaaggtgccgcgcaggctgtcgacgtggtagaggaaataggtcagccaggcgatcgccaccagcacctgcggctcggtc

SEQ ID NO: 1342 - DNA, 192 bp, Pseudomonas aeruginosa
cgcgagagatggcaaccccttcgtaccaggcgccgatgatcacggcgaacaccgggaaaatgatgaagacaaacgacagcacaacgggactcaaacgcttgagcaggaagaagtacacgatgaatcccccgactgatgccaccagaccgagatagatcagggcagcccaagatcggcttgtgacggcagaca

SEQ ID NO: 1343 - DNA, 92 bp, Pseudomonas aeruginosa
tgggtgatgcgcaccgccgagtcggtcttgttgacgtgctggccgccggcaccggaggaacggtaggtgtccacccgcaggtcggccgggtt

SEQ ID NO: 1344 - DNA, 248 bp, Pseudomonas aeruginosa
gcattgataagccctcaaacggtcttcaggttagcccgggaccataacagtcaagttacgcccgaccttactcttatcgactcagataaatataaaaacgctattacttcggacgcttggcgccgtacttcgaacgaccctgcttacggtctttgacacccgaggtgtccagcgaaccgcgcacggtgtggtaacgcacgcccggaaggtcctttacacgaccgccacggatcagcactacgctgtgc

SEQ ID NO: 1345 - DNA, 122 bp, Pseudomonas aeruginosa
cgccttcgaagatgaccacgtcgtcgcgcagcacgcggatcggacggttgcggtgcaccatgccctcggtgaccatgcagccggcgatcgcgccgaacttcggcgagcggaacacgtcgcgc

SEQ ID NO: 1346 - DNA, 65 bp, Pseudomonas aeruginosa
tacggctgctgaggcccgcccagcgtgcccattcggccgccggccgcggatcgccggggttggcc

SEQ ID NO: 1347 - DNA, 136 bp, Pseudomonas aeruginosa
gactcgaccacgtagcgcgcctcgtcgtgctcgttgaacgcggcgtacaggctcagcgactcgccgtcctcgccgtcggtccacaactccttgcccaggcgtccctggttgttggcgatcagggcgttggcggcct

SEQ ID NO: 1348 - DNA, 98 bp, Pseudomonas aeruginosa
cgcaggcgttccggggcaccgccttcatccaagttcggcacccagcgctgcaggtcgccctccagcagccgcacctgctgcacatggttgagcaggca

SEQ ID NO: 1349 - DNA, 200 bp, Pseudomonas aeruginosa
cagatcttgccgccacgcttcacgtgacgggtcagcgcacgacgcgcggactcgatctgacgagcagtaaggcggccacggctagtggccttcagtgcgtactcaccgaagctgaccttactaccacgatgagccagaccacggttgtggccggtcatttgtttgcggaacttcgtacgcttgggttgcagcatttgcgt

SEQ ID NO: 1350 - DNA, 308 bp, Pseudomonas aeruginosa
tgcgattatccgccattcggcgcgcgtacgcgtgaatgaaaaagcccggcgcgggaccgggcttttttcgtcgctggacgattcagccgtccagcagcgccttgttgcgtaccgcgcccttgtcggcgctggtggcgagcagggcgtaggccttgagcgcggtgctgacgcggcgggcacgcggcgcggccggcttccagcccttcttgtcctgttcggcgcggcgtgcggcgagttcttcgtcgctgaccagcaggttgatcgagcgattgggaatgtcgatcagcaccttgtcgccgtcctgcacc

SEQ ID NO: 1351 - DNA, 207 bp, Pseudomonas aeruginosa; identical to SEQ ID NO: 1248

SEQ ID NO: 1352 - DNA, 597 bp, Pseudomonas aeruginosa
  misc_feature (1)...(597): n = A,T,C or G
gatctactactagcacgcttgaagggggtggttgaggggcggagcgccaatcaaaaaaacaggcataaagctttttcagtattgagaaaaataggtgggtaactacttggatattggtttttctaaaagcatagttgctttagttggttgatagagcgggttttgaagtttttgcagcgagtgttgttgtgttttttttgttatggctggtttgaaattttttgttggtgttttctgtttctagatttaagacggtttctatggccagagtactgattttttttgtggggtggtgaagaaatgctttgtatatcgttaaaaaatggcatttaggaggttatatgggcaagagagtggttgtattgctatggctgctattcacatcaatgtcagcccacgccatcgataaaaaagtcaacaacgtcaccatcatgcgtgtgggctttatggtggacgcganttctccgggtggaggctggggcttcatcgtcagcaagccgggagcggcggattgcggctttggcctgatgcncctgccgccgatgaataccgatgccggcaaggccatgctgtccntgatgctgaacgcccaggcca

SEQ ID NO: 1353 - DNA, 460 bp, Pseudomonas aeruginosa
gatcctctagatttaagaaggagatatacatatgagtaaaggagaagaacttttcactggagttgtcccaattcttgttgaattagatggtgatgttaatgggcacaaattttctgtcagtggagagggtgaaggtgatgcaacatacggaaaacttacccttaaatttatttgcactactggaaaactacctgttccatggccaacacttgtcactactttcgcgtatggtcttcaatgctttgcgagatacccagatcatatgaaacagcatgactttttcaagagtgccatgcccgaaggttatgtacaggaaagaactatatttttcaaagatgacgggaactacaagacacgtgctgaagtcaagtttgaaggtgatacccttgttaatagaatcgagttaaaaggtattgattttaaagaagatggaaacattcttggacacaaattggaatac

SEQ ID NO: 1354 - DNA, 212 bp, Staphylococcus aureus
gatcatatagaatgacatccgcttcacgtattaaacgctcagcctttttcgtcaaataattcggattacctggacccgcacctatcaagtaaaccttgccatattcctctacagacatatatatacgttcccgtctgtaacttctacctcataaacatctacacaaccttcatcaggttcttgaacaatacctgtatttaaatcaatttttt

SEQ ID NO: 1355 - DNA, 425 bp, Staphylococcus aureus
gatcatttgacgaatttcattgttattcaaaattctatctaatcgtgctttttcaacatttaatatcttacctcgtaatggtaaaatcgcctgcgttctagagtcacgaccagattttgtagaccccccggcagagtccccttcgactaagaaaatctcacattcttcaggacttttactagagcaatcggctaatttacctggaaggcttgctacatctaacgctgatttacgacgtgttacttcacgcgcttttttcgcagcaacacgtgcacgtgccgccataatacctttttcaaccactgtacgtgcgacttgtggattttcatataaaaatcgttcaaagtgctctgagaataatttatctacaacttgacgcacttcagaattacctaattttgtcttcgtttgaccttcgaattgag

SEQ ID NO: 1356 - DNA, 257 bp, Staphylococcus aureus
gatcatgtttttaacgtagtcagcgtgtcctgggcagtcaacgtgagcgtagtgacgtttgtcagtttggtactcaatgtgagaagtattgattgtgataccacgttctttttcttctggagcgttgtcaatcatgtcatatgattgtgcaactgagtcaccattttttgctaatacagtagcgattgctgctgttaatgttgttttaccatggtcaacgtgaccgatagtaccgatattggcatgttctttagaac

SEQ ID NO: 1357 - DNA, 136 bp, Staphylococcus aureus
gatcgttagggttcattacagaaccacgaactgttggacggatacctttccatcttgaacgtccggctttaccaacgttaactaattcgtgttgtaggttaccaacttgaccgattgtagcacggcaagtagataa

SEQ ID NO: 1358 - DNA, 243 bp, Staphylococcus aureus
  misc_feature (1)...(243): n = A,T,C or G
gatcgaaccgctgacctcctgcgtgcaaagcaggcgctctcccagctgagctaagcccccaaataggtattaaattaatggtgggcctaagnggactcgaaccaccgacctcacgcttatcaggcgtgcgctctaaccagctgagctataggcccattaatttgaatgaacaaacattcaaaactgaatacaatatgtcacgttattccgcatcttctgaagaagatgtnccgaatatatcct

SEQ ID NO: 1359 - DNA, 257 bp, Staphylococcus aureus; identical to SEQ ID NO: 1356

SEQ ID NO: 1360 - DNA, 216 bp, Staphylococcus aureus
gatcctgtttcttccacatcaaaatctggtattagttctgaaatacctattacgtggtaatctggaaatattactttaaagtcatttattttcccttgattattcgatgcaataacaatctctttcattaaaaatcctcctagtcattcactgatatacgttccacattgacagataaatttaaccactctttgataatgttagtaatgtgagtag

SEQ ID NO: 1361 - DNA, 196 bp, Staphylococcus aureus
gatctactttcacaatctttagcgactgacttaaactcatcaccaactagcaattgttcgacaactaaccgaattgccaaataatccgttaacaaatgttgttcaaagtgatgctgttgtgaacggtaatacaacatacctgcccaacccggtaacgccaaaagatgtccttcaacataagcttggtagtcttcct

SEQ ID NO: 1362 - DNA, 138 bp, Staphylococcus aureus
gatctaagtcattatcttctggatttacaaatgaatagtctgaagcaattaagtaatcactgtataatgcatcgtgatggaatccttgttctacatataaaacattatcttttaggtttttaccgacaacaaaccaag

SEQ ID NO: 1363 - DNA, 280 bp, Staphylococcus aureus
gatcttaatctgattaatacgtatttaccttctttaccaagtacttgagcacttgcaccagctgaacgagcgatttgtccacctttaccaggtttaagctcgatgttgtgtactactgtaccaactggaatgttttgtaatggtaatgcgttaccaactttgatgtcagcttcagcaccactttcaacgatttgacctacttctaatcctttaggagcaatgatatatcgtttttcaccgtctgcatatacaactaaagcgatgtttgctgagcggtttg

SEQ ID NO: 1364 - DNA, 306 bp, Staphylococcus aureus
gatcattctgaggcacaatcgcttcaattgcaggtatcgttacattttgtaattcagcaacttctgcatttgtttgtgttttatctaatttatcagcaaatctgtcaaaatatctacctaaatccgtacgtgcaatttctttcgccgatgcatctgcatctgcatttttaattatttctatttgcttgttaaccacttctctgattgcttccaaagcatttttcttaacttcaggattaatacgttgtgctttaagttgttcaagcgcactatttttgacagtagcgatttctgcatttgtagttt

SEQ ID NO: 1365 - DNA, 193 bp, Staphylococcus aureus
gatcgaaccgctgacctcctgcgtgcaaagcaggcgctctcccagctgagctaagcccccataataattacagtatatcgggaagacaggattcgaacctgcgaccccttggtcccaaaccaagtgctctaccaagctgagctacttcccgtataattaacgcgcccgataggagtcgaacccataacctctt

SEQ ID NO: 1366 - DNA, 156 bp, Staphylococcus aureus
gatcatctattgtcgtttgtgaagctcctgtatcattagttgctgtgttttccagcatttcttcatcttctgaattaaaataatttttcaacaatgtacataattgtgttaaacgcgcttgaccatttgttttcaatccaatatcaaatgcttccg

SEQ ID NO: 1367 - DNA, 413 bp, Staphylococcus aureus
gatcttataaccgaagttgggaaatctcatcttgaggggggcttcatgcttagatgctttcagcacttatcccgtccacacatagctacccagctatgccgttggcacgacaactggtacaccagaggtatgtccatcccggtcctctcgtactaaggacagctcctctcaaatttcctacgcccacgacggatagggaccgaactgtctcacgacgttctgaacccagctcgcgtaccgctttaatgggcgaacagcccaacccttgggaccgactacagccccaggatgcgatgagccgacatcgaggtgccaaacctccccgtcgatgtgaactcttgggggagataagcctgttatccccggggtagcttttatccgttgagcgatggcccttccatgcggaaccaccg

SEQ ID NO: 1368 - DNA, 367 bp, Staphylococcus aureus
gatcctcttttgatttatcactgtctgtagattttgatttatctttagaagcgtctttagatgtgtctttgtctttactttcatcagcattatttttatttgtattcgcgattttattttcttttgtaccattattatgattgtttaatgccatgcctccaaatatcgctaatgcaccgataattagtacagctgcaattaatggtaacaatactttggccatgccaccttttttacgttctttatctctgtcatgattgtcatgttcatcatggttttggcttgcattattagaggcatgtggttttgaagcggcagaagcacttttacttgctgcgcctccagccaaacctgctgttccagcacc

SEQ ID NO: 1369 - DNA, 257 bp, Staphylococcus aureus; identical to SEQ ID NO: 1356

SEQ ID NO: 1370 - DNA, 120 bp, Staphylococcus aureus
gatctttagttactgtagcaactttagttttgtttggttcgcctgaacctttttcaataccagctgcttttttaagtaatactggagccggtggagtttttgtaataaatgtaaatgaac

SEQ ID NO: 1371 - DNA, 425 bp, Staphylococcus aureus; identical to SEQ ID NO: 1355

SEQ ID NO: 1372 - DNA, 257 bp, Staphylococcus aureus; identical to SEQ ID NO: 1356

SEQ ID NO: 1373 - DNA, 136 bp, Staphylococcus aureus; identical to SEQ ID NO: 1357

SEQ ID NO: 1374 - DNA, 213 bp, Staphylococcus aureus
gatcgaaccgctgacctcctgcgtgcaaagcaggcgctctcccagctgagctaagcccccataaaatggaatttaagaagtaatcgggaagacaggattcgaacctgcgaccccttggtcccaaaccaagtgctctaccaagctgagctacttcccgttattcaattaatttaaaaatggcgcgcccgataggagtcgaacccataacctctt

SEQ ID NO: 1375 - DNA, 213 bp, Staphylococcus aureus; identical to SEQ ID NO: 1374

SEQ ID NO: 1376 - DNA, 213 bp, Staphylococcus aureus; identical to SEQ ID NO: 1374

SEQ ID NO: 1377 - DNA, 255 bp, Staphylococcus aureus
gatcgaaccgctgacctcctgcgtgcaaagcaggcgctctcccagctgagctaagcccccaaataggtattaaattaatggtgggcctaagtggactcgaaccaccgacctcacgcttatcaggcgtgcgctctaaccagctgagctataggcccattaatttgaatgaacaaacattcaaaactgaatacaatatgtcacgttattccgcatcttctgaagaagatgttccgaatatatccttagaaaggaggt

SEQ ID NO: 1378 - DNA, 120 bp, Staphylococcus aureus; identical to SEQ ID NO: 1370

SEQ ID NO: 1379 - DNA, 246 bp, Staphylococcus aureus
gatctccagttggaatacgaatcgtttgaacgtactcacattcaaaatgaactggcgattcttttacacgatatcctggagcttctatacatttttcctttgttacacctgcaaaattaaattcatcctcttctggtggcaatgctttcgatgataaattaactgcttctcttaaatcatacgttgccatattccacacaaaccaacctgtctcttcagcatttttcactgtatctttacgttcgt

SEQ ID NO: 1380 - DNA, 145 bp, Staphylococcus aureus
gatctgttagcgtactaaatctggcagttaaataacttggtaaccaaccagccattaatgcaatgacaaatactactaagaatcctagcactgctggtataccaaatcttaggactttgtttaccccaattcctgaataaaaaat

SEQ ID NO: 1381 - DNA, 318 bp, Staphylococcus aureus
gatcttttgtgatttcttcttttggttcacctttactaataattactccagttaatggattttttagtgttggtgtcgttattgtcttctcacctttttgtccttctcttgttactttttctgtccctggtgctaaatcaggattaaatttacgttctttctcgaatggaatctcttctttttctacaatcgagtctccttttacaggtccatattttgttacgctatcgaccggtggtctaactacatctcctgtttctggattcttaattcctggtttacctggaacttcctctttctctcctgttggtaacttcg

SEQ ID NO: 1382 - DNA, 356 bp, Staphylococcus aureus
gatcttttcattcttggtttaatttctgagacgttacttggttgagctatgtcaacttgagttcctgtagtttccttatcagcaactttttccgatggcaaatcaactcgcgaagtttctacttttggtgcttgcacagttttcggtgcttcttctgttgttacttgtgttgattgtgatggttgctcagttgatgtcgcgctgtatgattgtgtttcatctattgtattaacgttatttgtagttgtttgtgtttcgcttgctttactttcagtagctgaactcccactttcctctactgtagtattgttttgttccgatgctgcagcttctttttcttgtcccattccaacaac

SEQ ID NO: 1383 - DNA, 136 bp, Staphylococcus aureus; identical to SEQ ID NO: 1357

SEQ ID NO: 1384 - DNA, 240 bp, Staphylococcus aureus
gatcaacttcaattaaatgatgcataaccgcaatttcaggtaacacttcttttacagtagcacttaaatgaccggcaccacttgcaatatcaacaatatgtaattcttcttggttgttcataaaacgctcaactaaaaatcctagtatcaatccaattgaatctggtgtaatttgatgatttgcttgtatcttttcttcctgcattaaacttaaatatgcaaattggaatgctttacgtc

SEQ ID NO: 1385 - DNA, 257 bp, Staphylococcus aureus; identical to SEQ ID NO: 1356

SEQ ID NO: 1386 - DNA, 196 bp, Staphylococcus aureus
gatcttaattattttaagttatcatatttatttgtaatgacagtcattaagtcatcaatgtgaacttcttcgctatcacctgttaaacgttctttaacttctacaataccttccgatgcacgtttaccaacaacaattcgcagtggtaaaccaattaaatcggcatcattaaatttaacacctgcacgttcctgac

SEQ ID NO: 1387 - DNA, 309 bp, Staphylococcus aureus
gatcttccatcgttttttcaccacgaagacgtgcatagttaactaaccaacgtaaacctaaagtagtacgacgctctggacgaacttctactggtacttgatagttagaaccacctacgcgacgagctttaacttctaatactggcataatgttgttgattgcttcttcgaatacttctaatgcatcacgaccactgcgttgttcaactaggtcgaatgctgaataaagaattctttgtgctgttccacgtttaccatctaacataattttgttaattaatttagttactaacttagagttatgaattg

SEQ ID NO: 1388 - DNA, 475 bp, Staphylococcus aureus
gatccattactccagttgcttttttctcaactggtcttgtttttgttgcgttgataggaccttgtccatcgataggttgacctaatggatttactactcgtccaattagttcgtcacctacaggtacttccataatacgtcctgtacgtttaacttcgtcaccttcactaatatctgtgtatggtcctaagataaccacaccaacattagattcttcaaggttttgtgctaaacctagcacgccgttttggaattctactagctcaccagccataacgtcatttaatccgtgaattaatgcgataccatcaccaatttgtaatactgtaccaacatctgttacggacatttctgactcataattctcaatttgtgagcgaagtaatgcactgatttcttcagcttttatggccatctatgtcactcctctttattaattagtttgctcttttaaatttacgttgtaattgaataa

SEQ ID NO: 1389 - DNA, 318 bp, Staphylococcus aureus; identical to SEQ ID NO: 1381

SEQ ID NO: 1390 - DNA, 90 bp, Staphylococcus aureus
gatcttcacctaaaatagcatttactaaacttgatttacctacgtttggtcgtccaataatggatagtcgaattgtatcttcatcataag

SEQ ID NO: 1391 - DNA, 318 bp, Staphylococcus aureus
gatcttttgtgatttcttctttcgattcacctttactaataatttctccagttaatggattttttagtgttggcgtcgttattgtcttctcacctttttgtccttctcttgttactttttctgtccctggtgctaaatcaggattaaatttacgttctttctcgaatggaatctcttctttttctacaatcgagtctccttttacaggtccatattttgttacgctatcgaccggcggtctaactacgtctcctgtttctggattcttaattcctggtttacctggaacttcctctttctctcctgttggtaacttcg

SEQ ID NO: 1392 - DNA, 447 bp, Staphylococcus aureus
gatctaattcaccttcatgctcaacgccgttctcttcaactagacgacgaacaagaatttcattagattcaacatgttcaacacgacctctgtgcttagctgtaatagccgcaccagaatcacgtgctgcaacgtgttccatacctgtaccaacaaatggtgcttctggattcatcaaaggcactgcttgacgttgcatgttcgcacccatcaatgcacggtttgagtcatcattttctaagaatggaatacatgctgtcgctgctgaaacaacttgcttcggcgatacatccatataatccattttttctttagccataactgtattgttaccacggaaacgacatacaacttcatcatccatgaaacgaccattttcatctaatttagagtttgcttgtgctacaacatagctatcttcttcgtcagctgttaaatagtcaattt

SEQ ID NO: 1393 - DNA, 474 bp, Staphylococcus aureus
gatcctctttatctactttagtagcagtgccatcgcctgcattttctgctttagtatccgtcttagcgtctgttgatgtattcactccagcaaccttcgaatctttactgtcagctttatcttcagtaacagcattcttttcaactttatttgttgattcagctaatgcttttgcttgagaggcttgcgcttcttggatagcctcttgtgatgtttggatggcttttaaggattcgctatttgaatcgattttagatgtaagttgattttgaagttcttttaattcttgttgttgctgatgtacttgattcatcatttgaccaagtaggtgacgttcttcgcgcattttctggatttctaggcgtaaatcttctactagttgagcgacattttgattagtaggtaagtttttgtcatcgtttttgacaatgacttgcaggaagtctttttctttttctaattcatcaaacgcta

SEQ ID NO: 1394 - DNA, 152 bp, Staphylococcus aureus
gatctaattagccaagtacctttatcatcttttttaaattcgccatctcgatatccttctttgtcgtataaatcctcgagattcttaatagggtagatatctaacgttttcgcaaagctctttttgatttgttcttcttttgaatctccaat

SEQ ID NO: 1395 - DNA, 208 bp, Staphylococcus aureus
gatcgctatctctaattacttgataagcatctaaccaactatcagccacaatttcatcatataaccaagcacgcaatgcttcaaataatgtaattttggtttgcttagcatgttgcattagtgacaatgggttaacttcatggtattgaggaatgttagtaatttccaattggttgaacaatgattgaatttgatttaaaaatgggct

SEQ ID NO: 1396 - DNA, 257 bp, Staphylococcus aureus; identical to SEQ ID NO: 1356

SEQ ID NO: 1397 - DNA, 152 bp, Staphylococcus aureus
gatcgaaagcttgcgctgtaaatggtaagatttctttgttaattaatgacataaatatcttcctcctaagaatttaagtatgaattagaactatcaattgattgcgcttaattataataattctaatctcttagttagcattattacatttt

SEQ ID NO: 1398 - DNA, 246 bp, Staphylococcus aureus; identical to SEQ ID NO: 1379

SEQ ID NO: 1399 - DNA, 179 bp, Staphylococcus aureus
gatcttttacgtcttttgtgaaaacgattttattattaactacttttactggataacttttgtatgtcgagtcagtagcattttttctatcgtttgtagttgtgtcatattcaccagttattttatgtgtgttcttatctacctttaacaacatacggtcttcttttaaaagctcatct

SEQ ID NO: 1400 - DNA, 507 bp, Staphylococcus aureus
gatcaaattgagaaatttgatatgcttttggattatctggatagaaatagttcttacggtcaaacttagattctgttgcgatttccatatttagtgccattgcagcacgcattgcccagtctactgcacgcttattaacaactggtaagacacctggatatgctaagtcgataacatttgtatttgagttaggttctgctccaaaatgcgctggtgatggagaaaacatttttgagtccgtttttaactctacgtgaacttcaagtcctataactgtttcaaaatgcatgatttccactccttataatttttcataaacgtcatgtaaattgtattgtgtttcatattgataagcgacacgatataacgttttttcatcgaatggtttaccaatgaactgtaaaccgattggtcggccatttgattgtccacaaggaacagaaataccaggtaatccagctaagtttactggtgttgttaataaatcattggcatacattgttaatg

SEQ ID NO: 1401 - DNA, 278 bp, Staphylococcus aureus
gatccacctgatgaaccacctggcactgctttatggtcaaatgggttaactgtttttttgaaataagatgtttctgttgaaccacccattgcaaactcatccatatttaatttaccgattaaaacggcattttcattatgtagttttttccattacagtagattcgtaaattggcacaaaaccttctaacattttacttgcacatgttgtttctaatccgtttgtaataatgttatcttttatacccattggaataccaaataatttgccatccattt

SEQ ID NO: 1402 - DNA, 255 bp, Staphylococcus aureus; identical to SEQ ID NO: 1377

SEQ ID NO: 1403 - DNA, 249 bp, Staphylococcus aureus
gatccgcttcaacaaggacttttaagtttactggatggtccgattcatcatatggtgcaccataatacaactgtgccgcttcatcatattttacttcaccgacttgttcatccatcatatgtttgaatatatagttagtcgttgacagtacttcttttcgagaacggaagttttgcgacaaatcaattcgacgtccagtgccatctccatctatagtaaagcgttgatacttttcaataaataaacttg

SEQ ID NO: 1404 - DNA, 102 bp, Staphylococcus aureus
gatcaacacaatattgtaatactgcctcattttcgcgatgcaataaattatattctaactgtacaacatcaacgtaaccatctttatttgcttctttaagtt

SEQ ID NO: 1405 - DNA, 479 bp, Staphylococcus aureus
gatctcttggtaaacagtgacattttcttcaatcggcgtatgattgtttgtggcaccgaccatcgatgaaacgattgaaaaatcttcaatgtcacctacagctttaagtccgagcacgcaggcacctaagcatgaactttcataactttcaggaaccactaactctgtgtcaaatatatctgacatcatttgacgccatacttcacttttcgcaaaaccacctgttgcttttatcatcttaggtgtttcattcattacttcaataagcgcaagatagacggtatacaaattgtaaagaacaccttctaatgcagcgcgaatcatatgttcttttttatgagataaagttaaaccgaagaatgaacctcttgcatttgcgttccaaagcggcgcacgttctcctgctaaatagggatggaatattaaaccatctgcacctggtttaacacgctttgcaatttgagttaagacatcataag

SEQ ID NO: 1406 - DNA, 318 bp, Staphylococcus aureus; identical to SEQ ID NO: 1391

SEQ ID NO: 1407 - DNA, 228 bp, Staphylococcus aureus
gatcgaagtacatagtgtaagtaccgcgaccttgagtgtttgaacgtaatgatgttgcataaccgaacatttctgaaagtggtacataagcattaacaacttgtgcattaccacgaggttccataccatcaacacgtccacgacgagatgttacgtcacccatgatatcacccatgtactcttcaggcatttcaatagttactttcatcattggttctaagattacag

SEQ ID NO: 1408 - DNA, 246 bp, Staphylococcus aureus; identical to SEQ ID NO: 1379

SEQ ID NO: 1409 - DNA, 138 bp, Staphylococcus aureus
gatcaattacgatttgaggcaggtcttcaccatacagtttacgcgcatttgcataacttagttctctaatttcttcgttagcaccttccatacgcggtgtgtataattcatctttaataggaacaacacgttcaattc

SEQ ID NO: 1410 - DNA, 230 bp, Staphylococcus aureus
gatcttacctgatggtgcagccatcaatccacgcatacctgctaactgtgtaaagttagatgcgttaccacgggcaccagagtcactcatcatgaagattgggtttgttttttcaagtgattgcattaattcaccttgaatttggtccttagcatctgtccaaatttcaacgacagcattgtaacgttcttcttcagtgattaaaccacgattgaattgtttagttacac

SEQ ID NO: 1411 - DNA, 410 bp, Staphylococcus aureus
gatcaataaatagatttaaagataattcagcagttaaatctttcttttcttgtacatattctttaaacgtatatctaacttttctttctccaattatttctcctgtcgccataacttgaccatctgtactttttatctccggaactttacgcagtgttgagataccatgagtttcaacattatcgcttaatgtgaaatcaaaataatctcccgccttaattccttctccaaatttccatttatatttcaaggttactctttctgcgttatgaggatttacaacattcgtatcttgtttatgtcctacaatttcactaccttcttctacttccactttatttgttacatctgtacctgtcgctttagtttcttccactacttctttctctgcaactgctgtaacgtcagtt

SEQ ID NO: 1412 - DNA, 213 bp, Staphylococcus aureus; identical to SEQ ID NO: 1374

SEQ ID NO: 1413 - DNA, 367 bp, Staphylococcus aureus; identical to SEQ ID NO: 1368

SEQ ID NO: 1414 - DNA, 257 bp, Staphylococcus aureus; identical to SEQ ID NO: 1356

SEQ ID NO: 1415 - DNA, 255 bp, Staphylococcus aureus; identical to SEQ ID NO: 1377

SEQ ID NO: 1416 - DNA, 206 bp, Staphylococcus aureus
gatcaataatctgtcctaaaaaatcattataacttacaacatctaatttcaattgatgtgcacgtactatttcttcatggctactcgcgaatgcattaccttgtataactaccatatcttcttttatgttattagcatcaaatggtaatatttttatccccttatttctaagagcaacttctgtaaatacgtagttctcaatatcc

SEQ ID NO: 1417 - DNA, 257 bp, Staphylococcus aureus; identical to SEQ ID NO: 1356

SEQ ID NO: 1418 - DNA, 257 bp, Staphylococcus aureus; identical to SEQ ID NO: 1356

SEQ ID NO: 1419 - DNA, 413 bp, Staphylococcus aureus; identical to SEQ ID NO: 1367

SEQ ID NO: 1420 - DNA, 228 bp, Staphylococcus aureus; identical to SEQ ID NO: 1407

SEQ ID NO: 1421 - DNA, 213 bp, Staphylococcus aureus; identical to SEQ ID NO: 1374

SEQ ID NO: 1422 - DNA, 379 bp, Staphylococcus aureus
gatccaccaaagctgataaatggcaatggcacaccagttaatggaattgttgccgaaataccgccaatgtttacaaacgtttgacttccaaagtatgtggcaatcccaacacacacaagtttataaaaatatgatgatgttttatttgcaaactggaaggcacgatatacaataaagaactctaaagtaataactagcaatcctccgattaaacctaattcttcgcaaataattgcaaaaataaaatctgtatgtggttctggtaaatagcccaatttcattgcactatttcctaatccttttccaaatacgccaccgttacctatcgcaagcaatgaattggaaatatggtatccagttcctgattcgaattggaatg

SEQ ID NO: 1423 - DNA, 255 bp, Staphylococcus aureus; identical to SEQ ID NO: 1377

SEQ ID NO: 1424 - DNA, 257 bp, Staphylococcus aureus; identical to SEQ ID NO: 1356

SEQ ID NO: 1425 - DNA, 318 bp, Staphylococcus aureus
gatcttttgtgatttcttctttcgattcacctttactaataatttctccagttaatggattttttagtgttggcgtcgttattgtcttctcacctttttgtccttctcttgttactttttctgtccctggtgctaaatcaggattaaatttacgttctttctcgaatggaatttcttctttttctacaatcgagtctccttttacaggtccatattttgttacgctatcgaccggtggtctaactacatctcctgtttctggattcttaattcctggtttacctggaacttcctctttctctcctgttggtaacttcg

SEQ ID NO: 1426 - DNA, 454 bp, Staphylococcus aureus
gatctatgctcagcagcactttcaattgtaggttcgaaatcagctacttttttcaacaattcaatcgctttttcattagtaatcgttgtaaaatcattcgcagcagtcacttcaataccttgctctttcgcttgttttaaaattgaacaaatacgcgcatgtgcatattgagcatagtaaactggattgtcttgagattgctctttcgctaattccatatcaaaatcaaagtgactatcaggactacgcatagttaagaaataacgtgcagcgtcaacgccaacttcgtccataatttctcttaatgtaatcgcattaccagtacgtttactcatcttcacttctttaccattttccattaaacgaaccatttgcatgatttgaatttctaaacgattactatctacaccaaacgtttcaagagatgctttcaaacgattaatataaccatgat

SEQ ID NO: 1427 - DNA, 383 bp, Staphylococcus aureus
gatcggacgtccatctggtaagtaaggcatatcttcttcaggaacaatcttagaaatgacacctttgttaccatgtcgaccacacatcttatcaccaacatgaattttacgtttttgaacgatatatacacgtactaattggtttacaccaggtgataatgtatcgtcgccttcttcacgattgaatacttttacatcaagaacgataccgccagcgccgtgaggtacacgtaatgaagtatctctaacttcacgtgctttttcaccaaagattgcatgtaacaatctttcttcggcagttaactcagttacacctttaggcgttactttaccaactaaaatatctccatcttttacttctgcaccaatataaacgataccac

SEQ ID NO: 1428 - DNA, 138 bp, Staphylococcus aureus; identical to SEQ ID NO: 1362

SEQ ID NO: 1429 - DNA, 266 bp, Staphylococcus aureus
gatctaaatcattaaccttaataacaatcccatcaatatcataaggtaatgactctctttggcttgtccatttttcaatatactctaaaacaccatcgatattatttacacgcgctctatttttattcgttgtaaaacctaatttatctaactcatctaatgcttcactttgcgaacgcgcattgaaatcagtgaaatcattgacactatatataaatacgcttagctttcgttttgccgttaatttagaatctaactgtcttaat

SEQ ID NO: 1430 - DNA, 257 bp, Staphylococcus aureus; identical to SEQ ID NO: 1356

SEQ ID NO: 1431 - DNA, 255 bp, Staphylococcus aureus; identical to SEQ ID NO: 1377

SEQ ID NO: 1432 - DNA, 399 bp, Staphylococcus aureus
gatctttagcaaatccagaaattactttcgctgcagctacagcatcttcacttgaagttgcaatagcagtaggacctgttaagaattcatctaagccttcgataccagctttttcagctgcacgacgtaccatagtgtttttgtatactttatactcaacaccagcttcacgtaattgtgaacgtaagtcagtaacttcagctactgttaatccacggtagtcaacgattactgttgaaactgaatttgatagtacctcagcaatttcatcaactagttgttttttagcttcaatgatagcagacattcagacacctccatttaaatttttggtgctttttttaaaattaataaaaaaagcactttctacccacggcaaaaagtgcttgaaagatcata

SEQ ID NO: 1433 - DNA, 379 bp, Staphylococcus aureus; identical to SEQ ID NO: 1422

SEQ ID NO: 1434 - DNA, 341 bp, Staphylococcus aureus
gatcttttcttaagtgatattcctcatctgctggtgttaacacttctgattcatcaatatagtcaacacccatcgcctctaatactcttgcttcagtgatatgaccaatacgtgctttagccatgactggaatagaaacagcattcattacttcttctacaattttagggtttgccatacgtgcaacaccaccagcagctctaatatcagaaggtactcgttctaatgccataactgctaccgcgccagcttcttctgcaattcttgcttgctcagcattaacgacatccataataacgccgcctttttgcatttcagccatacctcttttgactctgtct

SEQ ID NO: 1435 - DNA, 249 bp, Staphylococcus aureus; identical to SEQ ID NO: 1403

SEQ ID NO: 1436 - DNA, 243 bp, Staphylococcus aureus
gatcaattaactcaacaaatttaaatgttccattgtcatattcaaatttcaggatattacaattaccgatattatgctttaatgcttcatctagtttaaggcaatatcttaaaaatactcccattattgttccatgactcacgactaatgcattattctttgtttgagacataatgtcatgtaaagttttcacaatgcgttcttcaacttgttgccttgcctctcctttgaaaggaacaattc

SEQ ID NO: 1437 - DNA, 253 bp, Staphylococcus aureus
gatcatattttgatgtggagcatgtcctttattaaacttaataacccattggtacccgtctccagtttgtttcgctgtcataagagcaatttcctttgagtcagaggccttcaatgtattccatggtgtagttggtaaattatatggcgcccctttactagaagcattgatatatgtaccaacaggatagcccgaaccatcattagcattttcaacataatatgatgaatttgcattttgatagtctgatact

SEQ ID NO: 1438 - DNA, 135 bp, Staphylococcus aureus
gatcattctcagaataacgtacttggaaatgatactgattatattctatttcaacggatttcactctatctaattgctttaaaatgtttggaaatacttcatttacagattcagaaatgacattcgcttccatat

SEQ ID NO: 1439 - DNA, 216 bp, Staphylococcus aureus
gatcaaaaatagcaccttcaatcactatatttgatgtttgttctttaacttctgaaaaatcgccacccataacaccagctaatgcaattggagtttgtccattagtaatgacaatatcgctcgttaataattcacgttctgtatcatctaatgttgtcattttttcgccttcattagcttgacgaacaacaatttgttgtgaaccaatcgcatctt

SEQ ID NO: 1440 - DNA, 257 bp, Staphylococcus aureus; identical to SEQ ID NO: 1356

SEQ ID NO: 1441 - DNA, 257 bp, Staphylococcus aureus; identical to SEQ ID NO: 1356

SEQ ID NO: 1442 - DNA, 193 bp, Staphylococcus aureus; identical to SEQ ID NO: 1365

SEQ ID NO: 1443 - DNA, 321 bp, Staphylococcus aureus
gatcatctatagctactgcaaaattgtacgttggaatgccatctttttttacgataacccagtcaccaataccatttgaatcaaatgaaatatttccttttaccatatcatcaaatgaatacgtttggttttgaggtactcggaaacgaattgatggttggcgtccttctgcttcaaattgttgacgttgttcttcagtcaaatgcgcatgttgaccaccatagcgaggcatttcaccacgagcgatttgcgcttcacgttcagcttctaattcttcttctgtcatatagcatttatatgctttatcttctgctagtaact

SEQ ID NO: 1444 - DNA, 226 bp, Staphylococcus aureus
gatcgttctactgtcgtacctcgctttaaagccaagcgcacttttgaacgatttcggcgttcaaaactatttaataactcatcatcatttttatcaattggtgtaatcatagtcatacgtggttggatgtagtcttttgataaaccttctttaaatcctttatgtttaaaaccaagcgctttcaaattttgcaaagcatctgtacctttatcaacttcaacatcag

SEQ ID NO: 1445 - DNA, 276 bp, Staphylococcus aureus
gatcatcacgcgtttgccatggtatgccaagtgactgcgataaatctgcggcaccttcgactatcatgtctaaaccttcgacttgtgctatatcgtcaatggccataaccccttcaacatcttctatcatggcaatcaccataatatgctcattagccatctccattgcatcaagtaatggtgtacgtccaaatcttgccatgcgaccaccattcaaacttcttaatccttgcgggtaataacgacttaatttcacaatatgctcaactgtctcac

SEQ ID NO: 1446 - DNA, 213 bp, Staphylococcus aureus
gatcactgttaaagtcagtcattttaaacattctttcaatagcattaccacttaccacataagcaccatcatcatctcttgaaattgtaaatttatcttgtgacggtgtatgtttatataatactcggttaatgccaactgactcctcttcttcaactgtgaagtcaacatctttatattcttctaatttatctgctattgcatataataatt

SEQ ID NO: 1447 - DNA, 257 bp, Staphylococcus aureus; identical to SEQ ID NO: 1356

SEQ ID NO: 1448 - DNA, 60 bp, Staphylococcus aureus
gatcgatacctaaacgctttagtgaacctttaactgcctctttaatataggatttactcg

SEQ ID NO: 1449 - DNA, 257 bp, Staphylococcus aureus; identical to SEQ ID NO: 1356

SEQ ID NO: 1450 - DNA, 257 bp, Staphylococcus aureus; identical to SEQ ID NO: 1356

SEQ ID NO: 1451 - DNA, 360 bp, Staphylococcus aureus
gatctgtcacgtgaacttgtaataccgcttctcctgtttcagaaatcagcttaacttctgcaccttcatgaatgcctctatcttcagcaagctctggagaaatttcaacaaatgcacgtggcactttgtatttaatcattggtgtttgataagtcatattaccttcatggaagtgctctaacaatcgaccattgtttacatgaatatcataaatttcatcttgcttaaagtaattatcaaatgataatgggaataattttgctttaccattatcaaaattgaatccttctaagtatagaataggctcatcagtaccatcaggttgtactggccattgtaaactattgaatccttctaaac

SEQ ID NO: 1452 - DNA, 228 bp, Staphylococcus aureus; identical to SEQ ID NO: 1407

SEQ ID NO: 1453 - DNA, 479 bp, Staphylococcus aureus; identical to SEQ ID NO: 1405

SEQ ID NO: 1454 - DNA, 255 bp, Staphylococcus aureus; identical to SEQ ID NO: 1377

SEQ ID NO: 1455 - DNA, 138 bp, Staphylococcus aureus; identical to SEQ ID NO: 1362

SEQ ID NO: 1456 - DNA, 257 bp, Staphylococcus aureus; identical to SEQ ID NO: 1356

SEQ ID NO: 1457 - DNA, 318 bp, Staphylococcus aureus; identical to SEQ ID NO: 1425

SEQ ID NO: 1458 - DNA, 193 bp, Staphylococcus aureus; identical to SEQ ID NO: 1365

SEQ ID NO: 1459 - DNA, 255 bp, Staphylococcus aureus; identical to SEQ ID NO: 1377

SEQ ID NO: 1460 - DNA, 246 bp, Staphylococcus aureus; identical to SEQ ID NO: 1379

SEQ ID NO: 1461 - DNA, 306 bp, Staphylococcus aureus
gatctgctaacacttcgtctgtttcaacatttttaataattgtaccaggtggaacttttaatactaaatcttccgcatttttaccatgcatattactactttggccattttcacctttgcttgctttaaaatgacgttgatatctaaaatctaataacgttcttaaaccttcatccacttcaaatacgactgaagcacctttaccaccgtcaccgccagctggtccaccaaatggtacatatttttctcttctgtatgcggtaataccattaccaccatcaccggctttaagagatattttgactt

SEQ ID NO: 1462 - DNA, 395 bp, Staphylococcus aureus
gatcaataaataaattaatttctagttcagccgttacatcaaccttatcttcaatatcatttgtaaatgtatatctaatctttccaccttctaaaacttcacctgtcgccattacgactgaaccatttttaatttctggtacttttctagcagttgatacgccatgcgtatttacattatttgataaagtaaagtcaaagtagtcaccttgatgtaaaccattctcaaatttcaacttatattttagtaccgctcgttgtcctgcatgaggttctactttatttgtattgttatgcccctcaatagaaccaatttctactgtaactttacttgttacatctgtacccgtttccactttcgcgttactagcttccttagcttccgctacatctgct

SEQ ID NO: 1463 - DNA, 387 bp, Staphylococcus aureus
gatcttcttcctcttcaccaaaatgagaaacaactgcatctaacaagtcaccaagacctaaaccatgtgaccctgatatcggatacggttcaccaaatcctaatgaatagaaatcatacacgtctgtacgcatttccatattatctactttgttaaccgctaatacgaccggttttttagatttgtataaaatttgagcgaccatttcatcgctttgtgtcaatccttcacgcacgttaaccataaaaataataacatccgcttcatctatggcgatttctgcctgcgctctaatttgtgtttggaatggtgcatcaccaatttcaataccacctgtatcaataatattgaaatcatgtgttaaccattcacctgaagaataaatac

SEQ ID NO: 1464 - DNA, 170 bp, Staphylococcus aureus
gatcaattcaccatataactgttcagtatctttatttttagactgctcatattcttcaatcaacttcgctaatttattttgatatttgtgcaactgctgttgaacaaatcgaactaaatcattcgcacgttgtttaacgcgttcacgttcgccacgcgcatcataaaaac

SEQ ID NO: 1465 - DNA, 205 bp, Staphylococcus aureus
gatctgttgaacagtcatcaactacaaccacttcaaattcagttttcggaaaatcttgtttcgcaaggctattaagtaattctgttatatacttttctgaattgtatgttggaactattactgaaaatttcatcattatacctctcccactttgactactatataaacttagctaccaaataaatttctgactaaacgctcactt

SEQ ID NO: 1466 - DNA, 213 bp, Staphylococcus aureus
gatctgcatattctgtgattttaagtacccattgtttcatcggcttacgataaactggatgtccaccacgttcagagacaccatcaatcacttcttcgttagataaaacagtgcctaatgctggacaccagttaactgcaacttcatcaacgtatgctaaacctttgttatataactgtatgaaaatccactgtgtccatttatagtattctg

SEQ ID NO: 1467 - DNA, 213 bp, Staphylococcus aureus; identical to SEQ ID NO: 1374

SEQ ID NO: 1468 - DNA, 317 bp, Staphylococcus aureus
gatctgcatttactcctaataattcaataatgaattgggtacctgaaattactttactttctctaatttcatacttgccatccaccatctcaaatacatcaaatttagcgttcgtttttgttgtattaccttctttgatataagggccttgtctatgcactttataaattcgatgatttaattgaaattcaaatgttactgacatcggctgtttaccatcagcgaaatgacttctcaaatcattttcttctctttgttcagttgatgctttaccaaacaaggcataagtcattgcatcaaaaatcattgttttaccc

SEQ ID NO: 1469 - DNA, 121 bp, Staphylococcus aureus
gatctatggcagattggctacttatttcttttatagccatttacttccaccttacttttgttctttttttgataattcaacaagttctttagccatttcttcagaagaaattaagccacga

SEQ ID NO: 1470 - DNA, 145 bp, Staphylococcus aureus; identical to SEQ ID NO: 1380

SEQ ID NO: 1471 - DNA, 246 bp, Staphylococcus aureus; identical to SEQ ID NO: 1379

SEQ ID NO: 1472 - DNA, 318 bp, Staphylococcus aureus; identical to SEQ ID NO: 1381

SEQ ID NO: 1473 - DNA, 255 bp, Staphylococcus aureus; identical to SEQ ID NO: 1377

SEQ ID NO: 1474 - DNA, 215 bp, Staphylococcus aureus
gatcactgatgagtcagtgatcttatgcagataaaactttacggcctttacgacgacggcgcgctaaaactttacggccattttttgtgctcatgcgttttctgaaaccatgaactttactatgtttacgtttatttggttgataagtacgttttaccatgcaaaacacctccatctttatacagttatctaatataccagattatgcagactct

SEQ ID NO: 1475 - DNA, 255 bp, Staphylococcus aureus; identical to SEQ ID NO: 1377

SEQ ID NO: 1476 - DNA, 340 bp, Staphylococcus aureus
gatctccgctattgtcttgagattgtgttgtttccttaacttgaggtttcgcttcttccttaactacctcttctttaactgtttctatatttgctggttgtgcagtttgtggtgcttgtactgcttttggtgcttcttcagttgttacttgtgttgcgtttgacggttgttctgttactgttgcgttatatgattgagtttcttctatatgattaacgttagttgcagttgtttgtgtttcacttgttttattatcagtagctgaattcccattttcttctactgtagttgtcttttgttctgatgctgcagcttctttgtcttgtcccatcccaacaac

SEQ ID NO: 1477 - DNA, 318 bp, Staphylococcus aureus; identical to SEQ ID NO: 1425

SEQ ID NO: 1478 - DNA, 458 bp, Staphylococcus aureus
gatcgttatctatattttgtgattcttgacgtctttttttctttctatgaatcaagtcatcatttgaatcattatcttcgccgaataatttatcaaaccagctcatattttcactaccttccttaattattcaaaaaatgcttgtccaatttcatagctgtcatttaataccataatacctttttcttcaggtgcattaggtaaattcaattctttcattgaacaaatcataccgcttgaggcaacaccacgtaattcagcatctttaattaccataccgctaggcatcactgcacctactttagcaacaacaactttctgtccagcttcaacgttaggcgcgccacatacaatttgtaatgtgtcatttccaacgtttacatttagtacacttaatttatctgcatcaggatgtttgtctttagtttcaacgtagccaactacaaatttcggtgata

SEQ ID NO: 1479 - DNA, 341 bp, Staphylococcus aureus; identical to SEQ ID NO: 1434

SEQ ID NO: 1480 - DNA, 318 bp, Staphylococcus aureus
gatcattggtacaagctcaatcatatcgtcttcatctgattgagcaccttcttcagctaagataacatactcttttttgaattcaggatgataaaattctaaaacttttcggtataaaacttcatttccctcttcatcgaataaagttaataattcttcttcgttattaatttctagttgtgaatcatgattatgttcagtcatagtaaaatctccttttaatgtagtgaatctaaatagccttgtaaaataaataccgctgccattttatcaatcacttgttttcttttttgtcttgaaacatctgcttctaataat

SEQ ID NO: 1481 - DNA, 374 bp, Staphylococcus aureus
gatcgaaggggggaagtatatgtttagttcaatatatttagaaagtcgtttgtagttattgtttgtcccatcaatgggaatacattatctattggaaattgatgtagcgtttcgttttgtgcactcatcatatctgtaacaaaaaactgattgtagtttaattgataggcatctcgcgctgtcgtatctacgccaatatgcgttgcgacaccaccaagaacaatcgtatcaattcctcgacgtcgcaattgtaagtccaaatctgttcctacaaatgcactaaaatgtcgtttgtctatgacaaaatcgtcatctctcttgtctaataaatgatggaaacgactgtagtcgtcgccttcttttggtggtaatga

SEQ ID NO: 1482 - DNA, 265 bp, Staphylococcus aureus
gatcagaagtacgacctaattttctgtaacccatgagttaacctcctttatcaatcttcttttcttaatcctaatcctaaatcttctaatttgtatttaacttcttctaaagatttacgacctaaattacgcactttcatcatgtcagcttcagatttgtcagctaactcttgaacagaattgattcctgcgcgttttaagcagttatatgaacgtacagataagtctaattcttcaatagacatttctaatactttttcttttt

SEQ ID NO: 1483 - DNA, 219 bp, Staphylococcus aureus
gatccatgaaatcttgtcttacttcaatacgtccatcttcatcattttcttctgaatcaatcacttcagtatgaattgcatttcctggtgtttcatcatttacaaccgcttcacgttgttgttcagtaccatcttcagatacagttgaagtagattgctcatcttcattcgtttcatcttctgcatcttcttttactttagcaaccgttgaaacaaatt

SEQ ID NO: 1484 - DNA, 318 bp, Staphylococcus aureus
gatcttttgtgatttcttctttcgattcacctttactaataatttctccagttaatggattttttagtgttggcgtcgttattgtcttctcacctttttgtccttctcttgttactttttctgtccctggtgctaaatccggattaaatttacgttctttcttgaatggaatctcttctttttctacaatcgagtctccttttacaggtccatattttgttacgctatcgaccggtggtctaactacgtctcctgtttctggattcttaattcctggtttacctggaacttcttctttctctcctgttggtaacttcg

SEQ ID NO: 1485 - DNA, 222 bp, Staphylococcus aureus
gatctttacgaacgtaaatttgaatttgtccagctaagtcctgaacgtgtgcaaatcctgctttacctttaccacgcttagtcattaatcgtccagctatagcgacatgactatccgcttctttttctaccaattcttctttagaatactggtcccactcttctttcaaatcactagataaacctgaacggtcaaatttagaaccaaacgggtctataccaa

SEQ ID NO: 1486 - DNA, 381 bp, Staphylococcus aureus
gatcattttggttcacttcagcagacactgtagcgccaacatttacttggccaaattgtactactcctttatgcaagttttgaccatttggtgctttggttacttcactaacagcaatttcaaaattgtcattataaacaatacctgtatccgcaacttgtccaccactgattgcataaaatggtgtttccgttaacatgaagtatactgtttcacccgcttcaacttgtgaaacttcttcaccattgtatatcaagtgtgttagtgttgtttgagctgtcgcagtatcataaccaacaaaagtacttgcagatgtaatatttttcaatacttcactttgaacttgcattgattgagaattttgacgtgcttgacgtgcac

SEQ ID NO: 1487 - DNA, 327 bp, Staphylococcus aureus
gatcgttcttcgttttatcatccatcaatactcacaccctttaataagatggtaaatgggcacggaatctttcaataaatttctctccacgctcttcaaaagtactatattgatcccaactcgcacaagcaggtgacaataatacaacatcatttggttctataatatcttgtactttatcaacagcgtcttcgacattgttcgcttcaatgaccgatttcccttgactattacctagtttagcaaacttagctttcgtttgtccgaatacaaccatcgcgcgaacattttccatataaggaatgagttcgtcaaattcattccctc

SEQ ID NO: 1488 - DNA, 123 bp, Staphylococcus aureus
gatcccctaccgttgagcttggtgctttttgaaccataatatctcctgtctctgcatgcttaaatgcatgaacaactagttctaccgcatcttctaagctcattaaaaatcttgtcatatcag

SEQ ID NO: 1489 - DNA, 136 bp, Staphylococcus aureus; identical to SEQ ID NO: 1357

SEQ ID NO: 1490 - DNA, 77 bp, Staphylococcus aureus
gatccacctaatactttgattgtaagaacttcacgagcaccagagttgtctgctactttcaagcgtgtttcttgttg

SEQ ID NO: 1491 - DNA, 121 bp, Staphylococcus aureus; identical to SEQ ID NO: 1469

SEQ ID NO: 1492 - DNA, 213 bp, Staphylococcus aureus; identical to SEQ ID NO: 1374

SEQ ID NO: 1493 - DNA, 321 bp, Staphylococcus aureus; identical to SEQ ID NO: 1443

SEQ ID NO: 1494 - DNA, 409 bp, Staphylococcus aureus
gatcccattagactgtaagaaaatgtaacatctcccttagctctagtcatagcaacataacaaacaaatgcttcatccatctgtaaaatatctgatgttggacttaactcgacattagcctgctgttcaaagtatttcttttcttcatctgtaatcaagcttgacgcagttactggttgtggcatcgttccatcattcatacctactaagtaaacatgttgcttattatcgactttagccaaatccatcgtaccaatacttacttggtccaatgtttgcggaatcataacaaattctaattgttctaaaccaatatcaaatacttctaagaaacgttccatcgacattggttcatctccaaatactagaactaagtcatcaaggatttgaattaagccattccatattt

SEQ ID NO: 1495 - DNA, 309 bp, Staphylococcus aureus; identical to SEQ ID NO: 1387

SEQ ID NO: 1496 - DNA, 85 bp, Staphylococcus aureus
gatcctattgaaccacctgcacccgtaactaaaatagttttattcgtcaattcatttgatatcatatccatatctaattcaacag

SEQ ID NO: 1497 - DNA, 246 bp, Staphylococcus aureus
gatcaggtcgaacaaagatatgtgaatcatttaaagtcataccacgaacacgttgtaatcctgatacagcaccacttgcttcatatctatgcatcgttcctagctcagcgatacggataggtaattcacgatatgaatgtggtttattcgcataaatcatcatatgatgtggacagttcattggacgtaataccatagattcagtttcatctaactgcattggtgggaacatatcttcttgatagt

SEQ ID NO: 1498 - DNA, 265 bp, Staphylococcus aureus; identical to SEQ ID NO: 1482

SEQ ID NO: 1499 - DNA, 318 bp, Staphylococcus aureus; identical to SEQ ID NO: 1425

SEQ ID NO: 1500 - DNA, 84 bp, Staphylococcus aureus
gatcttttgcttgtaattcatccaattcttgcgcttttttgattgcattttctttatccagcgctagaaaagacttaattgttg

SEQ ID NO: 1501 - DNA, 318 bp, Staphylococcus aureus; identical to SEQ ID NO: 1391

SEQ ID NO: 1502 - DNA, 213 bp, Staphylococcus aureus; identical to SEQ ID NO: 1374

SEQ ID NO: 1503 - DNA, 315 bp, Staphylococcus aureus
gatcaagctcttcagctgtttcatacacttgtcctaagacgtctcgaatgtctttaaagccatcgctttcacgagaagatgatagctctaaaattcgacgttctgcatcacttaaaatcgcatctagttcaagttcatcattatatccatcattggcaatactatctgcagtttgaatcaatctacgttttaatgcatgcttagaaacgatatcagtataatactgaacatttcgcgtcgttggtacatttgtagataactctgcaagatattgcgggccacccgcttcattcaacgtaccttccgtcgataatt

SEQ ID NO: 1504 - DNA, 257 bp, Staphylococcus aureus; identical to SEQ ID NO: 1356

SEQ ID NO: 1505 - DNA, 193 bp, Staphylococcus aureus; identical to SEQ ID NO: 1365

SEQ ID NO: 1506 - DNA, 240 bp, Staphylococcus aureus
gatcactttttaaggcatctttaatcttcaatgttttaaccacggattcaggcaagacatcttctctaattaaataaaactttttataatctttattgtccatcatgtttcgctcctattcaacgaattcaaattctccgccaagaattctaacgatatcaccatttttacaaccacgttctctaagcgcatcatcaatacccatcgaacgcatttgacgagcaaatcgacgtactgctg

SEQ ID NO: 1507 - DNA, 138 bp, Staphylococcus aureus; identical to SEQ ID NO: 1409

SEQ ID NO: 1508 - DNA, 378 bp, Staphylococcus aureus
gatcttctgctaaagctaatcctactgacatagcaaaaccttgtccaagtggtccggtagtaacttctacaccatctgtatgtctgtattcaggatgacctggtgttttagaaccccattgtctaaattgctttaattcttctaattctaaactaccagaaacatgtaacaagctatacaataatgctgaaccatgccctgcagataatacgaaacggtctctattgaagtaatctttagattgtggattaaaattcagatgacgtgtccacaaagtgtaagccattggggcagctcccataggtaatcctggatgaccagaattcgctttttcgattgtgtcgatacttagtgcacgtagcgtatcaacagctaatt

SEQ ID NO: 1509 - DNA, 318 bp, Staphylococcus aureus; identical to SEQ ID NO: 1381

SEQ ID NO: 1510 - DNA, 408 bp, Staphylococcus aureus
gatcattctatctaattaatttgtgtacaattttgataacttattttcccttagtttactactctagattatcttttaataacttagtactttcagcttttgactgctcactaggaatgaagtagtacaatccgtcactttgaatgccgccttgaccactcaattgatgtttattaatcgtgtcattagcatctttataattgcttctaatcgtattcaaatcacctaatgttaaatctgttttaacattattttgaatttcattcattagactattaaaatgtgtaatcgatgatgggcttgcaatcttattggccatcgcttcaagcacaatttgctgacgttgttgtcgaccaaagtcaccaccagcaccttcttctttacgacttctaataaacttcaatgctt

SEQ ID NO: 1511 - DNA, 213 bp, Staphylococcus aureus; identical to SEQ ID NO: 1374

SEQ ID NO: 1512 - DNA, 213 bp, Staphylococcus aureus; identical to SEQ ID NO: 1374

SEQ ID NO: 1513 - DNA, 249 bp, Staphylococcus aureus; identical to SEQ ID NO: 1403

SEQ ID NO: 1514 - DNA, 318 bp, Staphylococcus aureus; identical to SEQ ID NO: 1381

SEQ ID NO: 1515 - DNA, 413 bp, Staphylococcus aureus; identical to SEQ ID NO: 1367

SEQ ID NO: 1516 - DNA, 479 bp, Staphylococcus aureus
gatcttcagggtttacaatgttcaacatactagcctccaagacgcttgtaccgctagatgttaaaataagtacatcattttgactcccaaatattggctttagaccttgaaatgcttgttgtgcgatgtcttcaaaatctttagaacgatgaccaaccataggtgcttgaatttctctcataatggcatcaggtacaggggttgggccaggtgttaataacaacggttgatgataatacatttatatgcctcctataaataagatttcactattttagcaaattttctgaaaatttaaaagcctaaaaaagtgataacgctatattgtcgaacaaacgttatcacttaacgattttatttggcctgaatgatgggatagatttttatgtccacattatttcttacagcatttgaaatcatgcaattattatctgcaattgttatcaattttggtaatcgcttttctaattgtgctattt

SEQ ID NO: 1517 - DNA, 294 bp, Staphylococcus aureus
gatcaggcgttgaaacaacacctagatttggtttaatcgttgtaaaatgatatgccccaattttaggcttagcttttgaaacgatagataataaagtcgatttacccacactagggaaacctactaatcctacatcagctaataatttcaattctaaagatacatctaattcctcacctggttcacctttttcactgaagtcaggtgcagggtttctaggtgttgcaaaacgtgaattacctcggccacctcgaccgcccttcgctactacagctctttgaccatcttcaacaa

SEQ ID NO: 1518 - DNA, 156 bp, Staphylococcus aureus
gatccagccttcaaccgcacctttaccagcacccatacgtacttctaaaggttttttagtatatggtgtatgtgggaagattttaatccaaactttcccgccacgtttcatgtaacgtgtcattgctatacgagcagattcgatttgacgagatgt

SEQ ID NO: 1519 - DNA, 216 bp, Staphylococcus aureus
gatcccaactcgcacaagcaggtgacaataatacaacatcatttggttctataatatcttgtactttatcaacagcgtcttcgacattgttcgcttcaatgaccgatttcccttgactattacctagtttagcaaacttagctttcgtttgtccgaatacaaccatcgcgcgaacattttccatataaggaatgagttcgtcaaattcattccctc

SEQ ID NO: 1520 - DNA, 318 bp, Staphylococcus aureus
gatcttttgtgatttcttctttcgattcacctttactaataatttctccagttaatggattttttagtgttggcgtcgttattgtcttctcacctttttgtccttctcttgttactttttctgtccctggtgctaaatcaggattaaatttacgttctttcttgaatggaatttcttctttttctacaatcgagtctccttttacaggtccatattttgttacgctatcgaccggtggtctaactacgtctcctgtttctggattcttaattcctggtttacctggaacttcctctttctctcctgttggtaacttcg

SEQ ID NO: 1521 - DNA, 257 bp, Staphylococcus aureus; identical to SEQ ID NO: 1356

SEQ ID NO: 1522 - DNA, 276 bp, Staphylococcus aureus; identical to SEQ ID NO: 1445

SEQ ID NO: 1523 - DNA, 306 bp, Staphylococcus aureus; identical to SEQ ID NO: 1364

SEQ ID NO: 1524 - DNA, 318 bp, Staphylococcus aureus; identical to SEQ ID NO: 1484

SEQ ID NO: 1525 - DNA, 138 bp, Staphylococcus aureus; identical to SEQ ID NO: 1409

SEQ ID NO: 1526 - DNA, 168 bp, Staphylococcus aureus
gatctaaatgtaactccatgttacctgttcctttaaattcttcgtaaatcatatcgtccatacgtgaacccgtatcaactaatgcagttgcaagtattgttaaacttccacccgcttcaatatttctcgctgcaccgaagaatgcttttggtttgtgtaaagatgcag

SEQ ID NO: 1527 - DNA, 367 bp, Staphylococcus aureus; identical to SEQ ID NO: 1368

SEQ ID NO: 1528 - DNA, 145 bp, Staphylococcus aureus; identical to SEQ ID NO: 1380

SEQ ID NO: 1529 - DNA, 413 bp, Staphylococcus aureus; identical to SEQ ID NO: 1367

SEQ ID NO: 1530 - DNA, 341 bp, Staphylococcus aureus; identical to SEQ ID NO: 1434

SEQ ID NO: 1531 - DNA, 257 bp, Staphylococcus aureus; identical to SEQ ID NO: 1356

SEQ ID NO: 1532 - DNA, 111 bp, Staphylococcus aureus
gatcgttcttcgttttatcatccatcaatactcacaccctttaataagatggtaaatgggcacggaatctttcaataaatttctctccacgctcttcaaaagtactatatt

SEQ ID NO: 1533 - DNA, 213 bp, Staphylococcus aureus; identical to SEQ ID NO: 1446

SEQ ID NO: 1534 - DNA, 111 bp, Staphylococcus aureus; identical to SEQ ID NO: 1532

SEQ ID NO: 1535 - DNA, 138 bp, Staphylococcus aureus; identical to SEQ ID NO: 1409

SEQ ID NO: 1536 - DNA, 454 bp, Staphylococcus aureus; identical to SEQ ID NO: 1426

SEQ ID NO: 1537 - DNA, 383 bp, Staphylococcus aureus; identical to SEQ ID NO: 1427

SEQ ID NO: 1538 - DNA, 228 bp, Staphylococcus aureus; identical to SEQ ID NO: 1407

SEQ ID NO: 1539 - DNA, 213 bp, Staphylococcus aureus; identical to SEQ ID NO: 1446

SEQ ID NO: 1540 - DNA, 210 bp, Staphylococcus aureus
gatctaaaatatcatcaagtttatctgagttatagaaactttcgtatttttcttggaattctactaaaaatgctttaactatttcagcaaggtcacctttaaatttaccataaccttcgccctcatattttgcctcaatatctttaattggcatgtctgttaatccagcgtatattgaaattaaatttgttatacctggcttgttgtcac

SEQ ID NO: 1541 - DNA, 246 bp, Staphylococcus aureus; identical to SEQ ID NO: 1379

SEQ ID NO: 1542 - DNA, 318 bp, Staphylococcus aureus; identical to SEQ ID NO: 1381

SEQ ID NO: 1543 - DNA, 272 bp, Staphylococcus aureus
gatctcctgcgtgacaggcaggcgtgttaaccgctacactacgagaccattagtaaaacggaggaagagggattcgaacccccgcgagccgttaagcccctgtcggttttcaagaccgatcccttcagccggacttgggtattcctccaaaattatatggaccttgcaggactcgaacctgcgaccgaacggttatgagccgttagctctaaccaactgagctaaaggtcctaaatataattttacaactaataaatagtggcggtggaggg

SEQ ID NO: 1544 - DNA, 255 bp, Staphylococcus aureus; identical to SEQ ID NO: 1377

SEQ ID NO: 1545 - DNA, 318 bp, Staphylococcus aureus; identical to SEQ ID NO: 1381

SEQ ID NO: 1546 - DNA, 193 bp, Staphylococcus aureus; identical to SEQ ID NO: 1365

SEQ ID NO: 1547 - DNA, 254 bp, Staphylococcus aureus
gatcaaattcaaatttactttcttcaattttcttccaacttcttggatgcgttgaataaatcacaggcattttatactttttggcaatatcatttatcgcattcattaatgatttaaaattcttttcattatcgatattctcttctctatgcgcagatactaaaatgtattgttgcggttctaatcctagtttatttaaaacgtcactgtgattaattttatctcgatgcgcttctatcacttctgtcatcggt

SEQ ID NO: 1548 - DNA, 213 bp, Staphylococcus aureus; identical to SEQ ID NO: 1374

SEQ ID NO: 1549 - DNA, 240 bp, Staphylococcus aureus; identical to SEQ ID NO: 1506

SEQ ID NO: 1550 - DNA, 152 bp, Staphylococcus aureus
gatccaactttactaaaaatagttcagcatctccatcttcatgcaacgcatcataaatattttcaaagtaactaatatcacgcgttaagaagccatcgcgttccccagtgattttcattaactcagcaaatgtttttaaaccttctctatca

SEQ ID NO: 1551 - DNA, 553 bp, Staphylococcus aureus
gatcaatcgtagcgaatggatagttcgctgctaaagcacctgcttttgttattgcattaaataatgttgatttaccaacgtttggcaatccaacgatacctgctgttaaagccattaatcattctcctatctttgtgtatcatcatgagattcgatgatttttttaagttttttatcaaacgtttgacgtggaatcataatacttctttgacaattttcacatttaattcttatgtctgcacccattctaataatcttaaaacggtttgttccacacgcatgttgttttttcatttctactatatcatttattccatattttgacgccattaaatatgacctccatgtattataaactactaaacaccgttttcactatgattataagcagtcataattggttgaggtgttttaataccttcttgtaaaaacattttttgtacttctttgcgaataattcgagctccagcaaatccttcacctggaattgtttctgcagatattctcaatattactcttgtatcttcaatagcatcaataccaataacaaccg

SEQ ID NO: 1552 - DNA, 318 bp, Staphylococcus aureus; identical to SEQ ID NO: 1425

SEQ ID NO: 1553 - DNA, 105 bp, Staphylococcus aureus
gatccacgacaccttttgctaaatagaaatcaaccgtttctttcttaccttgccattgattgactacataatctccagttaaaataccacttaaatattcaactt

SEQ ID NO: 1554 - DNA, 265 bp, Staphylococcus aureus; identical to SEQ ID NO: 1482

SEQ ID NO: 1555 - DNA, 249 bp, Staphylococcus aureus; identical to SEQ ID NO: 1403

SEQ ID NO: 1556 - DNA, 318 bp, Staphylococcus aureus; identical to SEQ ID NO: 1484

SEQ ID NO: 1557 - DNA, 318 bp, Staphylococcus aureus; identical to SEQ ID NO: 1425

SEQ ID NO: 1558 - DNA, 257 bp, Staphylococcus aureus; identical to SEQ ID NO: 1356

SEQ ID NO: 1559 - DNA, 152 bp, Staphylococcus aureus; identical to SEQ ID NO: 1397

SEQ ID NO: 1560 - DNA, 246 bp, Staphylococcus aureus; identical to SEQ ID NO: 1379

SEQ ID NO: 1561 - DNA, 318 bp, Staphylococcus aureus; identical to SEQ ID NO: 1391

SEQ ID NO: 1562 - DNA, 213 bp, Staphylococcus aureus; identical to SEQ ID NO: 1466

SEQ ID NO: 1563 - DNA, 77 bp, Staphylococcus aureus; identical to SEQ ID NO: 1490

SEQ ID NO: 1564 - DNA, 381 bp, Staphylococcus aureus; identical to SEQ ID NO: 1486

SEQ ID NO: 1565 - DNA, 193 bp, Staphylococcus aureus; identical to SEQ ID NO: 1365

SEQ ID NO: 1566 - DNA, 234 bp, Staphylococcus aureus
gatccacattttcttcttcgctaaatgtaattgcaattttagataacaagtctaaatgttcgccatctttaccagcaattcccacgacaactttaactacttcgccatcccagtcaacgccttcagggatttgtaataatgttaaacctgagtgaatcacatttgttttagcttcatctgtgccatgaggaattgctaagccatttcccataaatgttgatacgacttgctcac

SEQ ID NO: 1567 - DNA, 454 bp, Staphylococcus aureus
gatcttcatcacaaaatgccacatgttgattcaactttaatagacttaaaccaacttgatgtacgtcattgttcggtcttgcatgtgcaattgcaatttcaggtgcgataacgatataaggtccaagttcattaacgctatcaatcattgcttgaacatagccttgttcaataatttgttcttgtagtaatggctgagaagctatagttatagcttcagtccaatcatttacttgttcttttacaatgatgcgtgttgttgacaaaatgtctaatgacacgttattaagcctcctttgtcatagttaaagcaatgtgttgtttaattttaaaaatattcccatctaagaaatcttgtcgatataagtcgttgcttaagcattcgcttaactgtcccaatgcctttaaatgtgcattggggtggtccgttgctaatgtaattacaaggtgaacgg

SEQ ID NO: 1568 - DNA, 309 bp, Staphylococcus aureus; identical to SEQ ID NO: 1387

SEQ ID NO: 1569 - DNA, 193 bp, Staphylococcus aureus; identical to SEQ ID NO: 1365

SEQ ID NO: 1570 - DNA, 318 bp, Staphylococcus aureus; identical to SEQ ID NO: 1484

SEQ ID NO: 1571 - DNA, 225 bp, Staphylococcus aureus
gatcgaaatcaatatttgtcataattgcgtaatcaggtttataacttaaaaagtgacgtctatattcacatgcctcaaaagcgaaataatcactttcaggcaatcccatacctgtgccatcaccaattaaaaatgaagtctttttatcaccattcataacatgtgataataaacctgttgtagaagttttaccatgtgcaccagttacagctactgaagtatatt

SEQ ID NO: 1572 - DNA, 318 bp, Staphylococcus aureus; identical to SEQ ID NO: 1425

SEQ ID NO: 1573 - DNA, 318 bp, Staphylococcus aureus; identical to SEQ ID NO: 1425

SEQ ID NO: 1574 - DNA, 194 bp, Staphylococcus aureus
gatccaaaagattatagcaataggtcttgataaataatgtcgtgtcatttgagctaagtccatacctgttgctattcctaatctcactgtcatgctttgaagtaacattgctgataaacttgaaataagaattacgaatagcaaagtatagccatattgggcgccaccttgcattgatgttatccagtttccgg

SEQ ID NO: 1575 - DNA, 213 bp, Staphylococcus aureus; identical to SEQ ID NO: 1374

SEQ ID NO: 1576 - DNA, 318 bp, Staphylococcus aureus; identical to SEQ ID NO: 1391

SEQ ID NO: 1577 - DNA, 256 bp, Staphylococcus aureus
gatcacagttagtgtcaacgatacctacgataggaatatttaatttacgagcttcagcaattgcattacgctctttacgtgggtcaactacgaataatgcttgaggcattgatttcatatcacgaattccgcctaagaatttgattaaacggtcgtattcttttttaagttctactacttcttttttaggtaatacttcgaataaaccatcttcttccattttttcaatttcagaaatacgtttgattcgttttga

SEQ ID NO: 1578 - DNA, 466 bp, Staphylococcus aureus
gatcaccttgagaaccatgccctgaagtatggatgttagaaatcttgctatggataacatctgcaccagctttatacaaggaattaatagttctgttaatactttttgtattacctgggataggtgatgaactaaatacaacggtatcttcaggtataattttaatttgcttatgagtaccattagcaattctagataatgctgccattggttcaccttgtgaaccagtacatagtatcaataactcatgcttcggtacggtattaattttattaggttcaataaatgtttcaggtggtgctttaatataaccaagttccatacctattttaatattgttttccatcgaacgaccgaacgtaacaattttacggttatttttgatagcagcttcaactgcttgttgaactcggtaaatattagaagcgaaggtagcaaatataatacgacctttacaattacggaa

SEQ ID NO: 1579 - DNA, 318 bp, Staphylococcus aureus; identical to SEQ ID NO: 1520

SEQ ID NO: 1580 - DNA, 185 bp, Staphylococcus aureus
gatcaattctaattcttcaacagcattgtctaatactttagaattttgtactgcgtcacctacacccatgttcacaacgattttatctatttttggtacttccattactgaactataattgaattttttcattaagttttcagtaacttcagtgttaaacttttcttttaaacggttcaaagtgg

SEQ ID NO: 1581 - DNA, 138 bp, Staphylococcus aureus; identical to SEQ ID NO: 1409

SEQ ID NO: 1582 - DNA, 282 bp, Staphylococcus aureus
gatcaatttcatctttagccgcttgtttcttcacaacttttggtgttaccgcattaatcgctgcttctgcatttgctttagcttcatcaacttgtgcgttagtagttgctgctgaaatggcttgatttgctttaccattttcagtatttgcttcagcatcagctgcttgtttttcttcatctgttgcatctggcgtagcttgaatctcttgcaatttgttatttaaaattgctgtgatttcattacgtgcagttgcttttttattaactgttggtgttactt

SEQ ID NO: 1583 - DNA, 186 bp, Staphylococcus aureus
gatcaccattcaatgcatttttagcacttgaaacattttgaatagccgcttcaacatcttgtttagacgtatttgcaccttgcgttttattcagaattgcttcagctctgcttaccgcatttgtatacgcatcacgtttagctttatctgcatcagtaaatttaacactttgtttaactgtgtttt

SEQ ID NO: 1584 - DNA, 342 bp, Staphylococcus aureus
gatcaatattatcacgcgttattgttgaaactggaataactggcacatcttcgccaatttcttctttaaacaagtttaaattatcttgtgattcaggtaaatccatcttgttagctactacgatttgaggtctatcttctaaacgttgctcgtacgcagctaattcttgattaatgactttataatcttcaataggttctctaccttcagaaccgctcatatcaatcatgtgaacaataacttttgttctctctacatgtcttaaaaattgatgtcctaatccaacgccatcagatgcaccttcaattaaacctggtaaatctgccataacaaaactacgtt

SEQ ID NO: 1585 - DNA, 257 bp, Staphylococcus aureus; identical to SEQ ID NO: 1356

SEQ ID NO: 1586 - DNA, 154 bp, Staphylococcus aureus
gatcagcataaatgatgccgtctgctacaacatcatcttcttgtccaccaacagtacctaattcagcttctacagaaacacctttttcatgagcgtattcaacaacttttttagttgttgctacgttttcttcgaatgggctgtgtgaagcatc

SEQ ID NO: 1587 - DNA, 174 bp, Staphylococcus aureus
gatcacgcatattttgtttaatttcagaccattctatgcgtttttcttgtaaaccagcctctactatttcacgtactttctcttctgcttcacgtaataagtcttcactttcacgtacatatacaaacccacgagattgaatttcaggtcccgcagctatacgtctatttttag

SEQ ID NO: 1588 - DNA, 256 bp, Staphylococcus aureus; identical to SEQ ID NO: 1577

SEQ ID NO: 1589 - DNA, 219 bp, Staphylococcus aureus; identical to SEQ ID NO: 1483

SEQ ID NO: 1590 - DNA, 204 bp, Staphylococcus aureus
gatctttagaaacagtagtgacacgtttaccttctacaattaaatctttccagtaactgtcatcctttgttttcatcactacatatttttgaccatttaaagttgctgtatagaatggatgttcaacaaagccgtccataactgactcactattttcttcactttcaaaaacaacaaaatgcgcttcttgtaaatctgttaatt

SEQ ID NO: 1591 - DNA, 213 bp, Staphylococcus aureus; identical to SEQ ID NO: 1374

SEQ ID NO: 1592 - DNA, 304 bp, Staphylococcus aureus
gatcatattgaatagaatcaacttttgcattgataccatctttgttacgtttgaaatcgataacacggtattgacgtttgtgtccaccaccatggtgtcttacagtcaatttaccttggttgttacgtcccgcttttttcggtagcggttttaataatgacttttcaggtgtagttttcgtgatttctgcgaaatctaacgaagtcatattacgacgaccatttgttattggcttatactttttaatagccattgtcgcttacctccttaatggtaattgttttattagttaaataagtcgatt

SEQ ID NO: 1593 - DNA, 105 bp, Staphylococcus aureus
gatcaaacacttataattcctccttattattatcactaggtgctacgatatggtgcgcgcgacaacgtggctcataactttcattggcacctactaagataatcg

SEQ ID NO: 1594 - DNA, 213 bp, Staphylococcus aureus; identical to SEQ ID NO: 1374

SEQ ID NO: 1595 - DNA, 274 bp, Staphylococcus aureus
gatccctcttccatcttaacgtctgatacaccagtgtattgaataattgaacgcaatttttctaaatatgcatatgcttctttaggtgaacgaatatctggttcagatacgatttcaattagcggtgtaccttgacggttcaagtcaactaatgaatactcacctttatgtgttgacttaccagcatcttcttccatgtgaagacgagtaataccgattcgttttgtttcaccgtcgacttcgatatcgatatatccattttcaccaattggtt

SEQ ID NO: 1596 - DNA, 341 bp, Staphylococcus aureus
gatctaacgcaataagtacagatttatatcctggttctgttacagcatattctccagcaatataaagttttccgggtgctttgacctgaatcattttatctcttccttactcaattatttcaattcctgtggcaataatgtcactatcaataatttggttattatcaaactgtgttaataatttatctataatctgttgcttgtttttcttttctacaagtattttcacattaggtcccgcatccattgtaaaataacacggataccccgcttctcggcattcgtgaacaagcgccatgacatcataactttcttgcacaagatatgtgaacggcggtgtt

SEQ ID NO: 1597 - DNA, 121 bp, Staphylococcus aureus; identical to SEQ ID NO: 1469

SEQ ID NO: 1598 - DNA, 213 bp, Staphylococcus aureus; identical to SEQ ID NO: 1374

SEQ ID NO: 1599 - DNA, 225 bp, Staphylococcus aureus; identical to SEQ ID NO: 1571

SEQ ID NO: 1600 - DNA, 228 bp, Staphylococcus aureus; identical to SEQ ID NO: 1407

SEQ ID NO: 1601 - DNA, 84 bp, Staphylococcus aureus; identical to SEQ ID NO: 1500

SEQ ID NO: 1602 - DNA, 266 bp, Staphylococcus aureus; identical to SEQ ID NO: 1429

SEQ ID NO: 1603 - DNA, 93 bp, Staphylococcus aureus
gatctgcattaacgcttttgaaccgttgtgattcattatgaatgatttcttggtaaccttcaattactttttcgtgaaactttaaatcttctt

SEQ ID NO: 1604 - DNA, 213 bp, Staphylococcus aureus; identical to SEQ ID NO: 1374

SEQ ID NO: 1605 - DNA, 318 bp, Staphylococcus aureus; identical to SEQ ID NO: 1425

SEQ ID NO: 1606 - DNA, 228 bp, Staphylococcus aureus; identical to SEQ ID NO: 1407

SEQ ID NO: 1607 - DNA, 213 bp, Staphylococcus aureus; identical to SEQ ID NO: 1374

SEQ ID NO: 1608 - DNA, 120 bp, Staphylococcus aureus; identical to SEQ ID NO: 1370

SEQ ID NO: 1609 - DNA, 277 bp, Staphylococcus aureus
gatccacctgatgaaccacctggcactgctttatggtcaaatgggttaactgtttttttgaaataagatgtttctgttgaaccacccattgcaaactcatccatatttaatttaccgattaaaacggcattttcattatgtagtttttccattacagtagattcgtaaattggcacaaaaccttctaacattttacttgcacatgttgtttctaatccgtttgtaataatgttatcttttatacccattggaataccaaataatttgccatccattt

SEQ ID NO: 1610 - DNA, 318 bp, Staphylococcus aureus; identical to SEQ ID NO: 1425

SEQ ID NO: 1611 - DNA, 145 bp, Staphylococcus aureus; identical to SEQ ID NO: 1380

SEQ ID NO: 1612 - DNA, 381 bp, Staphylococcus aureus; identical to SEQ ID NO: 1486

SEQ ID NO: 1613 - DNA, 256 bp, Staphylococcus aureus; identical to SEQ ID NO: 1577

SEQ ID NO: 1614 - DNA, 96 bp, Staphylococcus aureus
gatcaaagctaacaaaatcacctactgaaatacctaaactctttgtatcttcttctgatgtagttacttcatcaattcttatttccatatgctttt

SEQ ID NO: 1615 - DNA, 357 bp, Staphylococcus aureus
gatctttcaacaatttgatatctgccttattcgctttatctagcacttttgcaatttgttgcattgaaaatgcatttttagatttttgtatgcctctcgcaggctttttcgaagatttttgaacaggagcgacactcactccttgtgcttttagtgtttttagttcttgctctaactgttccatacgttgcaacaatacatctgtgtttggcgatgaagcaatttgtgctggttcagctacattcgcaatcacttgtggttgacccttaatctgctcagctaattttactaacaacacttcaaaatgaacgttttgattcacactaaaacgaatcgacactaatgtatcattaataa

SEQ ID NO: 1616 - DNA, 288 bp, Staphylococcus aureus
gatcatatgtttgcgataaatcagatttgacattggctagtcctttaacctgtttcattttctgttcaatatcttttacagttgattttatggcatccattgatggaccttttacagtaacctctacagatttattacctgcacctgttcctaaatcttgatttttccactctccaggatgtttaaagccatctgcatgtttaataaccttatccgcttctacatcaaaattaggcgtgtcattatcatattcaaccatgattgccatactatttgtactacccgttg

SEQ ID NO: 1617 - DNA, 179 bp, Staphylococcus aureus; identical to SEQ ID NO: 1399

SEQ ID NO: 1618 - DNA, 77 bp, Staphylococcus aureus; identical to SEQ ID NO: 1490

SEQ ID NO: 1619 - DNA, 193 bp, Staphylococcus aureus; identical to SEQ ID NO: 1365

SEQ ID NO: 1620 - DNA, 213 bp, Staphylococcus aureus; identical to SEQ ID NO: 1374

SEQ ID NO: 1621 - DNA, 315 bp, Staphylococcus aureus
gatcagcaccaaataatttcttagctaacaattctaaagtacctttcaaatcactcattttaacgtttttatcaacaactaatccttcgatttgtgtaaattgatgactatgtgtcgcatcatcagagtcacgacgatacactttaccagggcaaataattttaactggaccttgaccatgacgtgattccatcgtacgtgcctgcactggtgatgtatgcgtacgtaataaaatttcatccgtaatatagaaactatcttgcatatcacgtgcagggtgtgatttaggtaaattcagcatttcgaagttataat

SEQ ID NO: 1622 - DNA, 249 bp, Staphylococcus aureus; identical to SEQ ID NO: 1403

SEQ ID NO: 1623 - DNA, 257 bp, Staphylococcus aureus; identical to SEQ ID NO: 1356

SEQ ID NO: 1624 - DNA, 204 bp, Staphylococcus aureus
gatcaacgacaaaccagatgcctaatgtctttttagcattttgatagtaaaaaataccgctatcagcttcctttgttttaccattttcttttttcaagtccttgccataagctttttggatatcttttaatgaaatattatttttaactacaaattgcaattgacttgcttcgtttccttttgcagaaacacctttaaaagttt

SEQ ID NO: 1625 - DNA, 413 bp, Staphylococcus aureus; identical to SEQ ID NO: 1367

SEQ ID NO: 1626 - DNA, 121 bp, Staphylococcus aureus; identical to SEQ ID NO: 1469

SEQ ID NO: 1627 - DNA, 108 bp, Staphylococcus aureus
gatcttttgctttttgagcaatatctgtttgttgtgcttgttgctttggcatatcatcgccttcgtttttacgattttgtaaatattccgttcgaactctttgccatt

SEQ ID NO: 1628 - DNA, 213 bp, Staphylococcus aureus; identical to SEQ ID NO: 1374

SEQ ID NO: 1629 - DNA, 67 bp, Staphylococcus aureus
gatctctctccagcaaatcctttgaactccgcttcttttttaatactttcgaaattaacatattctt

SEQ ID NO: 1630 - DNA, 152 bp, Staphylococcus aureus; identical to SEQ ID NO: 1397

SEQ ID NO: 1631 - DNA, 225 bp, Staphylococcus aureus; identical to SEQ ID NO: 1571

SEQ ID NO: 1632 - DNA, 180 bp, Staphylococcus aureus
gatccatcactttgtcgtcaccaattggttgtgtatctttaccagacttactacctttgctaccttgttgtcctttagctggttgttcacttactgctggtttacctaataacatacgttgtggttctgtcgtatcatacttagctaagttagctgtttttaaataacttgctagtactt

SEQ ID NO: 1633 - DNA, 318 bp, Staphylococcus aureus; identical to SEQ ID NO: 1484

SEQ ID NO: 1634 - DNA, 166 bp, Staphylococcus aureus
gatcgcagttacttctaaacctgcagattgtaatgcacgaatagctgattcacgacctggaccaggtcctttaactgttacttcaactgtttttaaaccatgctccatagctgatttagatgcagtttcagaagccatttgtgctgcaaatggtgttgatttttta

SEQ ID NO: 1635 - DNA, 209 bp, Staphylococcus aureus
gatcatcaatttcttcacctaaattaaacgcagttgtaggcgctgttggaccaactactacatcataattttcgaatactttatcaaagtcatttttaatcaatgttctaactttttgagattttttatagtaagcatcatagtaacctgaacttaatgcaaatgtacctaagaaaatacgacgttttacttctttaccgaaaccttca

SEQ ID NO: 1636 - DNA, 225 bp, Staphylococcus aureus
gatcgtctaacttatctacaactttaacttgtgacacgataaataattgatgtaatgcatcaaatgaagttaagaattcagatgcattaaatttatcgttactagcaatcgtaactttagcttctaatgatttaccaataactttttcattacgagcagtttctaatgcacggttcacatcatcacgtaaattcataaatgtacgccatttatccaataaagctt

SEQ ID NO: 1637 - DNA, 225 bp, Staphylococcus aureus; identical to SEQ ID NO: 1571

SEQ ID NO: 1638 - DNA, 255 bp, Staphylococcus aureus; identical to SEQ ID NO: 1377

SEQ ID NO: 1639 - DNA, 213 bp, Staphylococcus aureus; identical to SEQ ID NO: 1374

SEQ ID NO: 1640 - DNA, 213 bp, Staphylococcus aureus; identical to SEQ ID NO: 1374

SEQ ID NO: 1641 - DNA, 219 bp, Staphylococcus aureus; identical to SEQ ID NO: 1483

SEQ ID NO: 1642 - DNA, 185 bp, Staphylococcus aureus; identical to SEQ ID NO: 1580

SEQ ID NO: 1643 - DNA, 222 bp, Staphylococcus aureus; identical to SEQ ID NO: 1485

SEQ ID NO: 1644 - DNA, 413 bp, Staphylococcus aureus; identical to SEQ ID NO: 1367

SEQ ID NO: 1645 - DNA, 255 bp, Staphylococcus aureus
gatccaaaccaccacataaccaaatgattggttgattaaatgaatttaaggcaaactgtgttgctagcgtgtttgttgctttggaatcattataatatttattagttctattagtaccaacatattgcaatctatgctctattcctgaaaatgtagttaaactatcaataattgctttaataggtacaccagctaaaatacaagcaagcacagctgctaatatattttctaaattatgttcaccaggcaatacta

SEQ ID NO: 1646 - DNA, 257 bp, Staphylococcus aureus; identical to SEQ ID NO: 1356

SEQ ID NO: 1647 - DNA, 387 bp, Staphylococcus aureus
gatctttaccatcaaaaatttcatcaaaagatgttgctacaattttattgttcttaattccaacacccttagctgtttcaccttgcattaataagtctaccgcatatccacctaaacgtgatgctaaaactctatccgcacctgttgggctaccaccacgttgaacgtgacctaacacagacactctattatcaacattgatgtattgtgataattctttttgacaatcttgcgcagtcatacaaccttctgctacaagaacgattgagtgtttcttaccacgtttaataccttgttcaattttatcagctatttctttaatatctgttttcacttctggaactacaattgtctcagcaccaactgataatccagcccataatgcta

SEQ ID NO: 1648 - DNA, 138 bp, Staphylococcus aureus; identical to SEQ ID NO: 1362

SEQ ID NO: 1649 - DNA, 306 bp, Staphylococcus aureus; identical to SEQ ID NO: 1364

SEQ ID NO: 1650 - DNA, 341 bp, Staphylococcus aureus; identical to SEQ ID NO: 1434

SEQ ID NO: 1651 - DNA, 258 bp, Staphylococcus aureus
gatcgcctttaacgattggtttcggtttcactttttctttaccatcttcagctgaaacgtgcttcgcttcaccaaactctgttgttttttcacgttcaatattatcttcaacttgtactacagattttaaaatgaatttacaagtatcttcttcaatattttgcatcatgatatcaaataattcatgaccttcattttgatagtcacgtaatggattttgttgtgcataagaacgtaagtgaataccttgacgtaatt

SEQ ID NO: 1652 - DNA, 152 bp, Staphylococcus aureus; identical to SEQ ID NO: 1397

SEQ ID NO: 1653 - DNA, 201 bp, Staphylococcus aureus
gatcaccggctttaacgttatttgttaaagatttagggacagttgcaaccatcgatactttatcatcaacattacttgcaagaatgataattgtatcttgtagtttagatttaaaatcgtccattgtcgagcgaattgctttcgcatttggtacatccacttcagtaaccaatactttatagccattgatttcttcaactt

SEQ ID NO: 1654 - DNA, 318 bp, Staphylococcus aureus; identical to SEQ ID NO: 1391

SEQ ID NO: 1655 - DNA, 120 bp, Staphylococcus aureus; identical to SEQ ID NO: 1370

SEQ ID NO: 1656 - DNA, 410 bp, Staphylococcus aureus; identical to SEQ ID NO: 1411

SEQ ID NO: 1657 - DNA, 204 bp, Staphylococcus aureus
gatcataaccatttaataacgttggtaaatttttattcacacttgctgtcgcattagttaatcgctgttctaactgtggtaagtcattgcgcacaaagttagcagctttagctacatcacttttcactttcgagaagtttgcttgagcatttttaacagcactaatgtattgttgttcaatacttggtaatactgtttgtaagc

SEQ ID NO: 1658 - DNA, 136 bp, Staphylococcus aureus
gatcaaaatctttgtcatcatagtaagaaccaaacgtgtcataaaatgttctagttgctaattcaactaattcactagcattttgttctgaaatttctttgattatcccagccatataaatcctccaataaacagt

SEQ ID NO: 1659 - DNA, 280 bp, Staphylococcus aureus
ggggatcattcaagtaagcatagaataaacctataatgagtccgcctccaatatagttaccgataaaagccgcagcgatattcgaaatagctggtatgaagtgcaatgtatcaacttgataaattaaaccacccataaataagcaactgttgtaaacgacgtgttcataacccataaaggcgaatatggtaacaccgaacatcatgacaaacatttttgcgagtacatcgtcaatttgcatggcaataactaatgaaatattgataaagaaattggcgaa

SEQ ID NO: 1660 - DNA, 164 bp, Staphylococcus aureus
tactttcaaataactactgtttaatatagttattaccgataaagtgctgtctaactagattaagactacaacttaaaaaagctccctcactaatttgtgagggagacaaaaattatttcgcatattctactgctctagtctctcgaacaactgtcaccttgata

SEQ ID NO: 1661 - DNA, 77 bp, Staphylococcus aureus
ctgccatggaacgctttatcaatgccggcttgtgcatacatcgcagtacctgaataatctttacctgttgcattttc

SEQ ID NO: 1662 - DNA, 142 bp, Staphylococcus aureus
aagatcccctaccgttgagcttggtgctttttgaaccataatatctcctgtctctgcatgcttaaatgcatgaacaactagttctaccgcatcttctaagctcattaaaaatcttgtcatatcaggatctgtaatcgttaaa

SEQ ID NO: 1663 - DNA, 808 bp, Staphylococcus aureus
aattaatacgcctggcattaccgcatactcaggaaaatgcccttgaaagaatggttcgtttcctgatacttgtttaatagccacacaacgttgaccttcttcatattcaactactttatcaattaataaaaatggctgtctgtgaggtataatttgtttaatttggttataatcaaaaattgtttccatggttgaaatcctccattatattaatttactgaattaatcgttaatacgttcaatgtctgcacctaattgcttcaatttaccgtgtaagtcaacatagcctctatctaggtgcgttaattcagtaacgcttgttttaccatcagcaactaatccagctaaaattaaggcggctgctgctcttaaatcagtcgctttaacttgtgcaccttgcaattgacttttaccttcaagtttagcactacgaccttctacattgatattagcattcatacgtttgaactctgcaacatgcataaaacggttttcaaaaacagtttcggttacgactttatgaccatttgccgttaataacaatgccatcatttgtgattgcatatcagtcgggaatccaggatgtggtagagttttgatgtctacaggttgtaattccccttcagcacgtacacgaataccatcttcttgatagtccaattcaacgcccatttcttctagtttatagactaaactcgccatatgttctttgattgcaccacgtacaaaaatatcaccacgcgttatagcaccagcgattagtaatgtgcctgcttcaattctatctggaatgatagcatgttctaca

SEQ ID NO: 1664 - DNA, 181 bp, Staphylococcus aureus
atcttcatcattttcttctgaatcaatcacttcagtatgaattgcatttcctggtgtttcatcatttacaaccgcttcacgttgttgttcagtaccatcttcagatacagttgaagtagattgctcatcttcattcgtttcatcttctgcatcttcttttactttagcaaccgttgaaaca

SEQ ID NO: 1665 - DNA, 225 bp, Staphylococcus aureus
caatgtctgcacctaattgcttcaatttaccgtgtaagtcaacatagcctctatctaggtgcgttaattcagtaacgcttgttttaccatcagcaactaatccagctaaaattaaggcggctgctgctcttaaatcagtcgctttaacttgtgcaccttgcaattgacttttaccttcaagtttagcactacgaccttctacattgatattagcattcatacgtt

SEQ ID NO: 1666 - DNA, 289 bp, Staphylococcus aureus
aactgcgaattcgccacctaaatatgttgttgcaacaatgctaccaccttctggcattaattttttagcttcatgagccacaattgttaatgagtaagaactaatgtcttgagctaacaagaagccttcacgtgaagtttcagaaaagcgtccgcgtaagtcttccatattagcaaatgcgattgaatgatatacaccatcaatattgccaacatctttaccaatttgctcaaaaccattaataacctcttcatcgctttgaacatcaatttgatataagtgcgcttct

SEQ ID NO: 1667 - DNA, 200 bp, Staphylococcus aureus
tcgtggacatcctctcggttcatattcaggcatatccggaccacaacttggatagtcagtttgttgattttcccaggtaatcacaccatttttcacaaatactttccaagaacatgagcctgtacagttaacaccatgtgttgttcttacttctttatcgtggctccaacgttctctgtacattttttcccattctctac

SEQ ID NO: 1668 - DNA, 164 bp, Staphylococcus aureus; identical to SEQ ID NO: 1660

SEQ ID NO: 1669 - DNA, 200 bp, Staphylococcus aureus; identical to SEQ ID NO: 1667

SEQ ID NO: 1670 - DNA, 515 bp, Staphylococcus aureus
ctttcttctttaacatgtggtgtatgagaccaaacttcttcagctgtatgcactaagattggtgctaacaacttcgtcatatcaactaaaatttgatataacactgtttgcatactacgacggatatgagaatcacgttgttcaatatataaaatatctttaccgtaatccaaatagaaattacttaactcaacattgataaagttttgaacttcttgataaatatttaagtagtcaaagttttcatagttgttaatcgtacttgcagtaaattcacgtaaacgatttagcaagtaacgatccacttctaataactctgattcaggaatgctatctgtgtcaggattgaaatcgttaatgttacctaacataaatcttaatgtatttctgattttacgataaacatcagatgtttgttttaaaatttcatcagaaattctaacatcagctaaatagtccgtactacttacccaaagtctcgcaatatcagcacctttttgtttaaccacttggtc

SEQ ID NO: 1671 - DNA, 269 bp, Staphylococcus aureus
catcgtcatcgtttgcaccgtcaaatactggtgatgcaacgtgaataccaagatttttagcagccatacctaagtgtagctctaatacttgtccgatgttcatacgagatggtacaccaagaggatttaacatgatatcgatcggacgtccatctggtaagtaaggcatatcttcttcaggaacaatcttagaaatgacacctttgttaccatgtcgaccacacatcttatcaccaacatgaattttacgtttttgaacgatatataca

SEQ ID NO: 1672 - DNA, 530 bp, Staphylococcus aureus
gattgactacataatctccagttaaaataccacttaaatattcaacttgatctggtagttcaccttctccattagcaaagaagacattgccgatttcaaataattttacatctttatttttgcgtgccacattatatgatgccgcttcgattaaatgtggtaataaactttgacgtaatgacgcatgcgcttcactcattggcatcaataaatcaattgtttgacgctgttgcatcgaaaatgcagtagcatcttctttagaaactaacgaatacgtaatagcttggtctaatccagcaccttctaacacttctttaaccattctagttttatattggcgatcagttagctgaccactagtaactttatcgaagacaggtaacgttgatggaatatcgtcgtatccatatatacgtgcaacttcttcaattaaatcttctttaattgtaatatctttacgacgtgatggtactagcactgtaataacatcatcatttatttctgtatcaaaccctagttgattaaaaata

SEQ ID NO: 1673 - DNA, 133 bp, Staphylococcus aureus
gtttgtaagctgatatcctcttgtttgatacctctaaacccaccaactgtgcctaatatatacgtatctttatttgctgctttttttgcgatgcgaacggcggcttgatgtattgctttaactttatcttcaa

SEQ ID NO: 1674 - DNA, 266 bp, Staphylococcus aureus
tagaacgaccagttgttttaggacgatgttgacgacgatattttacacgttttggtagtaacattattattttcctcctccactagtgttcttagtaggaagaacttctccacgataaatccatactttaacgcctaatttaccgtaagtagtgtcagcttcagcgtgtgcataatcgatgtcagcacgtaacgtatgaagtggaacagttccttctgaatattgttcagcacgagcgatgtcagctccgcctaaacgaccagata

SEQ ID NO: 1675 - DNA, 103 bp, Staphylococcus aureus
atcagattcactctctgaaccacttaatgacgctgatgtgcttaccgaacctgattgactcgtacttttagatatacttgttgaatcgcttagtgacgttgat

SEQ ID NO: 1676 - DNA, 384 bp, Staphylococcus aureus
gttatcattagtgctgttatataacagattacatttcccaaagtttcctacttatacatttcttatttctttttcaagattctctacttcttgtttaaaaataggatcttcttttaaatctttagatattttttcatgagcatgaatgacggtcgtatgatcacgcccaccaaattcttcaccaattttaggtaatgagaaatctgtaagctctctagacaagtacatagctatttgacgcggatatgcaattgactttgtacgtttttttgcactgaaatcttcaattctaacattatagtactggcctacaattttttgaatatcttggatggtaatctttttagattttggtgcttgaatgatatcttttaaagcttcagc

SEQ ID NO: 1677 - DNA, 241 bp, Staphylococcus aureus
ccattgttcaatggtgccttcatgaacactctcacctaacttaggcattgttatttccatgactttccctccctagaattctgctaattcacgcattttatttaagattttttctggattcatcataatttcattttctaatacaggagaaaatggcatagatggtacatctggagcagctaaacgcatgattggtgcatctaaatcgaacaagcaatgctctgcaataatcgctgacact

SEQ ID NO: 1678 - DNA, 209 bp, Staphylococcus aureus
cacttgataatccgcttctcttaatcctcttttttctttagctaatggatgaaatggacgatcttttaaacttgcaaactgctctgacatcacaaaaggatgtgacgctaaatctaattctgataattgtttagcaagctgtgtggcagcagtagtcagtccttcttcaacgcgagccacttcccattcatgacttagatcacaattca

SEQ ID NO: 1679 - DNA, 214 bp, Staphylococcus aureus
gtccatctggtaagtaaggcatatcttcttcaggaacaatcttagaaatgacacctttgttaccatgtcgaccacacatcttatcaccaacatgaattttacgtttttgaacgatatatacacgtactaattggtttacaccaggtgataatgtatcgtcgccttcttcacgattgaatacttttacatcaagaacgataccgccagcgccgtg

SEQ ID NO: 1680 - DNA, 223 bp, Staphylococcus aureus
tggtgtattcgtttgttcaacgtcgttgagacgctgtaataattcgttcaaatctacatttttcttttctaaggctgctgcttctatacttacttgtccgccacaacaaaaatctattcccacacttctaaaaatatccgctgctttcggataatcagttactacatctgctactatgtcatttttatttatcattatagataacctcctcatttccagtgta

SEQ ID NO: 1681 - DNA, 142 bp, Staphylococcus aureus
tgaaaagcagacatattttaaaattttcatgcgatctgtgaggcctttaaacttatagccattgacaatgactacggaaaaagctaacgcagcaacaagatccattgtaaaatagccttccaaacttcctgaaatgaaagga

SEQ ID NO: 1682 - DNA, 549 bp, Staphylococcus aureus
tgctgccataataatattttgtgttgctcctacacttggaaaatctaaatgaattgatgtaccttttaatccatctttagcattagcataaatattaccattttcaagatgaatttctgcgcctaaagcttcaaaacctttaatgtgttgctcaatcggtctacttccaattgcacaaccaccaggcaatgcaacaatagcatgtcctagtcttgctaaaagaggtcccataactaaaatacttgcacgcattttactaacatattcatatggtgcctcttcatttagagtctttgttgcatcaacgacaacagcattttcgtcctttttgtatgtaacgtcagcatttaaagttgttaatacattatttattgtttctacatcacttaaagctggaacattaactaatttgctcggtttatcagaagctaataaagatgctgtcaatattggtaatactgcatttttagcaccttctactttaacttcacccgttaatttatttccacctttgattactattttatccatcgtaaatcctccacttag

SEQ ID NO: 1683 - DNA, 191 bp, Staphylococcus aureus
ttaaagtgtaaaaaggtagttgaatattgctaaatgtatcatctgcttttttcaaaccgtaagtaaagatagctacaacacctaatacttctgcacctgctagttttaaggcttcaactgctgtgactgaagatccccctgtcgaaattaaatcttctatcacaactacttttttaccttcacttttagca

SEQ ID NO: 1684 - DNA, 205 bp, Staphylococcus aureus
tctgcacctttcgaagtgccacgatgcttgtgtgtatgcttgtactcagctgaattttgccaatgataaaatgcttgcctattttcccacagcgtaataatgatatagtgtctaccagctgttctaggtcttaaaaaccttaatgctttaaatccatcaacgttttttaaatgcttattacgtcgcaaaaatttttgctcgaatg

SEQ ID NO: 1685 - DNA, 310 bp, Staphylococcus aureus
tacttcgcgatccattgtttgttcgaaaagaatagcacccaaaattttatctggtgagaatgaaggtgaagttaccacacgtgtacgcatatcgtgaacaagttggaacatttcgtcttcattgctatattgatcttcgtttacaccatattctttaagtgcttttggtgtactaccaccactttggtctaatgcggcaataaagccttttccatttttcattttttctaattgctctttattcatactttccactccttaacttttcaatacacctccagtatgataaaaatgagaacatttctcaagt

SEQ ID NO: 1686 - DNA, 414 bp, Staphylococcus aureus
tctttaaaacaatattcagcataatctacaaagtagtcaatcgttttacgatttagaaaatcgccatctttgtgtaacacttctggtgtatcaaaatgatgcaatgttacaaatggttcaacatgacgtttatgacactctgcaaataacttatggtaatactcaacacctttagggttaacttcgccatatccatttgggaagatacgagaccatgcaattgaaattcggataccattaacaccgaatttttcacttaattctaaatccactggatatctgttataaaaatcactcgctggttctgcagtgtaccaatagttttcttctaaatacgtatcccatgctacgcgacctttaccatccgtatttgtcgcaccttctgcttgatatgctgctgttgctccaccaaaa

SEQ ID NO: 1687 - DNA, 330 bp, Staphylococcus aureus
tgacatcttcgtatgagttcttgattggcacagtcaatgacttaacatctttttcacctcggataccaaaactcaaacctgtttggaaaatccctgaatcaggaatgtttgtattcacatagcctcttaaaatacctgcaacttttggtaatttaacaactgttctaaaattaaccatttcttttttcaatgtttgcatcacttgttgctgacgtcgcacgcgtccgaagtcaccttcagggtcgtgacggaatcttgcataaccaagtaattctttaccattcaacctatggttaccctttttcaaagatacaccaatatttttcgaca

SEQ ID NO: 1688 - DNA, 209 bp, Staphylococcus aureus; identical to SEQ ID NO: 1678

SEQ ID NO: 1689 - DNA, 77 bp, Staphylococcus aureus; identical to SEQ ID NO: 1661

SEQ ID NO: 1690 - DNA, 202 bp, Staphylococcus aureus
tcttttcgccaatatcttacattttcctcactattatctagttgtgcaatgatatgatccatcatttcaattaactcatctggcaatggtcgaatttgtttagcgttcaactctaacagttcagaataaatcccttgggcagatgtgtgtaataataataatttttggaaacgtctacttaatttatcgttacttgaagtag

SEQ ID NO: 1691 - DNA, 611 bp, Staphylococcus aureus
tgttaacacctttttcacgtgcgtatttacgtactgaaggcattgctttaacagttctgttttcatctacttcttcagtttgagtagctacaggtgcttgctctgctggcgcttcctctttcgcaggttcttctttagatgatgaatcatcatcatgacctttaaattgcatatcttctgcatcaggtgcatcgattttaacaataacgtcaccaactacagctactgtaccttcttctaccataacttcttctacagtaccagatgctggtgatgggatttctactactgatttatcgttttgtacctcagctaaaacatcgtcttcttcaatagtatctccagctttaacaaaccattttacaatttcaccttcgtggataccttccccgatatcgggtaatctaaattcaaatgccacgtttttgccctcctaagatttcgtaaattaaacatttcattttaatcaatgagactaaaatacgctaacttcgttaacttttaaaatgtattaaaattctaaagtttcttttgctttttcgatgatgtcatttttgtttggtaaccaaacattttcagcttgagtgaatggataaattgtatctgctgct

SEQ ID NO: 1692 - DNA, 246 bp, Staphylococcus aureus
ccatcgtgattactatcattaaaacttcttggatatacttgatatgctactgcttctttccaccattgcttattcattttaaaactcctttgctatcgctgtgttgattttcttatttttaattctgtatctataatgacgagttcaataacatcctgtgctttgtttttcaatatatttaaaattgctgcaccagcctgttgacctaacattcgaggcttgatgtcaatacaggtttgtggtggt

SEQ ID NO: 1693 - DNA, 392 bp, Staphylococcus aureus
tatttcggtttatcttcttctgtgtcttcctcaaatgactgattaccgctattttggccaccttcgtaacctaattcactcttaatatccacgtggctattttcttcgatttcttcaatcacgccataattaccgtgaccattttcagttcctaaaccagaatgagaaatatgatgattgttttcagtaatttcctcgattggtccttgcgcttgaccatgttcttcaggtagttcatctactagttcaatcagattactttcagtcgtatattctttcgtatcttcaattgttgtatgatcgctaacagcaccagttacaataccttttgtagaatcttcgtcaaattcaactaggttagactcagtagtaacctgaccaccacctgggtt

SEQ ID NO: 1694 - DNA, 241 bp, Staphylococcus aureus; identical to SEQ ID NO: 1677

SEQ ID NO: 1695 - DNA, 96 bp, Staphylococcus aureus
atctaatcctttttcactccatgcaattgcagcatctaaaggtcccataaacatttcgtaaagacgcaaagtatctgcaccatgagactgtactat

SEQ ID NO: 1696 - DNA, 195 bp, Staphylococcus aureus
tacatcttgtgctaatgcctcttcgactatagcatctacttcgctagcactcttaattgtataacctttaccacctgctgcctcagcaaattttgcatgatccatatcagaaaaatcaactgcatattctaattcaccagctgcttgttgttcatatttaataaatgctaactgtttgttattaagtacaaatac

SEQ ID NO: 1697 - DNA, 324 bp, Staphylococcus aureus
gcgaattcgccacctaaatatgttgttgcaacaatgctaccaccttctggcattaattttttagcttcatgagccacaattgttaatgagtaagaactaatgtcttgagctaacaagaagccttcacgtgaagtttcagaaaagcgtccgcgtaagtcttccatattagcaaatgcgattgaatgatatacaccatcaatattgccaacatctttaccaatttgctcaaaaccattaataacctcttcatcgctttgaacatcaatttgatataagtgcgcttctggttgatttaattgttctaataatttttcaagctcttta

SEQ ID NO: 1698 - DNA, 192 bp, Staphylococcus aureus
aaagaaattgctaaataacgagtaacgttatttaactttcttctacctacttcaccttgttttgcccattctgagaatttagggacaatatccatttgtaataattgcattacgattgatgcagtgatgtagggtacaatacccattgcaaaaatagaaaatcgtttcaaggctccgccaccaaaagtattt

SEQ ID NO: 1699 - DNA, 192 bp, Staphylococcus aureus
tcaatactttgtgaatgatatagtcctccgtgaacaccgccaccaaatggtgcacgaatcgttaatgggcattgccaatcattatttgaacgataacgcattttcgcagcttcactaataatttgatttgtcgcaggtaaaataaaatctgcaaattgaatttctgcaattggtcttttacctaccatagct

SEQ ID NO: 1700 - DNA, 397 bp, Staphylococcus aureus
tgcttcgtaaatgattctgcatcctcaaattttactgccactttcatcatttcaagttgtttcttcatttcttttacgataggtagtcgctcttgatttttaactcttgaaaatgcaaatgactctaacatcagtcgcaaatcatacatttctttcttttcttgttccccaaacggcaacacatgtgcacccattctttctaattggatgagttgattttgttgcaataatttaaatgcatctcgaattggcgaacgactcacattaaattgctttgccatttgattttcagtgagtaacgtaccttcagctatgtgaccattcacaatgcctaagcgtaattctgccgcgataccttctccagttgtcataccttccaaccatttctctggatatc

SEQ ID NO: 1701 - DNA, 194 bp, Staphylococcus aureus
taagcattcagttaatgtacctacagggtttcctcctaccgctaaaattctttcagctaattcgtctacatattggcttgcttcattatataattcttcaaatttaacgtgtaatgagaagaagttaggccctttcacataccagtggaaattgtgtagctttgtgtaagctactgtccagtttgctacttgtt

SEQ ID NO: 1702 - DNA, 218 bp, Staphylococcus aureus
caatcttcacatgttggttaagccgacgagttctaacaatatgaatgagtgattcactagaattgatgtttaaagcatgttgaacttctggaacttcatgcgcttcaacaacctcattcacaacaacttcagttaaatatgcgacgcccatttcttcttgcatttctttaaaactaacaagttcagaaaatggaaactctgtaacctcctgataaatg

SEQ ID NO: 1703 - DNA, 269 bp, Staphylococcus aureus; identical to SEQ ID NO: 1671

SEQ ID NO: 1704 - DNA, 269 bp, Staphylococcus aureus; identical to SEQ ID NO: 1671

SEQ ID NO: 1705 - DNA, 332 bp, Staphylococcus aureus
ccccatcggtttattaaatcgtccatttcaatactgtttttccccaagatgtcgataaatccatttcaaacgcttggacgatatcttgcatcgtacatacattaatttcatgtccttttaataatgctaacttttcaactatgtctgggtacttacgatataaatcaacaacttgctcaaaatctttagagccgcttcgactactaccaatcaacgttaatcctttttcaagtactaatcgtgtattcacttccacgggtaattcacttacgcctaacaaagcaatactgccttctggtgaaatatgttcaactatttgttgaagtgcaact

SEQ ID NO: 1706 - DNA, 268 bp, Staphylococcus aureus
gattctttagcaattttagattttttaactttatcatttttatccattgaatgaactgggccatttggttttgctctgtctttcgataatcctggattgttaggatttactgggccacttggatgagttggtctgctcggcttctctgggttttcaggtccttttggatcttttggtttctctccaccgaactctacaatcttatctactggttgttttgtgatctcttctgttggttgaccctcgccaactttttcacctgttaatg

SEQ ID NO: 1707 - DNA, 372 bp, Staphylococcus aureus
gattatgtaaccgacgaatgctgcgatagctgctacgccatcaccgccagctaatccgattgcgacacctaatgcgaaaatcataggcaagttatcaaaaatgataccaccagcacctgtcattaatttagcgacagtttgtacgccaccattttgtataaacggcaagtagtgttgtaatgattcaccttgcatagctgtaccgatagctaataacagaccagctgctggtaaaatcgcaacaggtaacattagcgctttaccaatacgttgcaattgaccgaaaagtttcttcctcacttgtccaacctccaaagttgtatttattatttaagattcaataaaaaaagacacgagcaaatagactgtgtt

SEQ ID NO: 1708 - DNA, 241 bp, Staphylococcus aureus; identical to SEQ ID NO: 1677

SEQ ID NO: 1709 - DNA, 218 bp, Staphylococcus aureus
tcaacattatcgcttaatgtgaaatcaaaataatctcccgccttaattccttctccaaatttccatttatatttcaaggttactctttctgcgttatgaggatttacaacattcgtatcttgtttatgtcctacaatttcactaccttcttctacttccactttatttgttacatctgtacctgtcgctttagtttcttccactacttctttctctgc

SEQ ID NO: 1710 - DNA, 269 bp, Staphylococcus aureus; identical to SEQ ID NO: 1671

SEQ ID NO: 1711 - DNA, 257 bp, Staphylococcus aureus
tacaccaatgcgtccacccatgtgtaagtaagcgccgaaagcatcgttatcagttttagttctgatagcaaaacgacgaacacttaatttttcaccgattgttgaaattgcttctttaattctttcatcaactgatttaccatttggtaaagttgtttccattaaagcttcaacagtttcagcttttgtatctaatacttgattagcgatttctttaactaactcttggaaaccttcgttacgagcaacaaagtctg

SEQ ID NO: 1712 - DNA, 207 bp, Staphylococcus aureus
actctatcacactctcttttatatttatcaaaagatataaaaaaggatagtatctttcaactatcctttaatcaatattattcttcaatccattgtgtatggaatacgccttctttatcttttctttcgtacgtatgagcaccgaagtagtcacgttgtgcttgaattaagtttgcaggtaaatcagcagcacggtaactatcatag

SEQ ID NO: 1713 - DNA, 148 bp, Staphylococcus aureus
tgatttaacaccaatttgttcaccatcttgaccgattaaacgtaattcttttgcacgaattttgtcattgatttgagtttgatcttttgctatggttgacacctccaaaatttttacgaaatttgcaccaagcaaaaaggaagagcag

SEQ ID NO: 1714 - DNA, 104 bp, Staphylococcus aureus
gctttcgccgcttcaataatcccctcgtctacttccaataatgagttttcaacaagtcttgcaatgtaaggtgccacatatactgttaaaggcacgatggcagc

SEQ ID NO: 1715 - DNA, 119 bp, Staphylococcus aureus
gcaatatcgaaatgaatgtgaggtgtttgaccactaaaatgtgttacaaaacttgccgcaaatagcgctttaccttgtccattcgtatggttaactaaatcagcgatatcactgtgttt

SEQ ID NO: 1716 - DNA, 200 bp, Staphylococcus aureus; identical to SEQ ID NO: 1667

SEQ ID NO: 1717 - DNA, 194 bp, Staphylococcus aureus
gttttgtcgcgtgataaagtgctacatgtgaatgtgtgtacctttattaccaatcaaagcttcgtatgcctgctctaaattggtaatgataacttttttgttttccccactttcaacaaatcgtatcgcagcttctatttttggcaacatcgatccttccacaaacttaccttgtgccgcgtattttttcagtg

SEQ ID NO: 1718 - DNA, 425 bp, Staphylococcus aureus
tctggaaataatgctacgattttcatatccatctctcctaaatgataaattttgacttccttaaagtacgtgttgcatgttgcttgttttaaaaatatgacaaaaaaacggcaccgtttgacataccacccccttgaattattgttaaattcaaagcgaagttagcaaacagcaccgtgtaccttacaccagcaacacttattctattgacttatcgaaaacaaatattgaaatgacttcatcatcattcaaatcaatatctgtaaataattttacaaacttagcgcctacaagactttccatctcatttacatctatttctttatacatctgtttaatcttctctgtgcgtgtataatggagcatcgattcattgcgtttgtcgtttaggtaaaaactctcaactttactcaaaacacctgtca

SEQ ID NO: 1719 - DNA, 206 bp, Staphylococcus aureus
cccatatgtcgcagtaccatctgcatgtgttgttacattgtatgcatttgttttacttggcttcttgtatgtcgggcgagctccgtatgacacttgaccgtttgcatgtgttgttacgttgtatgcatttgttttgcttggcttgttttgtgttgggcgagcgccatatgatacttggccgtttccatgtgttgttacgttatatg

SEQ ID NO: 1720 - DNA, 107 bp, Staphylococcus aureus
tgtgttttatcgattgtttttgccatttgtccacctaaagcatcaatttcacgaacaacgatacctttagctggtccacctacagatgggttacatggcataaatgc

SEQ ID NO: 1721 - DNA, 100 bp, Staphylococcus aureus
tgtgattggtaattcgataatcttaccagatggtgcggccatcaatccacgcatacctgctaactgtgtaaagttagatgcgttaccacgggcacctgaa

SEQ ID NO: 1722 - DNA, 192 bp, Staphylococcus aureus; identical to SEQ ID NO: 1698

SEQ ID NO: 1723 - DNA, 661 bp, Staphylococcus aureus
agcagctgctccaccagcaatttggtgcatcataggtgtttctacttccaagaaacctttattatttaaataattacgcatttcttgaatgattttactacgattaataaatgtacgagtgctatcttcgttcgtaattaaatctaaatatctttgacgatatctctgttcaatatcctgtaaaccgtggaatttatccggtaatggtcgcaatgatttagttagtagcgtgaatttcttcgctttaaccgataattcgccagtatttgttttgaacattacaccttcaacaccaacgatatcgcctaaatcagcatttttccataaatcaaattcgtcatcgccaacttgatctttacgaacgtaaatttgaatttgtccagctaagtcctgaacgtgtgcaaatcctgctttacctttaccacgcttagtcattaatcgtccagctatagcgacatgactatccgcttctttttctaccaattcttctttagaatactggtcccactcttctttcaaatcactagataaacctgaacggtcaaatttagaaccaaacgggtctataccaagatcatataattcttgtaatttttgacgtcgaaccaacatttggtcattcatttcttctgacataactttctctcctttaacttgttgt

SEQ ID NO: 1724 - DNA, 225 bp, Staphylococcus aureus
ctttaaccattctagttttatattggcgatcagttagctgaccactagtaactttatcgaagacaggtaacgttgatggaatatcgtcgtatccatatatacgtgcaacttcttcaattaaatcttctttaattgtaatatctttacgacgtgatggtactagcactgtaataacatcatcatttatttctgtatcaaaccctagttgattaaaaatagtaacaa

SEQ ID NO: 1725 - DNA, 205 bp, Staphylococcus aureus
ctgacttagtacgtacgattacagctttgacaacgtcaccttttttaacaacgccacctggtgttgcatttttaacagtacatacgataacatcgccgatgtttgctgttttacgaccagatccacctaatactttgattgtaagaacttcacgagcaccagagttgtctgctactttcaagcgtgtttcttgttggatcattag

SEQ ID NO: 1726 - DNA, 264 bp, Staphylococcus aureus
cccactgctgtttttattgttctaaatccaatcttgtaaggatttaactttaacatgggttagcgcctcttatctttcttcacaatatttattgaataatgtttgtaattgattaattacgttcatcacatcatgaccttcgatttgatgtctttcaatcatttctgtaatctttccatcttttactaatgcaaatgacggacttgaaggcgcataaccttcgaagtattcacgcgctctttgtgtcgcttctttatcttgtcc

SEQ ID NO: 1727 - DNA, 217 bp, Staphylococcus aureus
ttggtaacggcccatacgttttttcttaggtttgtaattcatgatattaacacttgcaacttttacgttgaagatttcttcaactgccatttttacttgtgttttgttaacacgagtatcaacgtcgaaagtgtatttgtcttcagccattgcttcagaagatttctcagtgattacggggcgcttaagaatatctcttgcttccattatccgagca

SEQ ID NO: 1728 - DNA, 242 bp, Staphylococcus aureus
tgcttcgattcttcgagctatctgttttgaaaatttctcctcgccatagcgataaaaaatcttcactaacgcttcatatgaccaattgttaacaatttcatatgctgttagttcttgtgtttggtccatacgcatgtctaatgttgcgtcatggtgataactgaatcctcgttctggaatgtcgagttgtgggcttgaaacacccaagtcgtaataaattccatctactttttcaatgttta

SEQ ID NO: 1729 - DNA, 254 bp, Staphylococcus aureus
tgctaatgctgcagctgttggttcattaatgatacgctcaacttctaaaccagcaattttaccagcatctttagttgcttgacgttcagcatcgttaaagtatgcaggtactgtaattacagctttgtcaactttctcacctaaatagctttcagctgtattttttaagttttgtaaaatcatagctgagatttcttgtggtgtgtatgatttaccttcaatatctactttataatcagtacccatatgacgtt

SEQ ID NO: 1730 - DNA, 264 bp, Staphylococcus aureus; identical to SEQ ID NO: 1726

SEQ ID NO: 1731 - DNA, 295 bp, Staphylococcus aureus
tgatagttctgctggataacgctctaaaaatgactccggtaaatccacaagtttaattaattcctttgcacgtttatccttttcctctttagtccatttcaacaatttgggtaccaacacaatattctctttaatcgtcatatgaggcattaagccaatttgttgaataacatagccaatatttctacgcaattcgacaggattcatactccgaacatctttaccatcaatttcaatttgtccttctgtcgcttcaatcatacggtttatcattcttaaagcagtcgttttgcca

SEQ ID NO: 1732 - DNA, 212 bp, Staphylococcus aureus
tggaattgtacgaagttctcttcttctaatgctttgatttcttctttcgataacgctcgataccaatctttcgcttttttcgccgcaataggaacaacatctttttcaagatatccttcttttaacattgcattcgcaatttctatcgctttttgccgtttaattacttcaaattctttccatttttcggggtaacctttcattgtaaaggg

SEQ ID NO: 1733 - DNA, 167 bp, Staphylococcus aureus
cttcgataccagctttttcagctgcacgacgtaccatagtgtttttgtatactttatactcaacaccagcttcacgtaattgtgaacgtaagtcagtaacttcagctactgttaatccacggtagtcaacgattactgttgaaactgaatttgatagtacctcagca

SEQ ID NO: 1734 - DNA, 155 bp, Staphylococcus aureus
tctttacgacgtttacgttcttcatgtcgttttcttaaacgctcttcttcttcaggatcacgtggtttctttaattgttgagaaactttttcgattaattcttcttcagtaagcgcagccagtgggcggttattaacaaaagtgaatgtttttcg

SEQ ID NO: 1735 - DNA, 168 bp, Staphylococcus aureus
ttaatgcactccacgtttcgaaatcatcatatgactctatgttgcctttttcaacccattttattcgtaaagtatctgtttctttagcttctacatcattcgtacttacagtgattttaaatacaacaccaatatgtaccttgcccacttcattattatcgtcattaa

SEQ ID NO: 1736 - DNA, 661 bp, Staphylococcus aureus
agcagctgctccaccagcaatttggtgcatcataggtgtttctacttccaagaaacctttattatttaaataattacgcatttcttgaatgattttactacgattaataaatgtacgagtgctatcttcgttcgtaattaaatctaaatatctttgacgatatctctgttcaatatcctgtaaaccgtggaatttatccggtaatggtcgcaatgatttagttagtagcgtgaatttcttcgctttaaccgataattcgccagtatttgttttgaacattacaccttcaacaccaacgatatcgcctaaatcagcatttttccataaatcaaattcgtcatcgccaacttgatctttacgaacgtaaatttgaatttgtccagctaagtcctgaacgtgtgcaaatcctgctttacctttaccacgcttagtcattaatcgtccagctatagcgacatgactatccgcttctttttctaccaattcttctttagaatactggtcccactcttctttcaaatcactagataaacctgaacggtcaaatttagaaccaaacgggtctataccaagatcatataattcttgtaatttttgacgtcgaaccaacatttggtcattcatttcttctgacataactttctctcctttaatttgttgt

SEQ ID NO: 1737 - DNA, 277 bp, Staphylococcus aureus
agccttcgtttcacttggttgtgctttagtgacatgttctggtaaattgatttttacagtcttttcagttgattctgaaataccatctaaatctacttctgcatcaacttcgcttatattttgtaagtcatctcgactaccgaagatttcaatttctttatcttctaaatcaatcgaacttaactctttatcatctgctaaactacctttctgtttaacatttactttaacctttttgctaaaaggctctactttaacttgtaaattcacttcatta

SEQ ID NO: 1738 - DNA, 329 bp, Staphylococcus aureus
tgcatttttagctgaaccaggatgaacatttacaccgtggcatgtaataaccgcttcagcagcgttaaagctttcatattgtaattctccatattgactaccatccatagtataagcaaaatcagcattgaagcggtcaacatcaaatttatgtggaccacgaccgatttcttcgtctggtgtaaatccaatgcgaatggtaccatgtttaatttctggatgttcttgtaaataacaaatagcttccataatttccacaatacccgctttatcgtctgcacctagtaacgatgtaccatcagttaccattaatgtatgaccaactaaac

SEQ ID NO: 1739 - DNA, 254 bp, Staphylococcus aureus
tcaatatcttcttctaaccacttcttcacctgcgtcgtgatggctactttttcatctttcacaattgtataatgtgcgtcactcacttcaacgtcatctgcttgtaatagttggcgcacgcattgaccacctttatctgtatcaaagtctctagtatctgataccgttagtacggctgctttaactgtacgattcaatttaacgttttgatgttcgcccataatattacactccttttgtcttatcttttttta

SEQ ID NO: 1740 - DNA, 143 bp, Staphylococcus aureus
ccaattttccgatctactttcacaatctttagcgactgacttaaactcatcaccaactagcaattgttcgacaactaaccgaattgccaaataatccgttaacaaatgttgttcaaagtgatgctgttgtgaacggtaataca

SEQ ID NO: 1741 - DNA, 171 bp, Staphylococcus aureus
tacggtgtggaaggaataacaattgttaaacctggcgatgaagcaaatatactttcaatactttgtgaatgatatagtcctccgtgaacaccgccaccaaatggtgcacgaatcgttaatgggcattgccaatcattatttgaacgataacgcattttcgcagcttcacta

SEQ ID NO: 1742 - DNA, 968 bp, Staphylococcus aureus
acgtcaatacctttccaaatttcttcatttactaagcgttcaacttgatcaatttcatcattagtcattggaccaaaatgagagaaatcaaaacgtaaacgatctgcttctactagtgaaccagcttggttaacatgatcacccagtactgatttcaacgctgcatgtaataaatgtgttgcactatggttcttttgaatgtcacgtcgatcattttggttcacttcagcagacactgtagcgccaacatttacttggccaaattgtactactcctttatgcaagttttgaccatttggtgctttggttacttcactaacagcaatttcaaaattgtcattataaacaatacctgtatccgcaacttgtccaccactgattgcataaaatggtgtttccgttaacatgaagtatactgtttcacccgcttcaacttgtgaaacttcttcaccattgtatatcaagtgtgttagtgttgtttgagctgtcgcagtatcataaccaacaaaagtacttgcagatgtaatatttttcaatacttcactttgaacttgcattgattgagaattttgacgtgcttgacgtgcacgatcacgttgttgttgcatttctgactcgaatgttgtcatatcaactttcaatcctgcttgcactgctatttcttcagttaattcaattgggaacccatacgtatcatacaatttaaatgcatctttcccattaatttcatttgttgtcgctttagcttttttaattaattcatttaaaatcgctaaaccatcttctaatgtttcatggaatcgttcttcttcagactttataacacgcttaatgaaatctgctttttccttaacatttggataatatggttccataatgtctgcaacaatatcaacaagtttgtacataaatggctcattgattcctaacgtttgactaaaacgaacggcacgacgtaacaatcgacg

SEQ ID NO: 1743 - DNA, 155 bp, Staphylococcus aureus; identical to SEQ ID NO: 1734

SEQ ID NO: 1744 - DNA, 371 bp, Staphylococcus aureus
tcacttacgcctgctgttcgtttaacaatatcatttaaaacatatcgtacaccgcgttcagtgattgcttcacccttcatatttacaataagaaaatcatgattgcatgactgaattggtttgaaatgttctaaataattttcgatgctttgtctacaataagcaccaaacggtacaaagcgctctttgctcccttttcctaatacggtaacaccattcgcgtaaaaatctatatcttgttttttaatatttactaattccgaaacacggatgcctgtagcatacaacaattcaagaataactcgatcccgtaaattttttgaagtgtcctcttctacagttttgaataacgcttccatttcttcttcgta

SEQ ID NO: 1745 - DNA, 268 bp, Staphylococcus aureus
ctacattatatccttcttctgctaattgtaacgcaatactacgtccaattcctcttgatgcacctgttactaaagcactcttagtcattttcattccatcctttcacatcttctaaagtttgaattgatgttaacttaacatctctatttatttttttaattaagccagataaaacttttccaggaccaatttcaataaaatgatcaacaccttggtctattagccattctgttgagttaatgaattgtactggtgaatataattgct

SEQ ID NO: 1746 - DNA, 234 bp, Staphylococcus aureus
tgaatttttaaaagcttatctgacttcttaacatgttcagcatcaataatcgttgctgccttaatttcaactttatcaaagtctttaatatcaatttgaggtttgctaggaatctcttctttttcctctttagtagcaggcggttgcattgattctttgatatatgcaatttccgcttcgctatccaatcttgggaaaataggtttaggttgcccagtaaccataattgactca

SEQ ID NO: 1747 - DNA, 405 bp, Staphylococcus aureus
tgtcattactgcgcattgatcctttttgatggatggcatctttgtacaaaggtagacttgcattaaatacaatgccatgatcttcacaatgcacataaacttctacaccatcatctttacctacaacatttgtagctttaacttttagtccaaagttatctttaaagaattgttcacctactttttcaaattctttacgatgcttcttcgcaaattcaatcgcatttttttctgcaggcggttggaagccttggcctacatattttgaagcttccatttcttctggtacagattttgtttctgtttttgtgtctttttttgattcattttccatcgtggaacatccccctaaaattaatgtcgtagctaaaactgatccaatgaattttttcatatgacacctcg

SEQ ID NO: 1748 - DNA, 195 bp, Staphylococcus aureus
tgacgcatgcgcttcactcattggcatcaataaatcaattgtttgacgctgttgcatcgaaaatgcagtagcatcttctttagaaactaacgaatacgtaatagcttggtctaatccagcaccttctaacacttctttaaccattctagttttatattggcgatcagttagctgaccactagtaactttatcgaa

SEQ ID NO: 1749 - DNA, 155 bp, Staphylococcus aureus; identical to SEQ ID NO: 1734

SEQ ID NO: 1750 - DNA, 203 bp, Staphylococcus aureus
tgcattatttttcaagtaaaggagtcttattaggcgtccctggttttcttggatactttttcggcgtctgtctttttttatcaataatgaacatctggcgctctccagcatcttctggcaattcaaaggtatgtgtttctgtaacattaccacctaacacactaattgcaaattttgcttcttctaattcttcttcacctttt

SEQ ID NO: 1751 - DNA, 257 bp, Staphylococcus aureus
ttactcataattattctttatttaaatctgcttccgtaacataaacatcccttggttttgaaccattagcactcgaaacataaccgagttgctctaattgatcgataattcttgctgctctattatagccaatttggaaatgtctttggattaatgatgttgaaatatgtccttcattaaccataaatgcacaaacatcatcaaataattcatcttgtgattgtgtttgtgtttttttcaacaattctttttcttca

SEQ ID NO: 1752 - DNA, 167 bp, Staphylococcus aureus; identical to SEQ ID NO: 1733

SEQ ID NO: 1753 - DNA, 295 bp, Staphylococcus aureus; identical to SEQ ID NO: 1731

SEQ ID NO: 1754 - DNA, 206 bp, Staphylococcus aureus
tgccattcgaattgctgcagaaatcccacctaagccaccaccaataacgatgatatgtttagtcatgacgttcacctcttcgttttaatatgcgtagtaactgcgttaatctcggtcgattatagcgttgcacaataatgattggaacattagctatcattgcatagaaaatatttatatactttactaaacgagggcctttattg

SEQ ID NO: 1755 - DNA, 255 bp, Staphylococcus aureus
aatgaaaattctctagccatgtattttttctccttccagtttatattactgaataaatacgatagatatggcgatgccctaagcatgaacgcttaatgaaaattcattaatatagaacacactcagggtaaaagcttttatcttaccaacggtagtgagcaaatgctttgtttgcttcagccattttgtgagtgtcctcacgtttcttaacggcaccacctgtattatttgctgcatctaaaatttcgttagcta

SEQ ID NO: 1756 - DNA, 1088 bp, Staphylococcus aureus
tctaatccttcccatggatttcgtgctgcaaaaatcgaaattggtgataatggtgtaataacacgtttcgcattttcaatgactgaattgatatttaactgtgttgtcatacctttcacctcctataaatacttcttcaaataattcggatgactttctatcgctttcgagcgtgcttcacctagattaactaaccacacgtacaataccgcaaaagccttagagtatcgatgccgcgccacccaaatacttaataaactgccaaagattaaaataacaacactaatgatgacactcactgtaggcggcgttgtcgcatgtgttgttatattttgtaatacagcgtaaaaataattatgtgtgatgacgtagataaatgtcacgattgcaatcaaaatcataccaacaagacgtgccatgcgtcctttactaaaggctaccatttgattccaagatacaagtaatgaccatcctagaatgagtgcacttaacacttcatatgcacttctgtcactactcatccaaaatagaaatgccacgataatagctaatacacgtcccatgacaatccagccataagcgtctttagcagatgcttgttttggaatattgaatcgcttcacgatagaacctgattgtaaaaataatgttgctttaaaaataccgtgcaatattaaatgaataatcgctgctgaatatacacccaatgcacattgaactaacataaagcccatttgactcatcgtagagcccactaattggcgtttatagtcaacttgaactaagctaatacccgatcctaacaatacagaaatactagaaaggataagtaataatgataacgcaaatccattatcaaatatcggcgcaaaacgagttagaataacaccacctgcattcacaattcctgcatgcataattgccgatactggcgttggtgccgttacagattcaatcaaccatcgatgaaaaggaaattgtgctgccggtatcatgacagctaatacaagtagtacattcgtcaacaatgaccatgtcggatgaactatatgttgtggtacccgccactcgccagtcgcaatataaat

SEQ ID NO: 1757 - DNA, 305 bp, Staphylococcus aureus
tgtgaatcaagttctggattgattgcacaatcaccaaagatgtattgttcatcacctttaatcataaagaagatacctgatgttcttgatacacctggtttcgttttgatgatttgtaaagctggacgcacagtgtcgcctgttgaatgtgctgcaccactaactaaaccatctgctttaccagcataaacaagcattgtaccgaagtagttcacattgtttaataattcttgtgcttgttcttcagtcgctttacctttacgtcgttcaacaaatgattgaactaattcagctttcaattcact

SEQ ID NO: 1758 - DNA, 186 bp, Staphylococcus aureus
attttagtgcctaaaccatcaatattcatggcttgtcttgatacaaagtgaatcaatccttcaacaagttgtgcttggcattttggattaatgcaacgaagtgctacttcgccttcaatacgtactaattcatgtccacaacttggacaatgggttggcatatgatatgtgacagcatcctcaggt

SEQ ID NO: 1759 - DNA, 170 bp, Staphylococcus aureus
taaatgatggattaaagccactttgaattaaaggaggtagttgattatctgggacgaaatagtctcgtgctgctggaccagttgggtcttgtgcaaataagtattgatcatatgcagatacttgaccattcggtgtaacgaatgaatttgctttcactccccatttaaca

SEQ ID NO: 1760 - DNA, 448 bp, Staphylococcus aureus
agtttattctgttttaaaaacttgtgttgcttcaacagcttttttccaacctctatataatttttctctttcgccttcatccattttcggatcgaatttttcttctaatttccagtttttagcgatatcatctttactctcccagaatccaactgctaaacctgccaaaaatgcagcacctaaagctgtagtttcttgaatttcaggtctttcaacagaagtattaacaatgtctgcttggaactgcataataaagttatttttaactgcaccaccatcgacacgtaaactttggacatcaataccagagtcttttgacattgcttccataacgtcacgagtttggtaacatagtgattctaaagttgcacggataaagtgctctttttcagttccacgtgttaaaccgaaaatcgcaccacgtgcttcagaatcccaatatggtgtt

SEQ ID NO: 1761 - DNA, 656 bp, Staphylococcus aureus
gcaattgaaatattaatgtctttatgtaagacaatttcatttccttgccagctactatttaataaaggatatgcttttaaagcatctgctacagcttttacaaagaaagcaaagaacgttagattatatccttctttatttttaaagctgtttttataatgatttctcgtattcacaagatttgtagcatctacttcaatcatcatccatgcatgtggaatctctgttacactattaaccatattttgcgcaattgctttacgcacaccatttactggtattgtgctgttttcactattgtcttcagatgattggttacttgatgtatctactgatgttgattttgtttgaacttgtttgtcagattgagctgtggtaccaccattttcaataactgacattatatccttcttagttacacgaccttcaaatccactacctacaacttgtgataaatcaatgtcatgctctgaagcgagtttaaatacaacaggtgaaaagcgaccattattacgtggttgattttgtttagcagtagatgtctgttccactgttgcactagcttttttagtagatttctgagtatgctcatccacttttgcttgtatctcttcagttgtttcatttgtcttttcatcagcagtttcaattttaca

SEQ ID NO: 1762 - DNA, 244 bp, Staphylococcus aureus
tacgttcttcatgtcgttttcttaaacgctcttcttcttcaggatcacgtggtttctttaattgttgagaaactttttcgattaattcttcttcagtaagcgcagccagtgggcggttattaacaaaagtgaatgtttttcggcgtccaggtccacaataagattgacaacctatcacgatttcagcatcgggatctaatttttccaacttcttttgtaacgttcttatattgactgcctgaca

SEQ ID NO: 1763 - DNA, 140 bp, Staphylococcus aureus
tgtgatgttaccttcacctggtactaaacgtacacgtgctactgagtttttacgacggcctgtgcctctatattcaacttgtgccaaagtcatttcctccttctaattaaccacgtaattcgtagttttctggttgttgt

SEQ ID NO: 1764 - DNA, 372 bp, Staphylococcus aureus
tcgatattctccaactctaacagcttaattttattattaatcgttccaccgaaccctgttaagctacccgttttaccgacaacacgatgacatggcacgataatagataatggattacttccgactgcacctccaaccgcttgggctgacatttttggcttgttaagcagcttgcctacttttttggcaatagcaccatacgttgttagagtcccataaggaacctgtcttaattcattccaaacacactgttgaaaatgactacctgttggctttaaaggtattgtgatttcaggattgtcacctttaaaatacgcgtctaaccactgtgtcgcctctctaaatatcgctaaagacgtattttcttcccta

SEQ ID NO: 1765 - DNA, 266 bp, Staphylococcus aureus
tatgttggtttcataccgacaacgccacaatatgcagccggttgtctaattgaaccacctgtgtctgaacctaagctaaatggtactaagccagctgcaactgctgctgcagatccacctgatgaaccacctggcactgctttatggtcaaatgggttaactgtttttttgaaataagatgtttctgttgaaccacccattgcaaactcatccatatttaatttaccgattaaaacggcattttcattatgtagtttttccattac

SEQ ID NO: 1766 - DNA, 169 bp, Staphylococcus aureus
tgtttgtcgtttctgctgcatctgcttgatgcgccattgtaaatgtagcgaagcccatcgttgcaatcgctgctgctgttaattttttcatgtataaaacatcctccattaaagttaaagttagttttcaattaaactgtactgcacatactaaaagaattagacaact

SEQ ID NO: 1767 - DNA, 169 bp, Staphylococcus aureus; identical to SEQ ID NO: 1766

SEQ ID NO: 1768 - DNA, 337 bp, Staphylococcus aureus
tgtttcttcgctttcttcagttatgtcgcttacttctgaaactgaagacgaagttgattgatcaacttgctcattttccaattgattatcatcttgactttcttcaaatatttccgtttgagttgaatcaacagaaggtttctgctctgaatattgttgtgcattttgataatcattttctgtttctgcatgaccaataagttgattgttctcaacattgtttgatgtcatattatttgttttatatgcatttgtatttgactcttgtgaatcagatcttgatgatggtgtggcttgactcgcaggcattctttcactcacagcttgcttactttgt

SEQ ID NO: 1769 - DNA, 380 bp, Staphylococcus aureus
taaatccatccatttatatattacttttaggtcttcttcgctaaggcctaatgatttataatcaatcatgttaaatcctcctatttatacgtgaatagctctactttctgctttcaatcctaattccatcaacacttcagagatggaaggatgtgcgtgtgttgttagtcctaattctaatgccgagccattcatgaactgtaacagtgatgcctcattaatcaattctgttacatgtggaccaatcatattaatacccacaatttcttcagttgattgatcaatcaccatttcgctatacccttcgtttgtgtcatggctatcaatcactgctttaccaattgctttaaatggtactttaaaacttttaactttcattc

SEQ ID NO: 1770 - DNA, 151 bp, Staphylococcus aureus
gccattgcttcagaagatttctcagtgattacggggcgcttaagaatatctcttgcttccattatccgagcacctcctcaacttttttagcagcagcttcagtaattactaagctgtcagcattagtgatatctaaaacatttaaaccttg

SEQ ID NO: 1771 - DNA, 178 bp, Staphylococcus aureus
tggaccttcacctgcaactgcgcggtcacgtgcttctttagttgcttgatatacagctaacgcatccataccatcaacttggataccaggaatacctacagcaattgctttttgagctaatgtttcagcagcagtttgcttgcttcttggtgttgaaattgcatagttattgttttga

SEQ ID NO: 1772 - DNA, 133 bp, Staphylococcus aureus; identical to SEQ ID NO: 1673

SEQ ID NO: 1773 - DNA, 126 bp, Staphylococcus aureus
atacatggggtttaaatcattatctaataacagcaccttgttcaattaatgctgcttcaatttccgcttgtacttttgaaacgcgctcatctgtcaatgtttcttctgtgtctaaataatttaaac

SEQ ID NO: 1774 - DNA, 160 bp, Staphylococcus aureus
tacgcattgtaagctgtgtacctggttcaccgatagattgggctgcaattgtaccaactgcttcaccaacttcaactttttcaccagtagcaaggtttttaccgtaacatttttcacaaacaccatgtcgtgcgttacaagtaaatgctgagcgaatata

SEQ ID NO: 1775 - DNA, 266 bp, Staphylococcus aureus; identical to SEQ ID NO: 1765

SEQ ID NO: 1776 - DNA, 195 bp, Staphylococcus aureus
agagtagtgaacgtcacgtacttccatttgagcacgttcacgtgttaaaccaccaggtcctaatgctgatagacgacgtttatgcgttaactcagctaatgggtttgcttggtccatgaattgtgataattgagagctaccaaagaattctttaatagatgcaataacaggtcgaatattaattaattgttgagg

SEQ ID NO: 1777 - DNA, 413 bp, Staphylococcus aureus
cactcgtcataacatcaattacacttaaccctttaccacctttatcatatccaccttcaaattgatttgcggcaagagcgccaccccacatgaaattttgcggtaattttgtcattattacaacacactcctagtttttaaatattttaaaaataacatcttcagtcgtaatgatttcattcattgtcagttctacttttcctaaatcggcagagttgctaataacgacaataacgtcagcattgtagccttgttgttgtatatattgctggtcgaattgcaacaacgtttgccctgcttcaacatgatcattttgctttacaaagcacttgaaccctttaccttccaagtcaactgtattcacgccaatatgaatgactatgtccacaccgtcttctgattgaataccaact

SEQ ID NO: 1778 - DNA, 205 bp, Staphylococcus aureus
gccttttcaagtcgttgttccactttcttaatttcattgttcatgtttaactttgccacgttaatcacctttggtattatctttttctttatagccaaggtgcattgcagcaacgccccctgtaaaactacgtactcttacatttatgaaacctgcttcttcaaacatgcgcttcaactcttcttttccaggaaaattaaacgta

SEQ ID NO: 1779 - DNA, 103 bp, Staphylococcus aureus
caagagatcgaacgacgacatcagcacctgcacttaaaattaagaagcctaatatcgttttaatggttcctgaagtgatcgttgcggcaggttttttctgaac

SEQ ID NO: 1780 - DNA, 159 bp, Staphylococcus aureus
gcaattctaagttgtaataatgcgacttcaatttgtccatattgatttgcgtcataattgcgaatcactgtttcattacttgtccaaatctgattcaaactattgttcaaagattctaattccgctttatttttatctttaatcgcttttgtcatcgca

SEQ ID NO: 1781 - DNA, 257 bp, Staphylococcus aureus
tttcgtgtgacaatgttgtaataaatgatggattaaagccactttgaattaaaggaggtagttgattatctgggacgaaatagtctcgtgctgctggaccagttgggtcttgtgcaaataagtattgatcatatgcagatacttgaccattcggtgtaacgaatgaatttgctttcactccccatttaacacctttagagttctgactttctacttcagtaacatagtttttttgattataactaattgttttagag

SEQ ID NO: 1782 - DNA, 91 bp, Staphylococcus aureus
gcctaacttttcacccagtgcaccgaatggttcggctacagaataccctgtaattctgtgttcactcaatgcggctggcatttctgctggc

SEQ ID NO: 1783 - DNA, 105 bp, Staphylococcus aureus
cctgtttctggattcttaattcctggtttacctggaacttcctctttctctcctgttggtaacttcggatcaaattcgtctcgatgacctggcgctattgtttca

SEQ ID NO: 1784 - DNA, 256 bp, Staphylococcus aureus
tcacgtacacgtggtaatgatactgaaattaatttgtctaagaattcatacattctttcaccgcgaagtgttactttcgcaccgattggcataccttcacgtaaacggaaagtcgcgattgattttttagctttagttactaatggtttttgaccagtgatcaattctaattcttcaacagcattgtctaatactttagaattttgtactgcgtcacctacacccatgttcacaacgattttatctatttttggta

SEQ ID NO: 1785 - DNA, 407 bp, Staphylococcus aureus
cacctgtcgttttcgcttggtctacatcattttgactattagcagcttcaatgttgctatttgcttgtgtcacagcattatctacgtccgcattagccgctgcaatttcttcagcagtaatgtcttgcgtttgagcgattgctgttttacgttcattcgctttcgtagcaattgcttctttcgcattatctttagttgttgttgctggctgaatcgcttcaattttagcaattgctgcttttttagccgcttcaacttccgcatttgtatgtgctgcatctattgcggcatcagctgttgttttttcagtttgaacttgttgtttagcagctgctttttcttcagttgttgagccgttatttccatcaattgctgtttcttgagcttgtactttatctgcaattgct

SEQ ID NO: 1786 - DNA, 91 bp, Staphylococcus aureus; identical to SEQ ID NO: 1782

SEQ ID NO: 1787 - DNA, 202 bp, Staphylococcus aureus
gattaacagcagcctgcttttcttcgtcagttgcattaggtgtttgtttaaccgcttcaatacgcttcgccacttcagcagtgattttatctcgcgctgcttgtttttttactacatcaacttgaacagcatcgatattattctctgctactgtcgcagcttggtctacttctgcatttgtgttagcttgtttaatactttc

SEQ ID NO: 1788 - DNA, 195 bp, Staphylococcus aureus; identical to SEQ ID NO: 1776

SEQ ID NO: 1789 - DNA, 178 bp, Staphylococcus aureus; identical to SEQ ID NO: 1771

SEQ ID NO: 1790 - DNA, 105 bp, Staphylococcus aureus; identical to SEQ ID NO: 1783

SEQ ID NO: 1791 - DNA, 147 bp, Staphylococcus aureus
gcttctctttcaaaccaaatatttgaaccgtgttctgcaaataaatcagcaacatgattcactgtttctttcgtcatgataatttcgccattttcagcataaaatactggtaacggtacaccccacacacgttgacgagaaataacc

SEQ ID NO: 1792 - DNA, 502 bp, Staphylococcus aureus
taatttgttgcttgtctactgtcaccttctctaaggataaacacatctatatttgagttttctccgtctttaaatttatctttatcagatccaagtaaagtgattcgagaatgctgttgccctactgtgacttctaaatagtgtttaccctcatcagtatatttaaatccagtcacatttttacgctctaaaattggtttattataatagtgttttaactctgattcactttgttgtttaacttctgctttcgcttgtactgattgtacattcgatgtaattacacctgttgctaacattcccaatgctaaacttgcttttgctatcgctttaaatttcataatttttagccccaatctatttaaatttgatttttcaattacgtaatatgaacaatctacctacattatattgaggcgctatcccctttcaaattaaacctcatttaactaaacttgaatcattgttaaggtaattaataaaatgctaactgttattaatc

SEQ ID NO: 1793 - DNA, 273 bp, Staphylococcus aureus
gctaaattcgtgtcatattcaaagaaggcttctatttcattaatcgtgttctttccaccatatctaaaaaattctggctcgtatgatacaaattcataatctgaaacttctgtcgtttgtcgaacatgtggtaaccaattcttcaagatgctgtatatttctgcgtaattttcgtcattcctgaataacctcaactttaaaatgtcaccttgtttgatataacgcattaaaaaatattgatctatatctcccttatctttaagatgttttaca

SEQ ID NO: 1794 - DNA, 422 bp, Staphylococcus aureus
cgacacttggatatggcgcgtcttcagcagcctttgtcgctttattgatgatgtctttatgctccgcttctatttctgccaaccaagcatcatcgataatgccagctgaaagcaactcttttttgaacttttcattgcagtctgcttttttaagcgtttcacgctcttctttcgtacgatattggtcgtcatcatctgatgaatgagctgtcatacgacttgttactgcttcaatcaaagttgaaccttgaccagaaatagctcgatctcttgcttctttcatcgctttatacattgctaatggatcattaccatctacttgttcaccatgtataccgtaaccaagtgctctatccgataatttttcagctgcgtattgtaatgaatcaggtactgaaattgcatatttattatttataatg

SEQ ID NO: 1795 - DNA, 241 bp, Staphylococcus aureus; identical to SEQ ID NO: 1677

SEQ ID NO: 1796 - DNA, 195 bp, Staphylococcus aureus
caaaggacataaggcaatgaactaagtgatttgtctataaagcgactcttcaaaaattgttctacctgtttgatcttgtctttttgatatgcgatatcttcgaatgttaagttgagcgcctttaaaacttcacttttagtaatatcatgattcaacctttgatcaatcaacttaatgaagaaacggcgaacttca

SEQ ID NO: 1797 - DNA, 109 bp, Staphylococcus aureus
tgtttctgggttcatcgtcgtttcccataattgttcagggttcatttcacccaaacctttgtaacgttgtaacgtgaagcctttaccaagttctttttgcaatttatta

SEQ ID NO: 1798 - DNA, 255 bp, Staphylococcus aureus; identical to SEQ ID NO: 1755

SEQ ID NO: 1799 - DNA, 97 bp, Staphylococcus aureus
ccttatcatttggtaagactgttgactgtgtaacaatacatgatatttttcctcacgccaaagctgttcgatatagccacgttctttcataaaatta

SEQ ID NO: 1800 - DNA, 287 bp, Staphylococcus aureus
tctttttaagtgcttttaatatttcatcttttaaagctaggactcctttgtactctaaatgtacaccgtctggtgcaaaatattcactatgtccttgtgatcgcttataccaatcaattaatgtgacattggactttcgtttcgccgcgtcagctaataatcgatttacatttgcctcataaattcttggaacacgtgtattaactaaataaatcttggcttttccaaattgattaagtaaatcgtcgagctgtttgacagtaaagtcgccatttgtacctaattct

SEQ ID NO: 1801 - DNA, 751 bp, Staphylococcus aureus
tacacttggatcttcatcgtaataatgactcattattccacctcatcttcactttgtaactcgtcattataattataacatttcactcagtctttaaatgaataaaaccccgttatcaaaataacggggttttaacttctcaaagaatcattatattatagcaatacttgctataaaactttgattattaagtttaagatacttgaattattttaattctacagtagctccaacttcttctaattgttctttaagtttttcagcttcttctttaggtaaagcttctttgattactttaggagctccgtctactaattctttagcatcttttaatcctaaaccagttgcttctttaacagctttaacaactttgattttagatgaaccagctgaagttaactcaacgtcaaattcagttttttctgctgcagcgtcagcgccaccagctgcacctgctactgctactggagcagctgcagttacaccaaattcttcttcaattgcttttactaagtcgtttaattctaatactgacatttctttaatcgcttcaatgatttgttcatgattagccattttataattcctccattatttttaatttttttacgctaaaaattattcagcgttttcttctttttgttctccaatagctttaaccgcataagcgaagttgcgtacaggagcttgtaatactgataaaagcatagatacaagaccatcgtgtgaaggtaatgaaccaacagtttta

SEQ ID NO: 1802 - DNA, 226 bp, Staphylococcus aureus
gtgttagcaaatgttaaaccgcctataacatatggcgttttgccactcgcggcaattcctataacgacatcttttgatgttaaatctatatttttcaaatcttcttccgctaattttttgtgatcttccgcaccttctacagccatcgtcatagcatgttgtccaccagcaataatacctataatttcatgagggtcagtattgaatgtaggtacacactccgctg

SEQ ID NO: 1803 - DNA, 180 bp, Staphylococcus aureus
gccttgtcgtccttcaaagtttcgattacttgtagatgcacaatgtacgccctcaggtacttggtcaggattcatgcctaaacacattgaacatcctggttcacgccattcaaatcctgcatttttaaagatagtatctagacctaatttttctgcttctttttttactgtacgagaacc

SEQ ID NO: 1804 - DNA, 129 bp, Staphylococcus aureus
cacgcgttgcattaatcccaacaatccaatctgcctcacttctcgctaacgctgcataatacaaatcgttatattgacgaccgtcttttaaatttttaaaaccttgttgaatagcttttttagtaactg

SEQ ID NO: 1805 - DNA, 480 bp, Staphylococcus aureus
tattcaatgtttgattttaataatctttcgaatgtttctttttcaagtaaatctgccatacgaataccgatacgttgaactttgtctacatatgctggaccgataccttttttagttgtaccaatcttattgtcaccacgtaaacgttcttcatattcatcttgtgctaagtgatatggtaaaatcacttgcgcacgattagatatacgtaaattacttgtaggaatgccacgttcatttaatccgtctaattctttcaatagtgcaactggatcaacaacgactccgttaccgattaccgctaatttgtctttgtaaaagataccagatggtactaaatgtaatttatatgtttctccgccaaattgaatggtatggcctgcattattaccacctgaaaaacgcgcgataacatctgactgttctgccaagaaatccgttatttttccttttccttcgtctccccattgtgtcccaact

SEQ ID NO: 1806 - DNA, 203 bp, Staphylococcus aureus
tgtgggtgatcgttagggttcattacagaaccacgaactgttggacggatacctttccatcttgaacgtccggctttaccaacgttaactaattcgtgttgtaggttaccaacttgaccgattgtagcacggcaagtagataagatcatacgaacttcaccagatcttaatctgattaatacgtatttaccttctttaccaag

SEQ ID NO: 1807 - DNA, 401 bp, Staphylococcus aureus
tgctaaattgataccttgatttaacattaatttgaaaaatttaccgaacgcttcgccgtcagaatgttcaacttgatcataatgtgtgactttttcatctgtaaagtacaatgttaaagatccataaatacgattaattgtagctgtgatattatgtttttcgattaatttaagtaaaccttcttctagttgttggcctaagctgtctaatttttcataaacaccgtcttgttctagtacttcgagtaatgcaatacctgctttcatagataacgggttaccagccattgtaccagcttgatatgcaggtcctagaggtgctacttgttccataatatcttgacgtccaccatagcctccaattggtaaaccaccgccaacaattttaccaaatgcagtta

SEQ ID NO: 1808 - DNA, 294 bp, Staphylococcus aureus
aactgttactaatttttgaccaaagcgaatcgtcagcacatcttcaactttaacatccgatccagctttagcaacattaccatttattgtaattctaccttgatcacttacttcttttgctagcgtacgtcgctttattaaccgtgatacttttaaatatttatctaatctcatgtattactctcccctttttctagccactgctttaacgcggcctcatcaaatgacttatccttcgtcttctcatataaatttaaaaaatgctctgcaaatactttttcaaatttaactctt

SEQ ID NO: 1809 - DNA, 122 bp, Staphylococcus aureus
taacttgtgttgccggttgaatcactactatattttgtgtgccctgatcttttgcttgtgcaacttcttgattcgtatctgctgcattaatattttgcttcgctgtggctacagcttgatca

SEQ ID NO: 1810 - DNA, 656 bp, Staphylococcus aureus; identical to SEQ ID NO: 1761

SEQ ID NO: 1811 - DNA, 395 bp, Staphylococcus aureus
tatctagttttcaatgtacaatttctttttagtcaagcgctcgcatactgctttattttcataagcaatatcactttaaccaaaaaatatttgaatgttaaataaacattcaaaactgaatacaatatgtcacgttattccgcatcttctgaagaagatgttccgaatatatccttagaaaggaggtgatccagccgcaccttccgatacggctaccttgttacgacttcaccccaatcatttgtcccaccttcgacggctagctcctaaaaggttactccaccggcttcgggtgttacaaactctcgtggtgtgacgggcggtgtgtacaagacccgggaacgtattcaccgtagcatgctgatctacgattactagcgattccagcttcatgt

SEQ ID NO: 1812 - DNA, 149 bp, Staphylococcus aureus
ttgattttagatgaaccagctgaagttaactcaacgtcaaattcagttttttctgctgcagcgtcagcgccaccagctgcacctgctactgctactggagcagctgcagttacaccaaattcttcttcaattgcttttactaagtcgtt

SEQ ID NO: 1813 - DNA, 208 bp, Staphylococcus aureus
cggataatcatataatgtgtgtgctagaatactagctactcttaatgtgtccggcacaaccacttgtgttacgttagctggtaatgattgttctttattgaccactaccaacttacacccttgatcagctacattttgacagaacttatgactgtctacagtatatccaactgaagcgacaaaaatgctaccttctctcgctgtacgt

SEQ ID NO: 1814 - DNA, 248 bp, Staphylococcus aureus
aagtctatgaagtgttggtgcacggttaagtaatacaggatgttctctaattacttcttccaatacgtcccaaacttcatcatccatacgttcgattttactcttcgcatttttaatgttagttgcaatttcacgttgaactaattctttcattacgaatggtttaaatagttcaagtgccatttcttttggtaaaccacattggtacattttcaagcttggacctactgcaataactgaacgtcctg

SEQ ID NO: 1815 - DNA, 260 bp, Staphylococcus aureus
tcgtttaaatcatgtaatcaaatttaatattcgtaaaattattctacaacgatacccatactacgtgcagtaccttcgataatacgcatagctgcttcttcgtcagcagcgtttaagtcttgcattttgctgttagcaatttcgcgtacttgatctttagttactgtagcaactttagttttgtttggttcgcctgaacctttttcaataccagctgcttttttaagtaatactggagccggtggagtttttgtaataaa

SEQ ID NO: 1816 - DNA, 317 bp, Staphylococcus aureus
ctgattcttgcattgttacaccgtataacctatctgcaaattccattgttcctttacggtgtgtaataacaatgaattgtgtttcgtctgataactcatttaaatattttgcgtatctaataacatttgcttcatctagtgcagcttcaacctcatctaatataacaaaaggtgcagatcttacttttaaaattgcaaatagtaaagcaatagcagttaatgcacgctcaccaccactcagtaacgataaatgttgcaactttttacccggtggttgtaccacaatatcaataccagctgttaaataatcggcttca

SEQ ID NO: 1817 - DNA, 99 bp, Staphylococcus aureus
ggtttacctggaacttcctctttctctcctgttggtaacttcggatcaaattcgtctcgatgacctggtgttatcgtttctggtccgtattctgttaat

SEQ ID NO: 1818 - DNA, 266 bp, Staphylococcus aureus
tcaggattagctcctgctcctaaaccacgtgttaatttttcaccgatttggattttagattcagctttagataagtttaaagcttgaccgtctgtgttgatagcgataaattcaacattattcattccgtggtcaatcattcggtttacggcgttgttaccgccaccacctacaccaatgacctttaaagtcgctaaatgattaaatccttgttcaaattctaacatttaaatttcctcctagttttattggccaataatcattca

SEQ ID NO: 1819 - DNA, 320 bp, Staphylococcus aureus
tgctaaaccgtaaggtgatgtataggggctgacgcctgcccggtgctggaaggttaagaggagtggttagcttctgcgaagctacgaatcgaagccccagtaaacggcggccgtaactataacggtcctaaggtagcgaaattccttgtcgggtaagttccgacccgcacgaaaggcgtaacgatttgggcactgtctcaacgagagactcggtgaaatcatagtacctgtgaagatgcaggttacccgcgacaggacggaaagaccccgtggagctttactgtatcctgatattgaaattcggcacagcttgtacagga

SEQ ID NO: 1820 - DNA, 356 bp, Staphylococcus aureus
tgttatcagcctctttaattgctgctttaatatcagcttttgcacgttcaataacttcattttctttgtcttcattccataaacctttgttttcaaggaatttacggaaacgtactaatgggtcttttttctcccattcagcatcttcgtctgaagttctgtaacgagttggatcgtcaccagccattgtatgaggaccataacgatatgtcatagtttcaattaatgttggaccttcacctgcaactgcgcggtcacgtgcttctttagttgcttgatatacagctaacgcatccataccatcaacttggataccaggaatacctacagcaattgctttttgagctaatgtttca

SEQ ID NO: 1821 - DNA, 186 bp, Staphylococcus aureus
tatgtttaaattcactaaatggccagaacctaaatgaaactttaccaacaatttggtcttcatcaatgaggccaaacgcacggctatctttacttacttcacgattatctccaagcactaaatatttaccttttggaatgacatttgatttaggattcgcattcggtaaatctttaacttggaaag

SEQ ID NO: 1822 - DNA, 260 bp, Staphylococcus aureus; identical to SEQ ID NO: 1815

SEQ ID NO: 1823 - DNA, 263 bp, Staphylococcus aureus
atcaaagttgaaccttgaccagaaatagctcgatctcttgcttctttcatcgctttatacattgctaatggatcattaccatctacttgttcaccatgtataccgtaaccaagtgctctatccgataatttttcagctgcgtattgtaatgaatcaggtactgaaattgcatatttattatttataatgacacatacaaaaggaagtttgtgtacacccgcgaagtttaaaccttcatggaagtcaccttggtttgagctacc

SEQ ID NO: 1824 - DNA, 277 bp, Staphylococcus aureus
caacatttccaccttcgatgacttcaatgattggcaaatcaaactttttagcaaattcataatctctgtcatcatgcgctggtactgccataattgctccagtaccatatgttgataatacataatcagcaatccaaatttgtactttttcaccagataaaggattagttgcatatgcaccagtaaatacacctgatttatcttttgctaaatctgtacgttctaaatctgactttttagaagcttctgtttgataagcttttactttttctttata

SEQ ID NO: 1825 - DNA, 194 bp, Staphylococcus aureus
taaattcttttaaatacgcagcatcagcttttaagtaatggcgtaatgcgtcagctcctatatctccggataacatcttctgaataaagtcatcctcataaatatcattaatgattggctttgcagcttggtacaatttttgtgaaaattccattgtaaaaaatcctccctaaataaaaaaactacttccaaca

SEQ ID NO: 1826 - DNA, 256 bp, Staphylococcus aureus
cgacgtcctttcatacctgttttttcatctacaacatttacaaatgaatcaatattagctagtggagactcaccagtccctgatggcttgatttcatctgtttcaggtaacaacaatggtagctcttcttcaggaacagttgtcattgttccatcttcccaatgaatgacaggaattggttcgccccaataacgctgacgactgaataaccaatctcttaatttgtaattaactttcttttcgccagcaccttttt

SEQ ID NO: 1827 - DNA, 215 bp, Staphylococcus aureus
cacgacgttctgaacccagctcgcgtaccgctttaatgggcgaacagcccaacccttgggaccgactacagccccaggatgcgatgagccgacatcgaggtgccaaacctccccgtcgatgtgaactcttgggggagataagcctgttatccccggggtagcttttatccgttgagcgatggcccttccatgcggaaccaccggatcactaagtc

SEQ ID NO: 1828 - DNA, 173 bp, Staphylococcus aureus
atttttgtctccaactacaactaatgcagtgaaacggaaacgacgaccaccttttacaacttttgctacacggttgattgtaacaacgcgttcttcaaattctttcgtctcttcttctctacgagccatgtatttgtccctcctttaaattaaaattctaatccgctttctct

SEQ ID NO: 1829 - DNA, 181 bp, Staphylococcus aureus
tgtatcgatattatattgtaggcgaacaaaagcacttgtaattcgatttagcgtgctgacttgatccgcaacttgtaatttaagaattcttgtcattataagccctccatttcatgatttgatttgccactcggaaccattggggttacagcttcagtaggggaaatacgaacctcaatta

SEQ ID NO: 1830 - DNA, 630 bp, Staphylococcus aureus
acagattacatttcccaaagtttcctacttatacatttcttatttctttttcaagattctctacttcttgtttaaaaataggatcttcttttaaatctttagatattttttcatgagcatgaatgacggtcgtatgatcacgcccaccaaattcttcaccaattttaggtaatgagaaatctgtaagctctctagacaagtacatagctatttgacgcggatatgcaattgactttgtacgtttttttgcactgaaatcttcaattctaacattatagtactggcctacaattttttgaatatcttggatggtaatctttttagattttggtgcttgaatgatatcttttaaagcttcagcagttaattcagttgtaattggttttcctaataattgtgaatatgcaagtaaacgtgttaatgcaccttctaattcacgaatattagattgaatttgatttgctatataatttaaagcttctggtggaatatctaatttttcttcttcaattttcttctgcaaaattgccattcgagtttcataatctggtggcgtaatatcaacaattagcccccattcaaagcgtgaacgtaatcggtcttctaattgtgcaatttcctttggtggtc

SEQ ID NO: 1831 - DNA, 180 bp, Staphylococcus aureus; identical to SEQ ID NO: 1803

SEQ ID NO: 1832 - DNA, 158 bp, Staphylococcus aureus
tgtaatagataccgaggttccatctttttcttttgcgatctcactttcttctcttaaataatcaatcatacgaatatctctatccagggtctcatctgtttgcttaaaataagctactttaaccgtctgcccagtcttcaatttaccttcgaattgtt

SEQ ID NO: 1833 - DNA, 175 bp, Staphylococcus aureus
cctacagtcacttcatcaggaactaattcgccacggtccatataagacttagcttctttacctaattcagtttcttcttttatagcttttctgaacatgtcaccagttgaaatgtggggtattgggaatttcttgacaatttcacttgcttgagttcctttacctgcgccaggta

SEQ ID NO: 1834 - DNA, 255 bp, Staphylococcus aureus
cctttgtatggaccatgaactgaacctaatgctggcgctaatgcatcaataccagttttttcaactagttcttgacattctttaggatcagcataaatgatgccgtctgctacaacatcatcttcttgtccaccaacagtacctaattcagcttctacagaaacacctttttcatgagcgtattcaacaacttttttagttgttgctacgttttcttcgaatgggctgtgtgaagcatcgatcattactgatgtg

SEQ ID NO: 1835 - DNA, 473 bp, Staphylococcus aureus
tgttctatatttttgataacttcttctttacgtttttgtaaattgaccatatattggtattcgtcatcaatttgctttatttgaacttcatctagtccaccagtttgctcttttcgatacctcgcaataaatggtactgtatttttttcttctagcagtgttaatactgcttcaatttgttttttactaaattgatatttctctatgattgaattaatcaattgattgtccatttacttaacccacactttttcttaaatttactcatttattttaacatattctaaaatacttctattaagatatgatacttaatgtaattttcacttccaaaacatttaaaacgaatgattaggtcatactatattttaaaacgcactaagattattgaaaatgacacaccatcatttctaaatttcataatctaagactactttttttattctaatagcaacccacctatttaaaacgac

SEQ ID NO: 1836 - DNA, 330 bp, Staphylococcus aureus
taagtaacgaaagctagatctctataataaggcgctgtaatatcaccttcttctaatgcgtatgccatcccaatctgagttgcttcttgtccttgaccacttacaacaaatggaattttacctgcacggttcaataaccacagtctttcatctatttttctacctaaatccatccatttatatattacttttaggtcttcttcgctaaggcctaatgatttataatcaatcatgttaaatcctcctatttatacgtgaatagctctactttctgctttcaatcctaattccatcaacacttcagagatggaaggatgtgcgtgtgttgtt

SEQ ID NO: 1837 - DNA, 352 bp, Staphylococcus aureus
tgctaatatcggtagaattgaaataacggctaagaagatagaacctacaaaagttaaacgatataaaactttagtaatatattttttggtttgttcaccaggtctaatacctggaacatagctaccttgtttcttaaggttatcagccattttttccggattaacttgtacaaatgcatagaagtatgtgaatagtataattagtacaatatatacaaccataccaacattacttgaaggatttgcagcattcgcaatgttttgtgcccattctttatctggatagaacaacgttaatgttctaggcagtaagaagaacgccattgcaaagattacaggaataacaccggct

SEQ ID NO: 1838 - DNA, 115 bp, Staphylococcus aureus
aatagttgtcgttctactattgccacttttttacctaattgagacgcacgtatcgcagcaacatatcctgcagtacctccaccgagaacgactaaatcatattgtttctctgaca

SEQ ID NO: 1839 - DNA, 133 bp, Staphylococcus aureus
ccaactttgatttgaccacgttcaacacggcctgtagcaacagtaccacgaccagtgattgagaatacgtcctcaactggcatcatgaatggtttgtcagaatcacgttctggagttggaatgtaagtatcta

SEQ ID NO: 1840 - DNA, 200 bp, Staphylococcus aureus
taatgggcgaacagcccaacccttgggaccgactacagccccaggatgcgatgagccgacatcgaggtgccaaacctccccgtcgatgtgaactcttgggggagataagcctgttatccccggggtagcttttatccgttgagcgatggcccttccatgcggaaccaccggatcactaagtccgtctttcgaccctgctc

SEQ ID NO: 1841 - DNA, 206 bp, Staphylococcus aureus
gcgaacattttccatataaggaatgagttcgtcaaattcattccctcgatccaaaccaccacataaccaaatgattggttgattaaatgaatttaaggcaaactgtgttgctagcgtgtttgttgctttggaatcattataatatttattagttctattagtaccaacatattgcaatctatgctctattcctgaaaatgtagtta

SEQ ID NO: 1842 - DNA, 261 bp, Staphylococcus aureus
tgaatacagtgatttttttaccgcgaccttgtttattaacagtagcagtaactgttgcaccttcaactgttggcgctccaactttaactgaatctccacctacaaataatactttatcaaatgtaaaagtatctccttcgtttacgtctaatttttcaacgaagatttcttgaccttcttctactttgatttgttttccacctgtttcaataatagcaaacatactttgcacctcctgtataataagtcacgccatacata

SEQ ID NO: 1843 - DNA, 435 bp, Staphylococcus aureus
atttacaaaatagacttatcgtcccacccttatcagtataaatataagttatattttttaaaaaaacatactttatttttaatatcttgattattactctaggtgtacttatatcatctttatctcattgtaaccttattattcactcaatattagcttaacatataataaatgttaatatttgtaaaaagcttttttaatataaattaaggttggaacataaatatgccccaacctcaaagacgttatattaagattaacgacggataccaagtgatttaattaattcacggtaacgttgaatatctttactacgtaagtagtttaataaatgtctacgacgacctaccatttttaataatccacgacgtgaatggtggtcttttttgtgtgtacgtaagtgttcgtttactgcgttgatttctgcagtaagta

SEQ ID NO: 1844 - DNA, 87 bp, Staphylococcus aureus
tacaactgatgaaccaacaccatgtaaaccaccagatactttgtatccgccaccgccaaatttaccaccagcatgtaaaacagttaa

SEQ ID NO: 1845 - DNA, 246 bp, Staphylococcus aureus
cataaaaataataacatccgcttcatctatggcgatttctgcctgcgctctaatttgtgtttggaatggtgcatcaccaatttcaataccacctgtatcaataatattgaaatcatgtgttaaccattcacctgaagaataaatacgatctcgtgttacacctggcgtgtcttccacaatcgaaacacgttctccaactattctattaaaaattgtagatttacctacattaggcctacctacaat

SEQ ID NO: 1846 - DNA, 132 bp, Staphylococcus aureus
cacgacggtctcctacgcgttgacgaatcttttcaatttcgatttcgataaagttttccattgtccattgacctctacaatcacaaacacgacggacaaaattatttaataaatcattaccatattctgtat

SEQ ID NO: 1847 - DNA, 271 bp, Staphylococcus aureus
tctgttaagtcgtttactgctacaacttcaagaccttctacttcttgaattcttctgaatgctaaacgaccaattctaccaaaaccattaattgctacttttactgccattataatggcctcctttaaaatgatatttaaaaagtattaaactttttatctcttattcaagtattatctttgctgcggcttcatcagtgattaacactgtattcttgggtgcaatcgtcaagtatgctttaattgcttcacctttcgatttgcctcctgca

SEQ ID NO: 1848 - DNA, 264 bp, Staphylococcus aureus
ctcgtatgcctccaaactcatttccttaacctcttgtaaaaactgtgtccacattttatcaggtgacggttgccctctatataccaacgtattagcaaacatgcctagcatttgctccgtgcctttatgcatacgcgcactcatcacactaccgacaacaacatcatcttttcgagcatatctacttaacaacgtcatgaccacactcataaagaacataaaatcagtaatttgatgcttttctacatacttttgaagtagctg

SEQ ID NO: 1849 - DNA, 379 bp, Staphylococcus aureus
ggctttttaacgattgattctacttgtaaaatcgctgcttgtggatgatttataatacccattgatgatactgaaccaaatgtaccagtattatttaccgtaaatgtaccgccctgcatatcttcagctgtcaattgcttattacgcgctttcgttgctaaagtattaatttctctagctatacctttgattgacttttcgtctgcatgcttaatcacaggtacgtataatttattttcatcagcaacagcaattgaaatattaatgtctttatgtaagacaatttcatttccttgccagctactatttaataaaggatatgcttttaaagcatctgctacagcttttacaaagaaagcaaagaacgttagattatatc

SEQ ID NO: 1850 - DNA, 589 bp, Staphylococcus aureus
gtgataacctttaaatcagttataagaaacgttttgctgccactgaaattggtggaatttgatctaaatctaaatgtttatcttcagtaattgatctaaatgcccacttaccataaccaagcgcttcttcatttacaattttacctggtaatggcgcagcattaggatcaacatatacatctacaatcgttggtacatcttgtgctaatgcctcttcgactatagcatctacttcgctagcactcttaattgtataacctttaccacctgctgcctcagcaaattttgcatgatccatatcagaaaaatcaactgcatattctaattcaccagctgcttgttgttcatatttaataaatgctaactgtttgttattaagtacaaatacagttaaaggtaaatcatattgtactgctgtagcgaagtcttgcattaccatttggaatgcaccgtcaccagcaattgcgatggcttgtctatttggatatgcaatttttgatgcaattgcacctggaagaccgcaacccattgtacctaaccaacttgaaatgatgaacttgttatttacaccaaggtttaagtatcgagt

SEQ ID NO: 1851 - DNA, 132 bp, Staphylococcus aureus
tattctgcatttttcaatttgccagaaatcgcttggtttaccatttgacgtgtgtaatgtaagctgattctacgtcctacaccatattttccgccagtccatccagtattaacaagataaacatcaacatca

SEQ ID NO: 1852 - DNA, 203 bp, Staphylococcus aureus
gctcataaaaatagttctatattttaaatataccaagcaccattaactttctgtatagttccagtaacacttctagcatttgggtgatataaataggcgcatgtatgagcaacctcactcggtaaaaccaatcgctgttgtggtaattcagttatcattgcttgaagttcatcttcttgccactcacttgccatattaccggc

SEQ ID NO: 1853 - DNA, 887 bp, Staphylococcus aureus
catactgctttattttcaaaaaatcaaatgctcatttacaaaagtaaactccgctttaatttttcttaatgcattgtctaacaaccgctttctttaaaaagaatagattgtcaagcgctcgcataagcaatatcactttaaccaaaaaatatttgaatgttaaataaacattcaaaactgaatacaatatgtcacgttattccgcatcttctgaagaagatgttccgaatatatccttagaaaggaggtgatccagccgcaccttccgatacggctaccttgttacgacttcaccccaatcatttgtcccaccttcgacggctagctcctaaaaggttactccaccggcttcgggtgttacaaactctcgtggtgtgacgggcggtgtgtacaagacccgggaacgtattcaccgtagcatgctgatctacgattactagcgattccagcttcatgtagtcgagttgcagactacaatccgaactgagaacaactttatgggatttgcttgacctcgcggtttcgctgccctttgtattgtccattgtagcacgtgtgtagcccaaatcataaggggcatgatgatttgacgtcatccccaccttcctccggtttgtcaccggcagtcaacttagagtgcccaacttaatgatggcaactaagcttaagggttgcgctcgttgcgggacttaacccaacatctcacgacacgagctgacgacaaccatgcaccacctgtcactttgtcccccgaaggggaaggctctatctctagagttgtcaaaggatgtcaagatttggtaaggttcttcgcgttgcttcgaattaaaccacatgctccaccgcttgtgcgggtccccgtcaattcctttgagtttcaaccttgc

SEQ ID NO: 1854 - DNA, 480 bp, Staphylococcus aureus; identical to SEQ ID NO: 1805

SEQ ID NO: 1855 - DNA, 246 bp, Staphylococcus aureus
cctacagctttaagtccgagcacgcaggcacctaagcatgaactttcataactttcaggaaccactaactctgtgtcaaatatatctgacatcatttgacgccatacttcacttttcgcaaaaccacctgttgcttttatcatcttaggtgtttcattcattacttcaataagcgcaagatagacggtatacaaattgtaaagaacaccttctaatgcagcgcgaatcatatgttcttttttatga

SEQ ID NO: 1856 - DNA, 226 bp, Staphylococcus aureus
tatttttgtctcatataagggaataataatacgtctctgattgatggagagtcagttaataacataaccaatctgtcaataccgataccaagaccacctgtcggaggcataccatattctaacgcttcaatgtaatcttcatccatttcatgcgcttcatcattaccttgcgctttttcaacaagttgcgcttcaaaacgacctttttgatcaataggatcattta

SEQ ID NO: 1857 - DNA, 828 bp, Staphylococcus aureus
taaatcactaatactaagtccaataattttatcagtgaaatattgtgctatctctttgactttcgcatcatcttgaccgacatgtataccatccgcgttaatttcttttgccaaggatacatcatcattaacgataaaaggcacatcatattgatgacagagatgctgtaattctttagctaatacaagtttatcgtttccttttaaagctgattcacccttttctcgaaattggaaaagtgtaatccctgcctttaatgctgcttctaatacttcatgaatagttcgatgactcggaacatcggaggtcccacaaataaaatacacatttagatacgattggttaaacatattattccacctcttgaatacgaatccgttgttgataggttgtttcatttaaatgatataacgtatcaagcaacaatggtgaaaacgtaccaggaccaccacaattttcattttcagcagctacctcagcagcaatattaaatacgcttaccgcttcaattaacgcttctatgtctggttctgtttctctaaataaaaatccagcaataacgcctcctaataaacaaccagctccagttactcgtgctaataatggagatccattagctaatacgaaggctttattatcttgaacaataacgtcctctttacctgtgattactattgcagttttatatgttgcgtaagcctttttcgctattgcaaccgcatcaagattagcatcactatctgtacctttcatagttgctgtatcatcaatcaacgctaatatttcagatgcattgcctttaattactgatactttcgctgatttca

SEQ ID NO: 1858 - DNA, 333 bp, Staphylococcus aureus
taaatcatctaaatctgctaataattgatctgcatattctgtgattttaagtacccattgtttcatcggcttacgataaactggatgtccaccacgttcagagacaccatcaatcacttcttcgttagataaaacagtgcctaatgctggacaccagttaactgcaacttcatcaacgtatgctaaacctttgttatataactgtatgaaaatccactgtgtccatttatagtattctggatctgttgtattaacttcacgatcccaatcataactgaaccctaattctttaatttgtcgtttaaaagtttggatatttttctttgtaaattc

SEQ ID NO: 1859 - DNA, 395 bp, Staphylococcus aureus; identical to SEQ ID NO: 1811

SEQ ID NO: 1860 - DNA, 151 bp, Staphylococcus aureus
tacagtattactaatatgatcaacttctttatcgctcggtcctctaccactcataacaatacaatatgttccaatatgattatcatgtgccacctttgctccatcgataatttgttcctctggaattaaagcatatcgctgtttttgttta

SEQ ID NO: 1861 - DNA, 488 bp, Staphylococcus aureus
tgaacttcaacatgttttgcaacaggtataaaagcctcaacataaacacgatcatcatcaaagtatttttttccttcacttttagcttctttaaatgccttttctaaatcttcagctttctttacaatacgtatacctttaccaccaccgccactggcagctttgataacaactggataaccgatgtctttggcaagattctcaatttcagacacatgattcacagcaccatttgatcctggaatcacaggaacacctgcatgatgaactgtttgtcttgctgttattttatcccccatcatttccatcgtttttttagtaggccctataaacgctatgccttgttcctcaacggtttgagcaaattttgttgattctgataaaaagccatatcctgggtgaattgcattagcaccagtgatttgtgcagcagatatgatgcggtcaatatttaaataactatctaaagcattagcttccccaataca

SEQ ID NO: 1862 - DNA, 217 bp, Staphylococcus aureus
tgtcctcttcgtattttttcaaattctgcaaggatttcagaagataacggaattcgagttcttggcttgttttcacttatatcatctaatgatttactcacatcaatttcattttcttttaaatctctccacatttcgcgagatgatattctatatgcacctgatccaaagatagcatgttgctcactcatatcacttgttacaactgtaatatgct

SEQ ID NO: 1863 - DNA, 140 bp, Staphylococcus aureus
tatgtacttctcgttcaaaacgttttaatgtttcttctttttctctaggtggtataaaaatcgccttaattgcaactttaatgttaagtatcgtatcttcagcaagataaacggtactcatgccaccgccgccaagctta

SEQ ID NO: 1864 - DNA, 243 bp, Staphylococcus aureus
tcatgcttagatgctttcagcacttatcccgtccacacatagctacccagctatgccgttggcacgacaactggtacaccagaggtatgtccatcccggtcctctcgtactaaggacagctcctctcaaatttcctacgcccacgacggatagggaccgaactgtctcacgacgttctgaacccagctcgcgtaccgctttaatgggcgaacagcccaacccttgggaccgactacagcccca

SEQ ID NO: 1865 - DNA, 275 bp, Staphylococcus aureus
catttatagaaaatggtggtgtctcagatttattaatcactttaatatttgtaacttgtacttcaacttggccagttttaattttaggattaactgtttcagggtcacgcttcgtaactgtaccttgaacttctacaacatattcagaacgtactgtttcagcaattttcaatgcctcttctgaaaatgcaggattaaacacgacttgtacaattccttctctatctcttaaatcaacgaaaatcaatccaccaaggtcacgacgattgttaacc

SEQ ID NO: 1866 - DNA, 263 bp, Staphylococcus aureus
aattttcttgtcacgaacgagctctgcaattttttcaatcatacgagccttattcacttggaaaggaatttcagtgacaacaatacgttgacgtccgcctccacgttcttcaataactgcacgagaacgcatttgaattgaaccacgacctgtttcatatgcacgtctaataccactcttacctaaaataagtccagcagttgggaaatcaggaccttcaatatcctccattaactcagcaattgaaatatcagggttcttac

SEQ ID NO: 1867 - DNA, 75 bp, Staphylococcus aureus
ccaccgccacgccattgtggagcacggattgtaccttgacgagcacgacctgttcctttttgcttccatggttta

SEQ ID NO: 1868 - DNA, 353 bp, Staphylococcus aureus
cttttactaagtcgtttaattctaatactgacatttctttaatcgcttcaatgatttgttcatgattagccattttataattcctccattatttttaatttttttacgctaaaaattattcagcgttttcttctttttgttctccaatagctttaaccgcataagcgaagttgcgtacaggagcttgtaatactgataaaagcatagatacaagaccatcgtgtgaaggtaatgaaccaacagttttaacttcttctgctgtaataacattgccttccataacgcctgatttaatttctaatgcttcatgatctttagcaaatccagaaattactttcgctgcagctacagca

SEQ ID NO: 1869 - DNA, 262 bp, Staphylococcus aureus
tacaatgaacaattcgaaacgatcagtaaatctaggatcttcaggatttttcttcgctaaaggtgaaatttcagtcggatgaccatagataaacgttggctgaataagtgtttcttcaactttttgctcaaagaattcatttaaaatatgaccatatttcattgtatctttaatttcaataccatgttctttagctaaagctttagcttcttcatcacttttaacttcataaaaatctacaccagtagcttcttttacagca

SEQ ID NO: 1870 - DNA, 484 bp, Staphylococcus aureus
tacttttatcaaattcttcacctatctatgacaatgaaaggctcagtttatacttttagtgtttcataaaaataatgattacttctatgacacgttcgttttgtacaaactaagcctttatgccttattaatggttaaatattaactatttaactgtgcctcaccttggcgttgcttttctttagcagcttcatttacttgctcatccgcatgataagaactacgtactaaaggtccagcttggcaatgtttaaaccctttatccattgccacttttcttaatttaccaaactctaaaggcgtgtaatatttttgaacctttaaatgtttacgtgaaggttgtaaatattgaccaatcgttaaaatatctacatcattcgcacgtaaatcatccatcgtttcataaatttcttctatagtttcacctaatccaaccataatacttgatttagttgggatatccggttgtaattcttttgaacga

SEQ ID NO: 1871 - DNA, 174 bp, Staphylococcus aureus
aatgcattttgtttcatcgcctctgcatatgcagttttcagtctgcttccttcaatagcaacttcttgttctccttcttgtccgttataatattctgttgattcattgctgattggcggtagccatgcagtaattgcagtcacgacaaatgtgatgactaaagttatccaaaag

SEQ ID NO: 1872 - DNA, 197 bp, Staphylococcus aureus
cctttcatacggtaagcaattgcaaccgatgccggatgagaatgagtgccatcaacaatcatttcggtatgtagagcatcattcaaccatgctgctccaaaaacacctggttctctatgttggaatggcgtcgctgcattatataaatgcgtgacatgtttagctcctcgctcaacagcttcaactgcttcttcgta

SEQ ID NO: 1873 - DNA, 134 bp, Staphylococcus aureus
gaacgaccttgtctacgtccgtcaacacctgaagtatcaagtgctccacgtacaatatggtaacgcacacctggtaagtcttttacacgtccaccacgtacaagtacaacactgtgttcttgtaagttatgtcc

SEQ ID NO: 1874 - DNA, 257 bp, Staphylococcus aureus
gcatgtgtatctaaatcaactttacgatatggtgtttcaataaagccgaattcatttacacgtgcataacttgataatgagttaatcaatccaatgtttggtccctcaggtgtttcaattggacacatacggccatagtgagagtagtgaacgtcacgtacttccatttgagcacgttcacgtgttaaaccaccaggtcctaatgctgatagacgacgtttatgcgttaactcagctaatgggtttgcttggtccat

SEQ ID NO: 1875 - DNA, 607 bp, Staphylococcus aureus
tacaccttggcgtaacacgttgtcagcttctttaaatgcttccatcattggcgtagatttgtcaacgatatctaataaacggtcatttggtataacgattaatgtatctactgcagctttcatagcttctactccagcagcagcttgagtttgacgtttacgtccttcaaaactaaatggacgagttacaacaccaacagttaatgcgcccatttcttttgcaattttagcaacgactggtgctgcaccagtaccagttccgccacccataccagaagtaacaaataccatgtctgcaccttggattgcatcttcaatttgttcacgagattcctctgcagcttttttaccgatttcaggattagctcctgctcctaaaccacgtgttaatttttcaccgatttggattttagattcagctttagataagtttaaagcttgaccgtctgtgttgatagcgataaattcaacattattcattccgtggtcaatcattcggtttacggcgttgttaccgccaccacctacaccaatgacctttaaagtcgctaaatgattaaatccttgttcaaattctaacatttaaatttcctcctagttttattgg

SEQ ID NO: 1876 - DNA, 1013 bp, Staphylococcus aureus
tgtatctaatctgacacccgtcacacgtctttgatatgttttaatattgtccacacgtgcacctgtatgaattgtgacaccttcttcacgcgctagcttttccaaggcattggctaaatgatggattccaccttctacataccaaaggccttgctcttgttgcatatggaataacatagataatacagctggcgcatcgtatgatgaagaacctacatatttgataaaatagcctaacatttgtcgcaagtatggattcgagatacgcttgtctatggcctgttgcatagtatgtacataatcataattaataagagcatttaatggcccatgaaatttaataatttgagatagtgtatctaaaccatagttgaaataccctttttcagtaatacgatcgattcgtcttgtataattcaaataattttgcagttcctctatatcctgtttcgacaatatcgcattatgctgacctgtttctttaataccttcatacaaatcgatagtcgttccatctggaaaaaagctacgccattgatgtggcaatcgcttgattgtaacgtagtctgacatttgcttcttgctatattcgaataatttttcaaaaatataaggcatcgttaaaatagatggacctaaatcaaagccaaagccatctgattcatgacgattcactttgcctcctatatgattattttgttcatataatgagaccgaatagccactttgtgccattcgaattgctgcagaaatcccacctaagccaccaccaataacgatgatatgtttagtcatgacgttcacctcttcgttttaatatgcgtagtaactgcgttaatctcggtcgattatagcgttgcacaataatgattggaacattagctatcattgcatagaaaatatttatatactttactaaacgagggcctttattgaatatgatgactggaagtatcgatatccaatgaatcaactctgccctctttgtctctataatcattttttcaatttca

SEQ ID NO: 1877 - DNA, 1013 bp, Staphylococcus aureus; identical to SEQ ID NO: 1876

SEQ ID NO: 1878 - DNA, 463 bp, Staphylococcus aureus
tcgtaattattaatacaaaggttattcatttggaggcacacaaaatgcaaaataaagttttaagaattatcattatcgttatgcttgtatcagttgtattagcattgttattaacgagtatcattccaattttataaactatatctcaactacctatacaaaatcatacaattaaaaatccatccattataaacgcatgtattaataagttatcgtattgcaacgattactttcaaacatgggtcatacggatggattattttttaagctacttcactatgcattttcaatgaaccaaattgcgatttgatttgtaaatattcttctaattcatttaatatttgaataatacttgctctcgagttaagcgctttgtgtgttgttggcaatggcagttcatccaatttcaaacgcgtctcatacaaattgtgtaaacgcattgctgtatagtcattactattca

SEQ ID NO: 1879 - DNA, 279 bp, Staphylococcus aureus
attttttcttacgtccacgaacgataagtttgtctgatgattttttaccacgacgagttttcttaccaagcgtaggtttaccccatggtgacattggagatggtctaccgataggagcacgaccttcaccaccaccgtgtgggtgatcgttagggttcattacagaaccacgaactgttggacggatacctttccatcttgaacgtccggctttaccaacgttaactaattcgtgttgtaggttaccaacttgaccgattgtagcacggcaagtagata

SEQ ID NO: 1880 - DNA, 209 bp, Staphylococcus aureus
tgtcaaatttaggattaccacgcttactatttctgttacgagaaccacttggtttaccgttacggcctttgcgagataatggtttttcaaaagttaattgaacttcaacttcatcgtttgcttctactaactcttgtaaaagtgcagcaactaaatcaacatcgttatattcatttaacaactctgtagaaatgcgtttcaagcgtgat

SEQ ID NO: 1881 - DNA, 133 bp, Staphylococcus aureus
tactttcaaccatgctaatgatgtatcttcttgcccaacgaacgcagtttgtccaaattgaattagactggctggcaacgttgataaaatacccgcaaatatgataatagaaataccattaccaacaccgaac

SEQ ID NO: 1882 - DNA, 151 bp, Staphylococcus aureus; identical to SEQ ID NO: 1770

SEQ ID NO: 1883 - DNA, 286 bp, Staphylococcus aureus
ctacaggagcagtttcctcattagattcacttttttctacactagatttatcacttttagacgcattctgcttatcctcatctttactagacttttcgctatcttcagaatcagtatccgcactagaagttgtagcaggtgtagtagccgaagcttcataacttacattatcgctatttgaactcgcaacagctacttctgtatcttgcttgtcttttttagcttttgatgtttttttagcatcggataaatcaaatgtaatcttcttgacgctaaataaactaga

SEQ ID NO: 1884 - DNA, 325 bp, Staphylococcus aureus
gactgcattcataaatgatgctgcaaacgcaaatccagcatttttaaacactaatgtgaatggagacgttgctacattatcactaccccccattaatgcactactatcataaggaattaacataccgataacaaaaatggctaaaatgtaaaataataaaattctccagaatacttgtttaattgctttcggcacagcacgttcaggattttctgattcaccagccgtaataccaattaactcagtaccttggaatgagaaaccagcgattaagaatacacctagaattgataacaaacttcctcctaagttgccaccaagaatt

SEQ ID NO: 1885 - DNA, 507 bp, Staphylococcus aureus
agtctaaaattaatgattcgaatggtaagtattcgcgtacgtcacggttattaactgtgatgttaccttcacctggtactaaacgtacacgtgctactgagtttttacgacggcctgtgcctctatattcaacttgtgccaaagtcatttcctccttctaattaaccacgtaattcgtagttttctggttgttgtgcagcgtgtggatgttcagcgccaccatatacaaataattttttaccttgtttttcgcctaaacgagtgcttggtaacatacctttaattgagttttcaattaaacgttctgggttagttcttcttaattcaccagcagtgattgatttgataccacctgggtgatttgagtgacggtagtaaactttgtcagtttctttgttaccagtaaattcgatttttgatgcattaataacgattacataatcaccagtatcaacgtgtggtgtgtaagttactttatttttaccgcgtaagatagatgctacttct

SEQ ID NO: 1886 - DNA, 183 bp, Staphylococcus aureus
gaacttctgccaatatcaattgcagggaagatacgacgttcagacaatttacgatctaaatgtaactccatgttacctgttcctttaaattcttcgtaaatcatatcgtccatacgtgaacccgtatcaactaatgcagttgcaagtattgttaaacttccacccgcttcaatatttctcgct

SEQ ID NO: 1887 - DNA, 209 bp, Staphylococcus aureus; identical to SEQ ID NO: 1880

SEQ ID NO: 1888 - DNA, 235 bp, Staphylococcus aureus
agtgatagcatgtgtatctaaatcaactttacgatatggtgtttcaataaagccgaattcatttacacgtgcataacttgataatgagttaatcaatccaatgtttggtccctcaggtgtttcaattggacacatacggccatagtgagagtagtgaacgtcacgtacttccatttgagcacgttcacgtgttaaaccaccaggtcctaatgctgatagacgacgtttatgcgtt

SEQ ID NO: 1889 - DNA, 122 bp, Staphylococcus aureus
acctctgaacgtaccagtttgagatgcttctaacgtccaattcattgtcatgccagtcatggcatatttttgaccacctaattgtggaatccagaaacttgtcattgtatccatagcttgaa

SEQ ID NO: 1890 - DNA, 559 bp, Staphylococcus aureus
aacaattgcttctattgctgttgttacttttgctaattctctcaataaatcaatatctgcttcacgaccatgctcttttgcaacgatttgagacaagattgataatactgcaatttgtgcagtatatgcttttgtagatgcaactgcgatttcaggacccgcgtgtaataacaatgtgtggtctgcttcacgtgataaagttgaacctgcaacattagtgattgttaatgatttatgacctaatttattagtttcaactaatacggcgcggctatctgcagtttcacctgattgagaaatataaacgaacaatggtttttcagataataatggcatgttgtagacaaactctgatgcaacgtgtacttcagttggtacgccagcccatttttctaaaaattctttacctactaaacctgcatggtagcttgtacctgctgcaataacgtaaatgcggtctgcttctttaacatcattgatgatgtcttgatcaattttcaagttaccttctgcatcttgatattcttgaataatacgacgcattactgctggttgttca

SEQ ID NO: 1891 - DNA, 187 bp, Staphylococcus aureus
acggaaacaaatacggcataatttaaatttacgatatacagaatgtggacggccacaacgttcacaacgagtgtattcacgaactgcatatttttgttttttttgttgcttagcaaccattgaagttttagccacttaattagcctcctttaaataattatttacggaatggcataccgaagttagc

SEQ ID NO: 1892 - DNA, 203 bp, Staphylococcus aureus
gaaacgatagataataaagtcgatttacccacactagggaaacctactaatcctacatcagctaataatttcaattctaaagatacatctaattcctcacctggttcacctttttcactgaagtcaggtgcagggtttctaggtgttgcaaaacgtgaattacctcggccacctcgaccgcccttcgctactacagctctttg

SEQ ID NO: 1893 - DNA, 126 bp, Staphylococcus aureus
gtgctgttgtttacctaacaaattaccagcaccacgaatgttcaaatcacgcatcgcaatcttaaatcctgagcctaactccgtaaattctttaatcgcttgtaatcgatcttctgcagtctcagt

SEQ ID NO: 1894 - DNA, 808 bp, Staphylococcus aureus; identical to SEQ ID NO: 1663

SEQ ID NO: 1895 - DNA, 263 bp, Staphylococcus aureus
tgtctttcgataatcctggattgttaggatttactgggccacttggatgagttggtctgctcggcttctctgggttttcaggtccttttggatcttttggtttctctccaccgaactctacaatcttatctactggttgttttgtgatctcttctgttggttgaccctcgccaactttttcacctgttaatgggttcactgtgattggtgttgtgattgtcttacttcctggttgtccttcttgtttcactcgctcttcacca

SEQ ID NO: 1896 - DNA, 180 bp, Staphylococcus aureus
ttttctaaaccatcaagttcaccagaattaatatgtttaccttcaccagtgtatgctgcttcttcaacatttccaccttcgatgacttcaatgattggcaaatcaaactttttagcaaattcataatctctgtcatcatgcgctggtactgccataattgctccagtaccatatgttgat

SEQ ID NO: 1897 - DNA, 208 bp, Staphylococcus aureus
tgtacgtaactcatgtgatacattggcaacaaattcacgacgctcacgttcaacttgttgttgttcagttacgtcatgtaacacagcgatataaccagttacaaatcctgtttcctgcacaatcgtactaaagttaacacgtgcgattagaccttcttcttcatttaaatctaataagaaactatcattattctcttgaatttcttcc

SEQ ID NO: 1898 - DNA, 267 bp, Staphylococcus aureus
gttttctacttccgtatcagctgcaggtttaacttttgcttgtgtttgaattgcattgattttatctaatacttttgattttgtatcagcaacttcctgttttgatttaacaacttggatgtcatgtaaaccttgcttttgagctgcatctactgctgcatcagcttctgctacttcttcatttgttgcatttgaaactgtagcattttgagcttttctagctgttgcagcttgtttaacttcattataggcatccatttttgtttg

SEQ ID NO: 1899 - DNA, 505 bp, Staphylococcus aureus
gctatttttaaatttttctactgcgtctttagctttatccataaaactcatattaatcgctcctcttatatttgattagtttaattgaacttattttttaagtttatcaattgcatcagttattttgtttttagcattttcaacaacttcttttgctttaccagtcgctttatcttgctgaccttctttttctaattctttgttatcagtaacgttacctactgtttctttaacatttcctttaaattgatcgaacttactttcgtctgccatagtgaaacctccttggatgtatatatttatataccactaaggaggttcgctaaacattataatatgaagtttttatgttatagtatagtatttatacgattaaatataaaacatgtatccgtctaaatcttcacttgtatctacatattccgctaaatatttcaatgttgtattatctaaaacatctctcactgcatctctcatgcgaatccatagttgtttttgcgcaggt

SEQ ID NO: 1900 - DNA, 509 bp, Staphylococcus aureus
tgatcagaataacctttaaaaataactgaatctatattttcctcgttaaaataataaatttcatcttctacaacaccaatcggatatttacatgcagaatagtcaaacatatacttttgattttcaatttctacaattggtcctctattaataatcattaacttttgcgaaccttcttttaaataaataatgcttcctattgtttccatttattttcctcctttgtcaccgtctcaatttcaacattccttcgcatttccaagtcaatcatctcttcttccactttacgaatgccatgttgaatttgctgttgctgctcgtataacgcttccgttgaacgtcgtttcgcaaaatgaaattcatcgcggaactgttccatacgactagccatattgctactataataacgctcacctaaatgttgatataattgatctatcgaatgattaagcgcatcactttcatctatcaatgctttaacctctcgcttttcatcatataagtcatcc

SEQ ID NO: 1901 - DNA, 234 bp, Staphylococcus aureus
actcatcattggacgtttatcttgtcgttgttcaacaccacgagataactgacttaatgcgataactggacattttaattcacgggctaatgcttttaatgtacgagagatttcagaaacttcctgttgtctgttatcggacgcacgtgaaccactaccttgaatcaactgtaagtagtcaatcacaatcatgtctaagccatgttcttgctttaatcgacgacatttagaacg

SEQ ID NO: 1902 - DNA, 164 bp, Staphylococcus aureus
tcaatacgacaccaccattatttacaggacctccgatgacgtagtggtcctctgttaagacataacaaaatattctacctttgtaatcagtacgcggtttatctatcacagtacgaatcgccccagatgtaccgattgtgacagcaacttctcctttaccaaca

SEQ ID NO: 1903 - DNA, 284 bp, Staphylococcus aureus
tgtaattggttttcctaataattgtgaatatgcaagtaaacgtgttaatgcaccttctaattcacgaatattagattgaatttgatttgctatataatttaaagcttctggtggaatatctaatttttcttcttcaattttcttctgcaaaattgccattcgagtttcataatctggtggcgtaatatcaacaattagcccccattcaaagcgtgaacgtaatcggtcttctaattgtgcaatttcctttggtggtcgatcactcgaaataactatttgcttgt

SEQ ID NO: 1904 - DNA, 180 bp, Staphylococcus aureus; identical to SEQ ID NO: 1896

SEQ ID NO: 1905 - DNA, 144 bp, Staphylococcus aureus
tcatcttcaacttgtacacgaattaaagttcgtgtttctgggttcatcgtcgtttcccataattgttcagggttcatttcacccaaacctttgtaacgttgtaacgtgaagcctttaccaagttctttttgcaatttattaagc

SEQ ID NO: 1906 - DNA, 298 bp, Staphylococcus aureus
tacatcaatatcgcttaattcttttttactacgtttcaaagccttttctacagcgccaactggtgcaatacccataatagaaggatctacaccatgacttccaaagccatcaagcactgccaatggttcgatatttaattctttagctttgtcttctgacatgactaacatcatcgcagcaccatcattgattcctgatgcattacctgctgtaactgtaccgtcttttttgaaagctggtcttaatcgacttaatttttcgactgatacattttcacgtacaccttcatccttagtg

SEQ ID NO: 1907 - DNA, 218 bp, Staphylococcus aureus
gttctggtaaacgtacgaaagtaccagttaagctgtcagcatcaaagtttaagtactcaggtacgaaattgttgatttcaactgattcaacgatgatgtttaatttttgagatttttcacgaactgaaattgtttgaccaggtttaacagaataagatggaatatcaacacgtttaccatctactaagatatgaccgtggttaactaattgacgtgct

SEQ ID NO: 1908 - DNA, 258 bp, Staphylococcus aureus
aagaagttgtatgcctcgtctacttttttcactgttttttgtaagtcgatgatataaataccatttctctcagtgaagatatattttttcatttttgggttccaacgacgtgtttggtgaccgaagtgaacacccgcttctagtaattgtttcattgaaattactgccattataaattcctcctattggttaattacctccatagcaaactattgtaaagacaatatataaatattgcaccctttacacaatcacgtt

SEQ ID NO: 1909 - DNA, 561 bp, Staphylococcus aureus
tcatttttgcatcaattggtgcgatatttaatgtttcgccaaatgttttcatgcctttttctaagccttctgttaaaatttgatgcacaatgtcatcatttttatctttccaataagtactgtctggtaaaaatgtattaattggtggttcgtgaaatgcaatctttttaacgacttcagggtaatcttttaacacatgcatcgcaacgattgaacctgaacttgaacctaatatatagacaggttcatcacttaatgactttgcaagttcggcaatgtcctgtgcgtcgcgtttgacacgataatcactgtcagggtttgaagcggaatcagggagtggttcagttaactcgctttctccataatcacgacgatcaacggctacaacagtaaaatggtcttttaactgttctgcaagaggcagaaaaatgtctccggtaccgtttgcaccaggaataaagatgagcacgggtccttgtccgacttggtggtatcgtaatttagcgccttgtaattctaaagtttccatattcaatgacctccatttgttaattgttaggt

SEQ ID NO: 1910 - DNA, 267 bp, Staphylococcus aureus
gccattttgtgagtgtcctcacgtttcttaacggcaccacctgtattatttgctgcatctaaaatttcgttagctaaacgatcttccatcgttttttcaccacgaagacgtgcatagttaactaaccaacgtaaacctaaagtagtacgacgctctggacgaacttctactggtacttgatagttagaaccacctacgcgacgagctttaacttctaatactggcataatgttgttgattgcttcttcgaatacttctaatgcatca

SEQ ID NO: 1911 - DNA, 407 bp, Staphylococcus aureus
ttaatactacgagccatttgggcgcctcccttcttattatgtgcgtgcagctttaagccgcacacccaaataagttgattatattattttttcttacgtccacgaacgataagtttgtctgatgattttttaccacgacgagttttcttaccaagcgtaggtttaccccatggtgacattggagatggtctaccgataggagcacgaccttcaccaccaccgtgtgggtgatcgttagggttcattacagaaccacgaactgttggacggatacctttccatcttgaacgtccggctttaccaacgttaactaattcgtgttgtaggttaccaacttgaccgattgtagcacggcaagtagataagatcatacgaacttcaccagatcttaatctgattaatacgta

SEQ ID NO: 1912 - DNA, 352 bp, Staphylococcus aureus
tgttgccgctgttttcacaccacaactatttaatgttttaattttctcttcagcagtacctttaccacctgaaatgattgcaccagcatgtcccatacgttttccaggaggtgctgtttgtccaccgataaagcctacaactggttttgtcatattcgctttaatccattcagctgcttcttcttcagccgtaccaccgatttcaccaatcataacaactgctttcgtttcgtcatcttcattgaatgcttttaaaacatcaataaagtttgttccgttgactgggtctccaccaataccaacagctgtagtttgaccaataccttcttcagtcaattggtgcactgcttca

SEQ ID NO: 1913 - DNA, 342 bp, Staphylococcus aureus
ctcatcattacttgcttcttaataagcgtaccttgaatacgtggtccgatatcggcttcaggatgattatatgacgaaattgcgccacatactggtacacgtgcaaaacgatttaaatgcttaaatacttcatcgccaactgttccaccaacattttcaaaataaacatcaataccatctggtactgcttgtgctaacgcttctgcaaaatcctctttcttataatcaataccagcgtcaaagcccagtgtctctgttaaataatttacttttttgtcgccacccgcaatacctactacacggcaacctttaatcttagcaatttgacctacaactgaacct

SEQ ID NO: 1914 - DNA, 343 bp, Staphylococcus aureus
caacagttgattattcttcagttgcttctgtttcttctgatttttctttttcatctaaatcgatgttttgttctgcagctacttcttcattagaaacgccttgttgaccttctaagattgcatctgccattttagcagttaataatttaaccgcacggatagcatcgtcgtttgctgggataacgtagtcaatttcgtcaggatcacagttagtgtcaacgatacctacgataggaatatttaatttacgagcttcagcaattgcattacgctctttacgtgggtcaactacgaataatgcttgaggcattgatttcatatcacgaattccgcctaagaattt

SEQ ID NO: 1915 - DNA, 165 bp, Staphylococcus aureus
gctataatcgcttcagcttgtttctctgcagcttgcttagtttcttcaccagctttttgagcttgtatcaaagcatcacttacagattgatgcacgtcttgataagacttaatattagtatctctctcttcgattactttttcaagttgttttttatcttcttta

SEQ ID NO: 1916 - DNA, 258 bp, Staphylococcus aureus; identical to SEQ ID NO: 1908

SEQ ID NO: 1917 - DNA, 236 bp, Staphylococcus aureus
cgtactaaggacagctcctctcaaatttcctacgcccacgacggatagggaccgaactgtctcacgacgttctgaacccagctcgcgtaccgctttaatgggcgaacagcccaacccttgggaccgactacagccccaggatgcgatgagccgacatcgaggtgccaaacctccccgtcgatgtgaactcttgggggagataagcctgttatccccggggtagcttttatccgttg

SEQ ID NO: 1918 - DNA, 267 bp, Staphylococcus aureus; identical to SEQ ID NO: 1910

SEQ ID NO: 1919 - DNA, 1012 bp, Staphylococcus aureus
tgtatctaatctgacacccgtcacacgtctttgatatgttttaatattgtccacacgtgcacctgtatgaattgtgacaccttcttcacgcgctagcttttccaaggcattggctaaatgatggattccaccttctacataccaaaggccttgctcttgttgcatatggaataacatagataatacagctggcgcatcgtatgatgaagaacctacatatttgataaaatagcctaacatttgtcgcaagtatggattcgagatacgcttgtctatggcctgttgcatagtatgtacataatcataattaataagagcatttaatggcccatgaaatttaataatttgagatagtgtatctaaaccatagttgaaataccctttttcagtaatacgatcgattcgtcttgtataattcaaataattttgcagttcctctatatcctgtttcgacaatatcgcattatgctgacctgtttctttaataccttcatacaaatcgatagtcgttccatctggaaaaaagctacgccattgatgtggcaatcgcttgattgtaacgtagtctgacatttgcttcttgctatattcgaataatttttcaaaaatataaggcatcgttaaaatagatggacctaaatcaaagccaaagccatctgattcatgacgattcactttgcctcctatatgattattttgttcatataatgagaccgaatagccactttgtgcattcgaattgctgcagaaatcccacctaagccaccaccaataacgatgatatgtttagtcatgacgttcacctcttcgttttaatatgcgtagtaactgcgttaatctcggtcgattatagcgttgcacaataatgattggaacattagctatcattgcatagaaaatatttatatactttactaaacgagggcctttattgaatatgatgactggaagtatcgatatccaatgaatcaactctgccctctttgtctctataatcattttttcaatttca

SEQ ID NO: 1920 - DNA, 299 bp, Staphylococcus aureus
tgcttgatcacccattgtaacaatgaataaatctaagttttcttcaatatctaattcgataccttcttcttcaagtgcaagcaataatcgttctatacttagcgcaaaaccaatacctgtttcacttggaccatctagcaattctaataaaccattataacggccaccaccacaaagcgttgtaatggcaccatcatagttagggttatccatcattaattcaaatgctgtatgtgtataataatccaatccacgaactaagttaggatcttcaatatatggaatacctaaatcatcta

SEQ ID NO: 1921 - DNA, 202 bp, Staphylococcus aureus
agtgccttgaagtagggggtgaaatcctgctttatatgcgtcgtggttagatagtgataatgagccaagtgtacgaccgtgaaaattgttattcatagcgatgatttcaacttgtccgtcagtaatgcctttaacttcagagccccattttctagcaattttaatggctgcttcaacagcttcagtaccagagttaaggggg

SEQ ID NO: 1922 - DNA, 195 bp, Staphylococcus aureus
gcacgagcgattccgtgacggatagcttgagcttgtccagtgaaaccaccaccatgaacgttaactaaaacatcatagttacctttagtttcagttacatcaaatggttggtttaagtctaaaattaatgattcgaatggtaagtattcgcgtacgtcacggttattaactgtgatgttaccttcacctggtact

SEQ ID NO: 1923 - DNA, 136 bp, Staphylococcus aureus
agaaggtctatgtttctgctccaccggttctgctttaggcactgtgattggtttctctgtcatcggttttgtttcttgttgttttttaggtgccataggttctacaacaggtttcgatttaggctcttcctttgga

SEQ ID NO: 1924 - DNA, 120 bp, Staphylococcus aureus
ggaggcataccatattctaacgcttcaatgtaatcttcatccatttcatgcgcttcatcattaccttgcgctttttcaacaagttgcgcttcaaaacgacctttttgatcaataggatca

SEQ ID NO: 1925 - DNA, 217 bp, Staphylococcus aureus
tgccaaacctccccgtcgatgtgaactcttgggggagataagcctgttatccccggggtagcttttatccgttgagcgatggcccttccatgcggaaccaccggatcactaagtccgtctttcgaccctgctcgacttgtaggtctcgcagtcaagctcccttatgcctttacactctatgaatgatttccaaccattctgagggaacctttgagcg

SEQ ID NO: 1926 - DNA, 90 bp, Staphylococcus aureus
tctggtgctaatgatacgattttcatgaagttaccttcacgtaattcacgagcaacaggtccgaagatacgagtaccacgtgggcctttg

SEQ ID NO: 1927 - DNA, 323 bp, Staphylococcus aureus
tgtgcagatgatttgaatgtttcacgatatgaaaccattggagcacctacgttacattcaacgttgaattctttcttcatacggtctactaagatgtctaagtgaagctcacccataccaccgatgataacttgtccagtttcttcgtcagtgtgtgcatggaatgttgggtcttcttcttgtaatttaactaaagcttgagtcattttatcttggtcagctttagattttggctctactgataagtgaataactggctctgggaattccattgattccaagataatgtcatttttctcaccacataaagtatcaccagtacc

SEQ ID NO: 1928 - DNA, 479 bp, Staphylococcus aureus
tatttgctttctacttcgcgatccattgtttgttcgaaaagaatagcacccaaaattttatctggtgagaatgaaggtgaagttaccacacgtgtacgcatatcgtgaacaagttggaacatttcgtcttcattgctatattgatcttcgtttacaccatattctttaagtgcttttggtgtactaccaccactttggtctaatgcggcaataaagccttttccatttttcattttttctaattgctctttattcatactttccactccttaacttttcaatacacctccagtatgataaaaatgagaacatttctcaagtcataaaccttgaaaagtgtataaaatgtgaaaaataattgtcagtttaattaaaaatattattttattctaggtatgactaacgccattaatgacataaagaaaatatgtgtaataatccaaccgattaattctgtcacactaaattgaaaaattgga

SEQ ID NO: 1929 - DNA, 200 bp, Staphylococcus aureus; identical to SEQ ID NO: 1840

SEQ ID NO: 1930 - DNA, 269 bp, Staphylococcus aureus
tggattgctgcctctgtttctaagattccaccttcaggatttaattgagttggtttttggtgttttttcataatgttaacaccttccacaacgacacggtcttttttaggtagagtagcaattactttaccttctttacctttgtctttacctgcgataactttaacgttgtcaccttttttgatatgcatgtgggcacctccttatttgtattggttgttattaattaaagtacttctggtgctaatgatacgattttcatgaagtta

SEQ ID NO: 1931 - DNA, 182 bp, Staphylococcus aureus
taacagcttgtgtcaattgttcaacttgtgctttatcaagcgttggattgttagtttgattaattaaatcttttgcattttgaactgctgcttggtaagcatctttttgtggtttatcttcattgataaacttgctacccgcttccgtttgctgttgatcttgaatgctattacgtaaagct

SEQ ID NO: 1932 - DNA, 170 bp, Staphylococcus aureus
gttctgcaaaacttgctgcaaccggatcatgtgtaaccatgacaatagttgtatcaaacgatttattcatttcttccaaacgttgtaataggtcatttgcacttttcgagtcgagtgcgcctgttggctcatctgcaaatatgatttgtggtttgtgaacaaatgctctc

SEQ ID NO: 1933 - DNA, 230 bp, Staphylococcus aureus
agagtatacagtatcgatttcttgacgtgagttagcgtgcatttgtaataaacgacctacacgttcacgtttacctttagtagagttcttaacgtatgaaccagatgtcattgtacctgaatacacacggaagaatgttaatttaccaacataagggtcagtcataactttgaacgctaatgcagcgaattcagctgaatcgtctgctttcgcgattacttcttcttcag

SEQ ID NO: 1934 - DNA, 479 bp, Staphylococcus aureus; identical to SEQ ID NO: 1928

SEQ ID NO: 1935 - DNA, 256 bp, Staphylococcus aureus
catcatatctgtaacaaaaaactgattgtagtttaattgataggcatctcgcgctgtcgtatctacgccaatatgcgttgcgacaccaccaagaacaatcgtatcaattcctcgacgtcgcaattgtaagtccaaatctgttcctacaaatgcactaaaatgtcgtttgtctatgacaaaatcgtcatctctcttgtctaataaatgatggaaacgactgtagtcgtcgccttcttttggtggtaatgagatcatt

SEQ ID NO: 1936 - DNA, 246 bp, Staphylococcus aureus
tgtgacgggcggtgtgtacaagacccgggaacgtattcaccgtagcatgctgatctacgattactagcgattccagcttcatgtagtcgagttgcagactacaatccgaactgagaacaactttatgggatttgcttgacctcgcggtttcgctgccctttgtattgtccattgtagcacgtgtgtagcccaaatcataaggggcatgatgatttgacgtcatccccaccttcctccggtttgtca

SEQ ID NO: 1937 - DNA, 195 bp, Staphylococcus aureus; identical to SEQ ID NO: 1922

SEQ ID NO: 1938 - DNA, 663 bp, Staphylococcus aureus
tgcgtatgacatgtatcaaaacatactgataaacgttcgttattatgaactccatcaataatacgtgctaactcttcaaatgagcgaccaatctctgtacctttacctgccatcgtttcaagcgcaatacgtacattattgtcattcgttaaaacttcatttaatccttcaataatcttattaattccggcatcaacaccagctccaacatgcgcacctggatgtaatacaatatctttagcccctatagcttgcgttctttcaatttcttgttgcaagaaatctacaccaagattaaacgtttctggtttggttgtatttgcaatattaatgatgtatggtgcatgaacaacaatattagataaaccatatttttccatcacttcatgacctttagttatatttaaatcttcaatacttttacggcgcgtgttttgaggtgcaccagtataaatcataaatgttgtttcaccatattcatgcgcttctatagcagaaccttctaacatctttttaccactcattgaaacatgtgatcctaataacataaaacacacctaaccttttttgttttgcttacgtttttgtctattttgctgcttactaaattgcttacgctcttgacgtttcattttttcaacttcttgtttaaatttcttctta

SEQ ID NO: 1939 - DNA, 120 bp, Staphylococcus aureus
gtcagttaataacataaccaatctgtcaataccgataccaagaccacctgtcggaggcataccatattctaacgcttcaatgtaatcttcatccatttcatgcgcttcatcattaccttg

SEQ ID NO: 1940 - DNA, 197 bp, Staphylococcus aureus
gacgttgtactgctggaattttatccataataaatctcatatcatcgatgaatcccatattcatcatttcatcagcttcatctaaaatcaaagtatgaattccgtccgtttttaatgtgcgacgatttaaatggtcgataacacgcccaggtgttccgactacgatttgtgggccttttttcaaggctttaatttgg

SEQ ID NO: 1941 - DNA, 491 bp, Staphylococcus aureus
actaccgccaactgagtattgaattgtttttacatgctttttctgttttaaatatttttcaacatctttcgcatgattcaacactgcttgctccgtttcaccaggcttcggtgtataagtaatagctaaaaatttatcgtcacctgctgaaataaagctagtgcctagtctcggtcctccaaatacaatagttgcaaccaaaattaatgtacttaatataattacaatccacttatgatttaatgaccaatgtaatacttttttataagttgtactaacaacacctaatccttcttgatgttgtttattacgacgtttaacgccttttttaaatagtgtagctgccaacgctggaacgagtgtaattgacactaataacgatgctaataaactaaatgcaatagccaatgcaaaaggtctaaacatttcgcctactgaacctgatacaaacacaagtggtaagaagacgataatagtaactagtgtcgatg

SEQ ID NO: 1942 - DNA, 290 bp, Staphylococcus aureus
tctacagcatttccaactaacccgattgataatccttctccacgttctttcgcctcttctgctaattttaatgcttcatctaaatcagctgttttaacatcacagtatttcgtatcaattcgcttatcaacacgtgtttcatcaacatccacgcaaattgctaccccatgattcatagtaattgctaacggttgcgcaccacccataccacctaaacctgctgtcagtgtaacagtgcctgctaaatctccattaaagtgttgattacctagctcggcaaatgtctcata

SEQ ID NO: 1943 - DNA, 119 bp, Staphylococcus aureus; identical to SEQ ID NO: 1715

SEQ ID NO: 1944 - DNA, 464 bp, Staphylococcus aureus
aattggtgtaatcatagtcatacgtggttggatgtagtcttttgataaaccttctttaaatcctttatgtttaaaaccaagcgctttcaaattttgcaaagcatctgtacctttatcaacttcaacatcaggatcgattttaattgcatacgctttctcagctttagcaatttcttttgcactgtctaacaatgcatttaacgcttctttattactataatcaacaacaaaaccacgcgaaatataacatagcgtataaggtaatttaggtacttttttaaaaagtaactgcgcaacaccctgaacttcaccgtcacgacctacagcgattcttcgcgcgtaccatccagttaatttctttgtttctgcccatttcgttaattgtaataaatctccatttgggtgggatttaacaaatgcgtcatgttcctgattagtgatatgcatcttttccatgatttatg

SEQ ID NO: 1945 - DNA, 194 bp, Staphylococcus aureus; identical to SEQ ID NO: 1825

SEQ ID NO: 1946 - DNA, 107 bp, Staphylococcus aureus
attgatttgataccacctgggtgatttgagtgacggtagtaaactttgtcagtttctttgttaccagtaaattcgatttttgatgcattaataacgattacataatc

SEQ ID NO: 1947 - DNA, 256 bp, Staphylococcus aureus; identical to SEQ ID NO: 1935

SEQ ID NO: 1948 - DNA, 381 bp, Staphylococcus aureus
acagtaaatattttattacttcacaaaatgcttaaaaatatggcgggatgcttttaaggtcaaggataatacttgtgtaattttttataggttgtagctactctatcacactctcttttatatttatcaaaagatataaaaaaggatagtatctttcaactatcctttaatcaatattattcttcaatccattgtgtatggaatacgccttctttatcttttctttcgtacgtatgagcaccgaagtagtcacgttgtgcttgaattaagtttgcaggtaaatcagcagcacggtaactatcatagtaattaatacttgatgagaaaccaggtgttggtacaccattttgaacaccagttgcgacaacatcacgtaacgct

SEQ ID NO: 1949 - DNA, 721 bp, Staphylococcus aureus
tcaaaagattctgcaacattgacagcatcttgacccgtcattgaatcgacaactaacataatttcgtttggtttagcaatgtcttttacttcttttaattcgttcatcaatgcttcatcgatgtgtaatcgacctgctgtatcaatgattacaaagtctaaatgttcttctttagcatgttttaatgcattagttacaatttgttgtggctttacttgatctccttcactgtatacaggaatatcaatttgtttccctactgtttgtaattgatttatcgctgctggacgataaatatctgctgcaactaacataggttttttgttgtattttttacgcatcaataatgctaatttacctgcagttgttgttttaccagcaccttgtaaaccaaccatcataacaacagtaggtggtttatttgacatattaatcgacgtattttctccacccatcaactgcgttaattcatcttgaactattttaataacttgttgccctggtgttaatgattgcattacatcggaacctaatgcgcgttctgatactgttttaataaattcttttaccactttaaagtttacgtcagcctcaagtaacgctaatcttacttcacgcatcattatctttatatcagcttcagtaagtttacccttaccacgcattttttgcatcgtcgcttgcaagcgttctgataacccttcaaatgccatatcgatgt

SEQ ID NO: 1950 - DNA, 138 bp, Staphylococcus aureus
ctataatatcttgtactttatcaacagcgtcttcgacattgttcgcttcaatgaccgatttcccttgactattacctagtttagcaaacttagctttcgtttgtccgaatacaaccatcgcgcgaacattttccatat

SEQ ID NO: 1951 - DNA, 238 bp, Staphylococcus aureus
caacacctccatagataaataatggattgtacgctttggctggtgcttcggccacagctaaactcgctgcatgtggaaagcggttaccgggtccgattacaaaagtgtcaaatgtgttatgggcattgaattgctctctaccaagcacatgattatcctcagttgtttcagtagaaggttttgttgtttcttttggagtagcagtttcattattactataatttgctaattcttcagt

SEQ ID NO: 1952 - DNA, 552 bp, Staphylococcus aureus
gaattcgccacctaaatatgttgttgcaacaatgctaccaccttctggcattaattttttagcttcatgagccacaattgttaatgagtaagaactaatgtcttgagctaacaagaagccttcacgtgaagtttcagaaaagcgtccgcgtaagtcttccatattagcaaatgcgattgaatgatatacaccatcaatattgccaacatctttaccaatttgctcaaaaccattaataacctcttcatcgctttgaacatcaatttgatataagtgcgcttctggttgatttaattgttctaataatttttcaagctctttacggctacgttctttacggtaagtaaatactaatttagcacctaattgatctaaaactttagcgacaccaaaagcaatactacgcttattagcgattcccatgatgacatatgttttgttttcaagatttaacatgtaagataactccttataataattaatttaacggatagaatatctaatcccagttttaactaactttttattcgtcaatacattttaacacaatta

SEQ ID NO: 1953 - DNA, 413 bp, Staphylococcus aureus
aatgaaaccacgacctatgttaccagcaccaaagtgaactgctttcattatgcatctgcctcctcgaatacttgtttaatttcttctgcagattttgcttgaacgatacgatccacattttcttcttcgctaaatgtaattgcaattttagataacaagtctaaatgttcgccatctttaccagcaattcccacgacaactttaactacttcgccatcccagtcaacgccttcagggatttgtaataatgttaaacctgagtgaatcacatttgttttagcttcatctgtgccatgaggaattgctaagccatttcccataaatgttgatacgacttgctcacgatctttcattgcttgaatataagcatctgttacagcaccactatcaactaaggctttacctgctttttc

SEQ ID NO: 1954 - DNA, 141 bp, Staphylococcus aureus
tgttgcttgtttttcttttctacaagtattttcacattaggtcccgcatccattgtaaaataacacggataccccgcttctcggcattcgtgaacaagcgccatgacatcataactttcttgcacaagatatgtgaacggc

SEQ ID NO: 1955 - DNA, 307 bp, Staphylococcus aureus
tgaatcacttcctgtggcacctgaaccgataatttgatggatttcatcaaagaatagtacggcattttgtgaagatttaacaccttcgattaatttttgaatattttcttcaaaagcaccacgatattgcgttccagcttctaatgatgaaatgtctacagaaataatttctttgtctttgattgctgctggtacatttccttcaacgattgcctgtgctaaaccttcaacaatcgcagttttaccaacaccagcttctccaactaatataggattgtttttagttcgtctacttaaaacttcagca

SEQ ID NO: 1956 - DNA, 869 bp, Staphylococcus aureus
ctgtaatcgttccgcaaccaatattagtacgttcgccaattacagcatcgccaatataacttaaatgtgaaaccttggcaccatctttaagatctgcttttttaatttctacaaaatttccaaccttaacatctgcacctaattgcgcgcctggtctcaattgcgcaaacggtccgaccttagtattcgctcctacgctagcatcattaacaacagactgttgaatacatgcaccattttcaatcgtactattgttaatttcagagtactgaccaataacaacatcttcgccaatttctgtacgaccattaattcgtacgcctggttcaatgactgtatcactaccaattgtaacgtctggaccaatataagtgctgtcaggatcgatgattgtcacaccatttagcatgtgataatgattcgtacgacgttgcatcgccttctcagcctgactaagcattacacgatcatttacacccatgatttcttcaacatcattggtacgatagacttctacgatgccgccatcatttaaaattaacgacaatacatcagggaggtaatattcaccttgcgcattatcatttttcacttgtgttaatttttcaaacaacgttttattattaaacgcaaaaatacctgaactaatttcattaatatccttttcagcttgcgttgcatctttctcttcaactatgcgttctaaacgacctgacgcatttcgaacgattcttccgtatccatatggttgttgaatcgatgcagataatacagttgcttgagcattagcatcctcgtgatgcgcaatcaatgttactaatgtttcctttgtgatgagcggtgtgtcaccacatacaacgattgtcgta

SEQ ID NO: 1957 - DNA, 553 bp, Staphylococcus aureus
taaagcaatgctatcaagcgcttgacttgttgtatcatcaacttgttgatttgttctattattcgtaatatctgtcatggcttgatttacaaattcattgattttatctagtgctacttgtctttcttctgctgttgcttctttatcctgattaatcttagcacgtaattcattcgctttttgattgattttttcacgtgcagctggtttaacttttgtttcaggttgaataattttaatcgctgatacaccatttgttgctgcttgattcacctgactattcgtttgagcttggtcaatagctgcaagtgctttttctttttctttagctaatgcttgtgaagcaacttctttctcattatctgttgaatcaagactattatcaatttgctgttgcttttctttaacagctttttcaatatctgcaattgcctttgttttaattactacttcagcttcaacattatctatagcatttaccgcttgatttgtagttgtgtctacctgatcatttgtttggttttgattaatttgattaattgcttgatcttta

SEQ ID NO: 1958 - DNA, 553 bp, Staphylococcus aureus; identical to SEQ ID NO: 1957

SEQ ID NO: 1959 - DNA, 1204 bp, Staphylococcus aureus
tataaatgatatattaagtttttagtattgttaattatatatatttcagaataattatcattctgattgatatttggaactaaccctttaaagtcttgattggatatagcttttaataattttttatattttatatcttttatggaacacttatatgaaaactcctcgcacaaaatattatcatccttctcctttttatattctttaaagtaatacaattcatctattgttaacgatgtaaatttttttataacatttgttttcttataaggttcactataaacatatactacatgaaccaaatttatagaatcagaaggcgaaaacaaatcttcaaaaatgtttattgcattatcatatacagctaaaaaataagtattattgatagttttaccgtcctccaaaaactggtatttatcgccacttaaacttaaatgaattgcgttttttacctttctaaaattcaacttttttatatccaaattatttatatcaaagcacataatttacaacaccttattcccttaagatttttccttctttagttaaagaagctattctttttcctttgttatttattaacttccaataagaaccaccatgtgattgccctttatttttggaaatagtccatttagtttttgaatctctccaggtaggatttttcccttaaaccttttgagtaaattcaccaatactcatccccttatcatttaacaaacttttattaatgtttttggttatattatgagtctttactgcttttagattgtaaaaattatcgtcataaatagtggcattttccgagattcaaatggtacaaagtacattgtaatatgcataatgatacctgtaattaatgtaataatagaaaagtgtatatatctcatatcgccacctgctatacaacttattaaataattaattccaagacatattaattatctaattataaccttagttacgttattacataatataaaaatatataataacttatttgcttgctcctttcactttttaagagtaaaaaataacctgaaacatagactttaacatccaagtttcaggttagtgtaatgtaaatgatttactttgttatattatgattaaacatctaattctctgcttgtaagtgctttaatcatctctggatcagcatgtgagaaaaattggctattactttcttctaatgtcgcaattt

SEQ ID NO: 1960 - DNA, 157 bp, Staphylococcus aureus
tgtacgtccatcataaagtacagttttaccatcacgagccataccagcttcttcaattgttgaccatacatcgtcatcgtttgcaccgtcaaatactggtgatgcaacgtgaataccaagatttttagcagccatacctaagtgtagctctaatact

SEQ ID NO: 1961 - DNA, 157 bp, Staphylococcus aureus
acaaccataactccaacttgttgttcgtcacctgctaatgcgtcacaaatacgttgttcaattaatcgtctcattaaaggatgtgtgccaagtggctcgcttacttctacctttatgtctggataccgtcgtttcatttcatgaacgatattcggta

SEQ ID NO: 1962 - DNA, 349 bp, Staphylococcus aureus
gcccattctgagaatttagggacaatatccatttgtaataattgcattacgattgatgcagtgatgtagggtacaatacccattgcaaaaatagaaaatcgtttcaaggctccgccaccaaaagtatttaataactcagtggcaccttgagaaccttggggattatcaaaagctgcaggatttactcctggagctggtatataagtccctattttaaaaattactaacattgctagtgtgaagaaaatcttgttacgaacctcttttgttctaaagaagttcacaagggtttgaatcattagatcacctcgtgtgctccacctttagcatcaatagcttctgctgctga

SEQ ID NO: 1963 - DNA, 552 bp, Staphylococcus aureus; identical to SEQ ID NO: 1952

SEQ ID NO: 1964 - DNA, 147 bp, Staphylococcus aureus
accaattttcttctggtttttcagagtttaaaattgtcggttcttcttccgcttttgtatttcgctcaataatcgttcctgacaatggcgtttgcacatcaatgaccgttttcgatgcttcgatactcacaatttcatcatccactt

SEQ ID NO: 1965 - DNA, 511 bp, Staphylococcus aureus
ttttaatggcgctcactgtcttcttagaaaaatcatgtcgtgctaaaaaagttttaacagtttcttgttgtgatatatgatacttaaatttcatcgttcttcatcacttgatatgaaagaatcgtgcacacgtttccagaatgggaatggtctaaaacgtgcaaacctcactttttcatttgctacacggtattgtattgaattaacatttttatgtttgatactaacatgatctatcgtcattctaatggtatcatgattaactggtgatattaaacatgtatgatgctttggtaatacaagtggtgatcctaccgttctaaacacacgattatttatcgaggcaatttctgtaatttgcattgcttcaagtgaaggatgtatcagtgcgccacctagcgctttgttataagccgttgaacccgaaggtgttgatacacataatccatcgcctctaaatcgctcaaagtgtttccctcttaagttaacatccacaacaagtgttgagcca

SEQ ID NO: 1966 - DNA, 150 bp, Staphylococcus aureus
tgcttcatttcgtttgaagatagttcacgcccatttttccaatgttgtgctgtaacaacctcgcctgtttctatgcgtttcgtccatactaatttgggcacaataccttctgctgataatgccgcaataaatggatttgaatttcgtttt

SEQ ID NO: 1967 - DNA, 436 bp, Staphylococcus aureus
aacaacagcgtctaaacgacttgctaataagatcatgaagttttcaccgtgtacaccgaattttttaccagcgatgtcaaatgtgttacggaattgtctttcagtcattccatataagtaacgtaatttttgtttttcacgtaattgtaaaccatattctgataattttttacgttggtttggaccatgttgtcctggtgcgtaaggacgtttttctaattctttaccagtaccgcttaaagagatacctaaacgacgagattttttccagtttgaacctctgaatcgagccataataagactcctcctttaattcttttttgttgttatgaataaacaaaaaagagtgttgcatgcttactaagatatattgttttatgtgtcttcaccttatagcgacagttacgtgacacgtccgcattgggaacaacatagc

SEQ ID NO: 1968 - DNA, 208 bp, Staphylococcus aureus
gatgttgattttgtttgaacttgtttgtcagattgagctgtggtaccaccattttcaataactgacattatatccttcttagttacacgaccttcaaatccactacctacaacttgtgataaatcaatgtcatgctctgaagcgagtttaaatacaacaggtgaaaagcgaccattattacgtggttgattttgtttagcagtagatg

SEQ ID NO: 1969 - DNA, 280 bp, Staphylococcus aureus
tagcttctaattgacgtaattgtttatcgcctcgccattcttgtgccaattcaacagcagctctttctaagttaccactaaactgttgtaattttgtttcgaatttttcaaataacgtaaacgcatctgctacactacctgcgaaaccagctaacactttaccttcatataaacgtcgcacttttcttgccgtttgtttcatgatgacttgttgaccaagcgttacttgcccatctccagccatagctgctttcccattatgtcttacagcataaattgt

SEQ ID NO: 1970 - DNA, 238 bp, Staphylococcus aureus
tcatggtatgaaccatcatataatttagctttaacatcaattaaaggataacctgctaaaacaccattttccatagcatctttaagaccagcttctactgatggaatgtattcacgaggaactacaccaccaacgatagcgttttcgaattcgaaacctgcgcctgtttcgtttggtgtgaattcaatgtgaacatcaccgtattgaccacgaccaccagattgacgagagaatttac

SEQ ID NO: 1971 - DNA, 122 bp, Staphylococcus aureus
tgtaagttactttatttttaccgcgtaagatagatgctacttctgatgataaacgacctaatgtttggccttcagcatcgataacataccatttgcgctcaatgtttgattcatttgccata

SEQ ID NO: 1972 - DNA, 568 bp, Staphylococcus aureus
tgcaatgccagaaaatgtattaacaactggcacgtctaatagatttgctaaacggattgttttacgtaacgtttcatcggcttctttcgcttctatcggatctggagaaattggattgttatgacaactgaaaccacttatttgtaagcctctgtctgtgattgacttcataaatgcttggcgcttgtcttcattttctaacaactcatctaacttacaaaatttatctcctgggttaccacctgttccaacttcaatcatatccaatccagattctgagacataatctaacatatcttcaaaatttttatcgtaaaataatactgaaaatacacctattttcattgaaaagcactccttctttttatattgagaattttgtatcatatatgataatcattaaagttgtatgctcttgttatcaagatcgctacgataaatcgcttctataagggcatttacattgcgtgcttcttccggtttcaccacaatctcttctatccctaaacacgcattgacaaagttacgcgcctgtctctcaccagcaatgtcttcgttatgctcaaca

SEQ ID NO: 1973 - DNA, 370 bp, Staphylococcus aureus
taaaatctcgttatactcaacaacatctccaactgcaacgattggacgttggttgtaacatgtacctgagtttgaacgtttaaatttagctaatggatagcgatctaattcaccttcatgctcaacgccgttctcttcaactagacgacgaacaagaatttcattagattcaacatgttcaacacgacctctgtgcttagctgtaatagccgcaccagaatcacgtgctgcaacgtgttccatacctgtaccaacaaatggtgcttctggattcatcaaaggcactgcttgacgttgcatgttcgcacccatcaatgcacggtttgagtcatcattttctaagaatggaatacatgctgtcgctgctgaa

SEQ ID NO: 1974 - DNA, 258 bp, Staphylococcus aureus; identical to SEQ ID NO: 1908

SEQ ID NO: 1975 - DNA, 226 bp, Staphylococcus aureus
  misc_feature (1)...(226): n = A,T,C or G
taagacttagcttctttacctaattcagtttcttcttttatagcttttctgaacatgtcaccagttgaaatgtggggtattgggaatttcttgacaattncacttgcttgagttcctttacctgcgccaggtaaacccatcaaaatgatatncataagtgccctcctaaaattatctaccaccaaagcctttatattctttttgagatacttgagcttctaaagat

SEQ ID NO: 1976 - DNA, 225 bp, Staphylococcus aureus
tataaatgatatattaagtttttagtattgttaattatatatatttcagaataattatcattctgattgatatttggaactaaccctttaaagtcttgattggatatagcttttaataattttttatattttatatcttttatggaacacgttatatgaaaactcctcgcacaaaatattatcatccttctcctttttatattctttaaagaaatacaattcatc

SEQ ID NO: 1977 - DNA, 177 bp, Staphylococcus aureus
aatgactttacatttttcgcaaataggttttactgatggtcttactttcatttttatacctccctatattatggagtgacgattatttataacgataagtaattcttccgcgtgttaaatcgtacggagacatctcaacagttactttgtcgccaggtagaatacgaatgtaattca

SEQ ID NO: 1978 - DNA, 353 bp, Staphylococcus aureus; identical to SEQ ID NO: 1868

SEQ ID NO: 1979 - DNA, 235 bp, Staphylococcus aureus
tactgcaataactgaacgtcctgaatagtcaacacgtttaccaagtaagttttgacggaaacgaccttgtttaccttttaacatatgagataaagattttaatggacggttacctgggccagtaactggacgaccacgacgaccattatcaattaaagcgtcaacggcttcttgtaacatacgtttttcgttttgaacgatgataccaggtgcacctaaatctaataaacgtttc

SEQ ID NO: 1980 - DNA, 267 bp, Staphylococcus aureus
tgtaacacggcatgcctatgactgaatgtaccacgttcactatcttgaccagttaagcgaatcggtgtaccatcttgtaaaattgtcgcaaatgcaagttgttctgcttgtgcccaattaactaaaccatcttctttattaaacggctcatgacgcttctcaagaactttgtttaactttttcaaaatgttaaagccatccggatatgttaacaatgcatcatttatttctttcaagtgatcaaaagtaaatgattgttcgtctgct

SEQ ID NO: 1981 - DNA, 147 bp, Staphylococcus aureus
ttacctgcctcaattcttcctgcaatatgatccacatcatgtgttgtaaatccatctctatgtgcaatttcatacatgtagtctaatgccttacgaggacctggaccaactggtgcgtcttctgatgcttttgcatcatctctcaca

SEQ ID NO: 1982 - DNA, 422 bp, Staphylococcus aureus; identical to SEQ ID NO: 1794

SEQ ID NO: 1983 - DNA, 126 bp, Staphylococcus aureus
agaaatatgtacaagtccttgtacacctggtgcaatttcaacaaatgcaccaaagtttgccaatcttactacgacaccttcaatgacatcattttcgtggaattgacctttaatattttcgaaagg

SEQ ID NO: 1984 - DNA, 220 bp, Staphylococcus aureus
tatcggtaaatttattatattgtttcataaaatgtaacttaactgtgcctgttggaccgttacgttgcttagcaatgataatttcaatttcaccgttttcatcattcgtttgtggctcgaaaccaccatcatcgtcatcatcttcatcgccgccacggttatagtaatcatcacggtataagaatgcaacgatatcggcatcttgctcaatcgaaccaga

SEQ ID NO: 1985 - DNA, 521 bp, Staphylococcus aureus
tgctgtatcaatgattacaaagtctaaatgttcttctttagcatgttttaatgcattagttacaatttgttgtggctttacttgatctccttcactgtatacaggaatatcaatttgtttccctactgtttgtaattgatttatcgctgctggacgataaatatctgctgcaactaacataggttttttgttgtattttttacgcatcaataatgctaatttacctgcagttgttgttttaccagcaccttgtaaaccaaccatcataacaacagtaggtggtttatttgacatattaatcgacgtattttctccacccatcaactgcgttaattcatcttgaactattttaataacttgttgccctggtgttaatgattgcattacatcggaacctaatgcgcgttctgatactgttttaataaattcttttaccactttaaagtttacgtcagcctcaagtaacgctaatcttacttcacgcatcattatctttatatcagcttcagtaagtttaccct

SEQ ID NO: 1986 - DNA, 353 bp, Staphylococcus aureus; identical to SEQ ID NO: 1868

SEQ ID NO: 1987 - DNA, 230 bp, Staphylococcus aureus
gcatcatgttgcgcttctgcatctactgtagcttctttatttgaagtctcagctgcattgtcatttttagactgctcaacgctggctttttcaattgcttcagttgcagaaatttgatcctctttatctactttagtagcagtgccatcgcctgcattttctgctttagtatccgtcttagcgtctgttgatgtattcactccagcaaccttcgaatctttactgtcagc

SEQ ID NO: 1988 - DNA, 135 bp, Staphylococcus aureus
ttcctcaaatttcacaagtacgtgatcttcacttgccgccacaggttccgaattttgcaataaactaacgagtgattttttatcattatttttggcatgatcaatcacttcttgccaatgatctttcaacaattt

SEQ ID NO: 1989 - DNA, 234 bp, Staphylococcus aureus; identical to SEQ ID NO: 1746

SEQ ID NO: 1990 - DNA, 257 bp, Staphylococcus aureus
accgttaatgataatgtaaagtattgttgtggtttgaactgattaatctcttgttgtcgtgtatttactaattgaatcgttggtgtctgaacacgtcccagggatagctgtgcatcatactttgttgttagtgcacgcgttgcattaatcccaacaatccaatctgcctcacttctcgctaacgctgcataatacaaatcgttatattgacgaccgtcttttaaatttttaaaaccttgttgaatagcttttttagt

SEQ ID NO: 1991 - DNA, 436 bp, Staphylococcus aureus; identical to SEQ ID NO: 1967

SEQ ID NO: 1992 - DNA, 206 bp, Staphylococcus aureus
caccatgtttgcgtttcttacacgagtaagcatatctgcgattggatctgtcattgtcattgattgttgcctcctttcagactcttttttattaccagctagctttacgaacgccagggatttggcctttgtaagctaattcacggaaacaaatacggcataatttaaatttacgatatacagaatgtggacggccacaacgttca

SEQ ID NO: 1993 - DNA, 154 bp, Staphylococcus aureus
ttttagcgcttcaccgaccgttttcaattcatagcctccttacacttactcgaagaaaccaaaaccaccaccaaacggatctccaaaatctaaattattcttactttggactgtctgtttcttcatttcttcgtaatgtatttcttgattttca

SEQ ID NO: 1994 - DNA, 236 bp, Staphylococcus aureus
tgcaataccatgctcaagtttggcaaaacaggtttcaaatgttgagcgtgtaggatttttagtacgtgtataatcaaaacctgtcgattgtcctagttttggatgcttgtaggcagtagataaatggattggattcgctatagcaccggttgaatcatcggttaatgtgatttgggctaactgtgtatccttcatattaagaccctcctataagaaaaaataaaaaaagcttccgt

SEQ ID NO: 1995 - DNA, 197 bp, Staphylococcus aureus
tgcgcttttaaatcgtttattaaaacttctatcatatcgtctttagaattgaagtgttgtgctttttcgacatgttgctggcccgaatcataaatatacttcgcttcattaccaaacgtatacaacacatctatatgcttttcttctaaataattacctacaccgatatgcatttctttgctattttcacctaattc

SEQ ID NO: 1996 - DNA, 144 bp, Staphylococcus aureus
ttactaataacatcagttttgattttgcgttgtgcatcataaattaattgacctgattccctcatatatacaaatcctcgagaaataatgtctggaccagaaagtaatttatttgtattaaaatcaatactaacaacaacgata

SEQ ID NO: 1997 - DNA, 196 bp, Staphylococcus aureus
aactacatctcctgtttctggattcttaattcctggtttacctggaacttcctctttctctcctgttggtaacttcggatcaaattcgtctcgatgacctggtgttatcgtttctggtccgtattctgttaattcattaatcggatcttttgtgatttcttctttcgattcacctttactaataatttctccagtt

SEQ ID NO: 1998 - DNA, 135 bp, Staphylococcus aureus; identical to SEQ ID NO: 1988

SEQ ID NO: 1999 - DNA, 264 bp, Staphylococcus aureus
tgttcaccatttctaatcttatcggctaaatcattcagttttcttaatcggtgatttacacctgattttgaaattggaccagttgataccatttctccaagctctttcaacgaaatttcttgatgttctactcgaattctagcaatctctctcaacctgtctggtaaattttcaataccaatttctttatcaatcaatttaatgctctcaacttgtttcatcgcagcactaactgttttatttagattggccgtttcacaatta

SEQ ID NO: 2000 - DNA, 759 bp, Staphylococcus aureus
gtttcatcatcaaaatcagcgatagtgttcataaatgccttccactcaaatacgagatcactacaatcttggattggataatgactcaaagacatatgattaaatttattgaagatagttgtcaatttatgtctgatatcctgcgattgtaagctgtctttacgtctaataaatgattgatatgctttcgtatgaccatattttatagatgcttctttatcatattgtgactgtagtgtcttgtttaaaatgctggtatctattagagagagtcctttaataaattcacatacagagcgtctaattaattgtaagtcagaaatctttttatctaacttgcttatttgctctgataataactttcgcaattgttcattatcatacgaaatgtattgttttattttagcgatatcaaaatcaaaagacttgagtattaaaatcttttgtaatttttctaagtcttgctgtttataaacgcgataatttttatcatttttatctggaactaataatcctatttcatcgtaataatgtaaagttcttttagttacacctgtaatttcaataatatcttttaaagtgtatgtgtatgccaaaattcagtcacctcatttattattttttgtgctggaagtgttgtagcaacttcaataggtatgtttgttttttgtaaaaagtattttaccaagtgatagccacatgcatacccggcagcatgagataagccaacgataggcctactttgaaagtttattaatt

SEQ ID NO: 2001 - DNA, 208 bp, Staphylococcus aureus; identical to SEQ ID NO: 1968

SEQ ID NO: 2002 - DNA, 310 bp, Staphylococcus aureus
tacaacttcatcatccatgaaacgaccattttcatctaatttagagtttgcttgtgctacaacatagctatcttcttcgtcagctgttaaatagtcaatttgatcagtgatagcatgtgtatctaaatcaactttacgatatggtgtttcaataaagccgaattcatttacacgtgcataacttgataatgagttaatcaatccaatgtttggtccctcaggtgtttcaattggacacatacggccatagtgagagtagtgaacgtcacgtacttccatttgagcacgttcacgtgttaaaccaccaggt

SEQ ID NO: 2003 - DNA, 334 bp, Staphylococcus aureus
tacttaagtcaaattttcctgggcaataagaatgttcaatttccatcgtatcaatatcaacattctcattttcgaacattttgctaattaagaggtacatcacagtaaacgcttcatcaatcgttgtttctgtttgtcctttgaacatcagcgatatatttaatacaccttgatctagaacgacacctaagccaccagaatttctaacaatggcattataaccaatctcattcgttaaataatcaatgccatcttttaaaaacggcaatcttgaatcatgaataccaagaataacagtatgttgatgaatccaagtacgcacaacattatctga

SEQ ID NO: 2004 - DNA, 85 bp, Staphylococcus aureus
atgatttgattgctgttttcttgacgttcttttcgacgttgtgcacgccactttaatgagcgactcatatcatagtaatgattaa

SEQ ID NO: 2005 - DNA, 197 bp, Staphylococcus aureus; identical to SEQ ID NO: 1995

SEQ ID NO: 2006 - DNA, 375 bp, Staphylococcus aureus
gcaataatgcgctgttgtttatccaatacgattggcatttgatcccgaacccactgtggcactttacaatctataaacaggcgattcactttcttataaccatcgcgcccattcagtttaaatgtatcgccactttgtcgtgttctcactgtaagcggaaataaacattttggtaaattagaatgtatctctaatcgatatttgttaaaaatataattacctggctttttaattgtttgaactctaaaatatgtatcgccattatttttagccattattattaatttaccatatgcgatttgaattatccatttatccgtgagattaatactgaattgtgctttcttactactaaattgtttaaaccactcttcg

SEQ ID NO: 2007 - DNA, 438 bp, Staphylococcus aureus
agaataacgatatccttgtatgtcgcacttctatagcttcctgttttcatatcataaactttttgatgttctaagatatctttaacttgttctactataaaatgcgcttcttgttcactaccagttaaatcactatgttcttgatccgcttcaacaaggacttttaagtttactggatggtccgattcatcatatggtgcaccataatacaactgtgccgcttcatcatattttacttcaccgacttgttcatccatcatatgtttgaatatatagttagtcgttgacagtacttcttttcgagaacggaagttttgcgacaaatcaattcgacgtccagtgccatctccatctatagtaaagcgttgatacttttcaataaataaacttggatcagcttgtctaaatttataaatggattgcttaacatctccaacc

SEQ ID NO: 2008 - DNA, 213 bp, Staphylococcus aureus
catttcgtttgaagatagttcacgcccatttttccaatgttgtgctgtaacaacctcgcctgtttctatgcgtttcgtccatactaatttgggcacaataccttctgctgataatgccgcaataaatggatttgaatttcgttttaaaaacaacttttgtccatcttgttcagccatatatgcttcaccagatgcaccacctgctgaatcaag

SEQ ID NO: 2009 - DNA, 111 bp, Staphylococcus aureus
tgtctatcttgtaaacgcattaattctgggccatatgcaccccaacgtcctgattcttcccataattcagcttgttgtaacgctggcattaaaatttcaacagaatcgata

SEQ ID NO: 2010 - DNA, 757 bp, Staphylococcus aureus
gtttcatcacaaaatcagcgatagtgttcataaatgccttccactcaaatacgagatcactacaatcttggattggataatgactcaaagacatatgattaaatttattgaagatagttgtcaatttatgtctgatatcctgcgattgtaagctgtctttacgtctaataaatgattgatatgctttcgtatgaccatattttatagatgcttctttatcatattgtgactgtagtgtcttgtttaaaatgctggtatctattagagagagtcctttaataaattcacatacagagcgtctaattaattgtaagtcagaaatctttttatctaacttgcttatttgctctgataataactttcgcaattgttcattatcatacgaaatgtattgttttattttagcgatatcaaaatcaaaagacttgagtattaaaatcttttgtaatttttctaagtcttgctgtttataaacgcgataatttttatcatttttatctggaactaataatcctatttcatcgtaataatgtaaagttcttttagttacacctgtaatttcaataatatcttttaaagtgtatgtgtatgccaaaattcagtcacctcatttattattttttgtgctggaagtgttgtagcaacttcaataggtatgtttgttttttgtaaaaagtattttaccaagtgatagccacatgcatacccggcagcatgagataagccaacgataggcctaccttgaagtttattaata

SEQ ID NO: 2011 - DNA, 208 bp, Staphylococcus aureus; identical to SEQ ID NO: 1968

SEQ ID NO: 2012 - DNA, 135 bp, Staphylococcus aureus
ttcacattgtgcgtattcttctctcgtcaacaatgtttctgcttttttctctccatgtcgcgtaccaatgatttcaattgcattatcagcttcaaacaattctaataatgcggtcgcaagatcccctaccgttga

SEQ ID NO: 2013 - DNA, 521 bp, Staphylococcus aureus; identical to SEQ ID NO: 1985

SEQ ID NO: 2014 - DNA, 244 bp, Staphylococcus aureus
tgtctaccagaacgaccacgtaattgcctgtctacacggctattttccatatgttcatgaataataacagctaatccacctaatgcttcgacaccttcaccaagtttaatatctgtgcctcgacctgccatactagtcgcaacagtcatggaaccaatttgccctgcttcagctatcatctgcgcttcttttgcaacattttgcgcaatgagtaaattattaggaatatccatttggaataata

SEQ ID NO: 2015 - DNA, 193 bp, Staphylococcus aureus
gcctctacataaccactatcaaattcaaacaatccaatatcgaagtaatcccaactcacaccttttttgtgttgaaaaataggttctaaatcgtctcctccaatttgcaaaactctaaatttacgtggcatcattttcaccttctattaactcatcgagctgattaataatattcttagaagcatatgcatct

SEQ ID NO: 2016 - DNA, 653 bp, Staphylococcus aureus
gaatacgaggaagaccttgtgtgatatcgctacctgctaccccacctgtatggaatgtacgcattgtaagctgtgtacctggttcaccgatagattgggctgcaattgtaccaactgcttcaccaacttcaactttttcaccagtagcaaggtttttaccgtaacatttttcacaaacaccatgtcgtgcgttacaagtaaatgctgagcgaatatacatttgttcaataccagcatctgtaattttcttagcaatttcaggtgtaattaattcatcaggacgaatgattatttcatcagtttcaggatgacgaattgtttctttagaataacgaccttcaatacgttcgataaatggttcaatcatttctgtaccttctttaatatcagaaactaataaacctctatcagtaccacagtcttcttcacgaacaataacatcttgtgccacgtcaacaagacgacgagtaagatatcctgagtcagctgttttaagtgctgtatcggcaagacctttacgtgcaccgtgagttgagatgaagtattcaagtactgttaaaccttcacggaatgaagatgtgattggtaattcgataatcttaccagatggtgcggccatcaatccacgcatacctgctaactgtgtaaagtta

SEQ ID NO: 2017 - DNA, 236 bp, Staphylococcus aureus
tccagccttcaaccgcacctttaccagcacccatacgtacttctaaaggttttttagtatatggtgtatgtgggaagattttaatccaaactttcccgccacgtttcatgtaacgtgtcattgctatacgagcagattcgatttgacgagatgtgatccaagacgttgttgtagcttgtaaaccaaactcaccaaatgttacgtagttaccgcctttagaacgaccagttgtttta

SEQ ID NO: 2018 - DNA, 310 bp, Staphylococcus aureus
tatttttacaatctccaccaatgacacgtcgtcattgctacctcataccaaacaaaaaacagtctcgcaatcaagactgttttccactcaatatattcatccattagcgtaatagattatttgacttctgtagctacaaagattttacgtttttcccaaacgcctgtcttttcattgtaatcatcacaagtaattaatgttaattgtttatctttacctttttgttcatctagaactcctacatctgtaggcttaacatctcttatacttgtcattttatacttacgtgtttcattaccaactttaaagt

SEQ ID NO: 2019 - DNA, 1256 bp, Staphylococcus aureus
tgtccagattgttctccacctaagttataattaccgcgacgcatttcttctactacatatctgtcgccaactttagttttattagatttaattccttcttgttcaagcgctttgtaaaaacctaaattactcataacagtagaaacaatcatgtcattattcaattcttgatttttatgcatttcttgaccaataataaacataatttggtcaccgtcaacgatttgaccattctcatctactgctatgattctgtctccatcgccgtcaaatgctaacccaaaatcactttcagtttcaactactttttcagctaatttttcaggatgtgtagagccacatttctcattgatattatatccatcaggactacatccaattgtttcagtatctgcttctaagtcaccaaataagaatggcgctagtgatgatgttgaaccatttgcaccatctaaagcaattttcaaaccttcaaagttaacatctactgttgattttaaatagctcaaatatttttgtgccccttcaaagtaatctgaataatgtacaatatcattgccaactggtcttggtaattctgggttttcttgatccaataatgcttcaatttcattttcttgttcatctgatagtttaaaaccatctgatccaaagaatttaataccattatctgcaactggattatgagaggctgaaatcattacacctaactctgcacccatatcgcgtgttaaatatgcaacacctggtgttgaaataatacctaatcgcatcacttctgcaccaattgaaatcaaaccagctattaatgctgattctaacatttcacctgaaactctagtatcgcgacctacaagtacacgtgggtgtttttcacctttattatgtgctagaacatagccaccgtatcttcctaatttaaatgccaattcaggtgttagttcttggtttgcgacacctcttactccgtctgtaccaaaatattttcccattgtttactctcctttaatttagctatttattttacatttatataagccttcgtttcacttggttgtgctttagtgacatgttctggtaaattgatttttacagtcttttcagttgattctgaaataccatctaaatctacttctgcatcaacttcgcttatattttgtaagtcatctcgactaccgaagatttcaatttctttatcttctaaatcaatcgaacttaactctttatcatctgctaaactacctttctgtttaaca

SEQ ID NO: 2020 - DNA, 307 bp, Staphylococcus aureus
tgtttgtttgtataagttatttaaaatgacactagcatttgcatccttacgcacatcaataacgacacgcacaccagtacgtaaacttgtttcatcacgtaaatcagtgataccgtcaattttcttgtcacgaacgagctctgcaattttttcaatcatacgagccttattcacttggaaaggaatttcagtgacaacaatacgttgacgtccgcctccacgttcttcaataactgcacgagaacgcatttgaattgaaccacgacctgtttcatatgcacgtctaataccactcttacctaaaata

SEQ ID NO: 2021 - DNA, 260 bp, Staphylococcus aureus
tcttgatgcagatttttgagggactgatttgattgcgttttgttttgttgtttgttgtgactgctcttttgctggcgcttcatttacctgttgttgtttgtcaggtacttctacttcctcttcatcatctattacaaaaaatccactaaataaatcttttaaagccaagtggctcactcctcttctcctacaagtttagtcccaattctaacaaacgtcgcaccttcttcaactgcaataagatagtcattactcattcc

SEQ ID NO: 2022 - DNA, 405 bp, Staphylococcus aureus
ccattgaatctctgtcacgtactgtaacttgattatcttctaatgaatcaaagtcgaatgttacacaataaggtgtaccgatttcatcttgacgacggtatcttttaccgatagattgtgattcatcgaaatcgattgagaatttagaacttaattgctcaaaaatcttaatcgcttcgccagataatttcttacttaaaggtaaaatcgctgctttatatggtgctaatgcaggatggaagtgtaaaactgtacgtgcatctttactaccttcaacgccttcttcatcatatgcatcacataagaaagctaatgttacacgatctgcaccaagtgatggctcgatacaatatggaatatatttttcgttcgtttctggatcatggtatctgaaatcttcaccag

SEQ ID NO: 2023 - DNA, 230 bp, Staphylococcus aureus
attgtattaggaccatttggatgtgcagaaattgcccagcattcaccagttgtttcattagggatatcatagttaaatgcttttaatgcatgaccgccccaaattctgtctttaaaaacgggttgtaaaaataatgccatagttaaaactcctctatattttcattaataagttataaatttctgtagtactgtttgcattaattagtgattggcgtgtctcatcattca

SEQ ID NO: 2024 - DNA, 386 bp, Staphylococcus aureus
tgcctgcaagtgggtcacgtttacaaatactttctattgtatcgataatctctttattgtttgttgtagaagttgctgaaacaaaccaactttttttaggaatattttggcaaaacttatcaggattaccaaattcaggactttgtcgcgctaaatttttccatagtgtccaactaccacctaattcgtcagttggtggcgctggtgtatcattatcaccataagtagagctttctgtaatactaccgtttgtcacaaagacaagatcgtttatagtcagtttaatagattctgcattaccattacggtcaattaatatttctcgggcaattttttgacttgtcgtaacatctattttaatatcttcgacttttacatcgtattca

SEQ ID NO: 2025 - DNA, 135 bp, Staphylococcus aureus; identical to SEQ ID NO: 1988

SEQ ID NO: 2026 - DNA, 236 bp, Staphylococcus aureus; identical to SEQ ID NO: 2017

SEQ ID NO: 2027 - DNA, 578 bp, Staphylococcus aureus
ttttgctggcgcttcatttacctgttgttgtttgtcaggtacttctacttcctcttcatcatctattacaaaaaatccactaaataaatcttttaaagccaagtggctcactcctcttctcctacaagtttagtcccaattctaacaaacgtcgcaccttcttcaactgcaataagatagtcattactcattcccattgataattcatcacaaggcgcatattctaaattgagtcgttgtatttcttcttttttcaaacgtaactgtttaaataacgatctaatatatgcttcatcatctgtcaatggtgccatcgtcattaaacctacaatttcgattttgtcatattttttaagatcatctataaactgatcaacatcttctaaagcaataccatgtttagaagcttctcccgaaacgttcacttgcaagaaacatttaattttatgttctgcacgtttgttaatttctttggctaagctcaatcgatctaaagcatggaaataatctacgtcgtttataacgtccttaacttttcgagattgtaatgatcctataaaatggatcaccgcatctga

SEQ ID NO: 2028 - DNA, 482 bp, Staphylococcus aureus
ttaccaggtaatttttttataatatcaacaaagaatcgtccaggaagtactactgagcctgtttctgaaatattgacaatatcttcgccatctacagttttaggaatagtgatttctattgaaatttcagagtctgaaccagttaatataacttcatgttctttcgcatcgattttgataccagttaatataggtaatgttgttcttggtgaaatagcttttaatgtgtcatttaattgtgtaataaaataatctcttttaatagtgaattccatcattaattaaaactccttccagtcgtttatatataattatataggttttaagttcttagtaatagtagtaggtgctgtggattggtggataagtcttaaaaacatagatttggcgaagttatacacatgttgataacttgtgtatggtgtgtatgacttttaaacattatccacaaaatgagttttgctcatcttgccacattagca

SEQ ID NO: 2029 - DNA, 299 bp, Staphylococcus aureus
tagtcgaatttcattgttttatcaaagttttccatttgcgacactcctttaattacaaatataactcactatcatcatacaatattatggctttaaattatagatttttaatgtaatctttaataaagcttaatgattttgagatattttcaggttgtgtaccgccaccttgagccatatctggacgaccgccacctttaccaccaacgattggtgccatttgtttgataagatcaccggctttaacgttatttgttaaagatttagggacagttgcaaccatcgatactttatcatca

SEQ ID NO: 2030 - DNA, 610 bp, Staphylococcus aureus
caaagattggtttacaacgttttaattgatctaagtttgctgggtactcagtaatttctttaccgtctaattcataagctgtacagattttcactgtgtctaggcctgttaaaacatcgattgagttaatagataaatctgtaataccacttacacgacgagagtgacgtaatacaactgaatcaaaccaacctacacgacgtggacgtcctgttgttgtaccgtattcacgaccaacctctctaatatgatgtccatcttcatcgaataattcagtagggaatggaccatcaccaacacgtgatgtataagctttacatacaccaattacctttgaaacgaatgtaggacctacacctgtaccaacagtaacgttacctgcaattggattacttgatgtaacgaatggatatgtaccatggtcgatatctaacattacaccttgcgcaccttcgaaaagtaccttttcatctgctacaaatgcatcgtctaagatttttgatgtgtctgttacaaattcttttagacgttgacctgctgcataatattcttcaaagatatcatcaaatgatggacatgtttcgttaaacatacctttgaaatatgcttg

SEQ ID NO: 2031 - DNA, 559 bp, Staphylococcus aureus; identical to SEQ ID NO: 1890

SEQ ID NO: 2032 - DNA, 110 bp, Staphylococcus aureus
tgtacacccgcgaagtttaaaccttcatggaagtcaccttggtttgagctaccttcaccaacagttgctgttgcaattttcttcttaccatccatttttaaagctaaagc

SEQ ID NO: 2033 - DNA, 213 bp, Staphylococcus aureus
cctttataaacgataaaaccatctttaatataaataccatcaacttcttgttgagttgagaaatacaatgtcttagcttttaattcttccgactctatcacttgtctttgatgataattacaaatcaaataatcctcttccgtttgatttttatatatttgctttttagcattttgatagttttctaaattttcatggtaatctagatgcgcc

SEQ ID NO: 2034 - DNA, 147 bp, Staphylococcus aureus; identical to SEQ ID NO: 1981

SEQ ID NO: 2035 - DNA, 134 bp, Staphylococcus aureus; identical to SEQ ID NO: 1873

SEQ ID NO: 2036 - DNA, 185 bp, Staphylococcus aureus
gtattaataaaatatttaataatggtaacacaaacataaagctgtcaaatcggtctaaaataccaccgtgtccaggtagtattcgacctgagtctttaacgccgaaatgacgcttaaatcctgattccactaaatcacctaattgaccaaataaacttaaaatcaatgtcactccaagtaatatc

SEQ ID NO: 2037 - DNA, 485 bp, Staphylococcus aureus
tcaaaatcagcttgttgagatgtatcatctttattttgattagaaaaatgtgtagcctttgatctttttctttgccgtcttttcttagatgtattcctcgtaaataattctaattcatctttatcttcatttgattcttgttgatcgttcttcgttttatcatccatcaatactcacaccctttaataagatggtaaatgggcacggaatctttcaataaatttctctccacgctcttcaaaagtactatattgatcccaactcgcacaagcaggtgacaataatacaacatcatttggttctataatatcttgtactttatcaacagcgtcttcgacattgttcgcttcaatgaccgatttcccttgactattacctagtttagcaaacttagctttcgtttgtccgaatacaaccatcgcgcgaacattttccatataaggaatgagttcgtcaaattcattccctcgatccaaaccaccaca

SEQ ID NO: 2038 - DNA, 143 bp, Staphylococcus aureus
tgtaagtattcaccttttaactcttcatagttttcaataacaccgttatgaactagagtaaaacggccatttgatgattgatgtggatgagagttttcatgattcggtacaccgtgtgttgcccaacgtgtgtgaccgattcc

SEQ ID NO: 2039 - DNA, 134 bp, Staphylococcus aureus
taacggtacaccccacacacgttgacgagaaataacccattcgccacggtcacgaaccatattgtaaatacgtgttttaccccaatttactttgaagtttgtattttcgattgcatctaaaatatcttgtctta

SEQ ID NO: 2040 - DNA, 542 bp, Staphylococcus aureus
gatagaagaatgttaataacaatgttctaatatgcgctccatccacatcggcatcagtcataatgacgattttgtgatatcttgctttcgctagatcaaagtcgccaccgattcctgtaccaaatgctgtgatcatttgacgaatttcattgttattcaaaattctatctaatcgtgctttttcaacatttaatatcttacctcgtaatggtaaaatcgcctgcgttctagagtcacgaccagattttgtagaccccccggcagagtccccttcgactaagaaaatctcacattcttcaggacttttactagagcaatcggctaatttacctggaaggcttgctacatctaacgctgatttacgacgtgttacttcacgcgcttttttcgcagcaacacgtgcacgtgccgccataatacctttttcaaccactgtacgtgcgacttgtggattttcatataaaaatcgttcaaagtgctctgagaataatttatctacaacttgacgcacttcagaattacctaattttgtcttcgtttga

SEQ ID NO: 2041 - DNA, 100 bp, Staphylococcus aureus
ccttgcctaatattttatgcgcaagattgatacctgcaactaagccgctagctgcgctttctacataaccttcaacaccagtcatttgtcccgcaaactg

SEQ ID NO: 2042 - DNA, 156 bp, Staphylococcus aureus
tgtattttgatcacctgtgtaagcgtgaattgtagtcattaaaccttcaactaaaccaaagtcatcgtttaaaactttagcaactggtgctaatgagtttgtagtacatgaagcacctgaaacaactgtttcagaaccgtctaactcttggtggtt

SEQ ID NO: 2043 - DNA, 184 bp, Staphylococcus aureus
taaaccattggcacgtctaattttttcaacattttccggtgaacctgaaccgtagtattgaattgcgatacggtataagttttcttgaccattcactgtatgtctttggccaccaccttgacgttgttgttgctgttgttgattttgattagcttgttgttgattttgattattttgtgcttga

SEQ ID NO: 2044 - DNA, 215 bp, Staphylococcus aureus
acaaccgttatgaggtactggagtaacgtctctgatcgcagttacttctaaacctgcagattgtaatgcacgaatagctgattcacgacctggaccaggtcctttaactgttacttcaactgtttttaaaccatgctccatagctgatttagatgcagtttcagaagccatttgtgctgcaaatggtgttgattttttagatcctttgaatccta

SEQ ID NO: 2045 - DNA, 418 bp, Staphylococcus aureus
tgtttttagtttacccgaactatcccttgataatgattgtgacatctgcggataatatttcattttcttagatatcgtcgaaatatcaccgattacttgaagtccatctgtcgtaaacaattcaattctgctttgtttgtttttacttggggcgtatgtcacttcggcaatatatcgtctaacttcaggtgtcatttcagataacgccttaatcatatcatcttcttttgtacctttgaaaccatccatgacaggtgcatcattaattttgacatcatttgaacctttaagcaatttaccattttctaataaaggtaaatatttacctttatatttcactaaagcaataatttcattttctgtgatatctacgtttaatgtgtttggtaattgcttgtgtatctcaacacttttgatt

SEQ ID NO: 2046 - DNA, 248 bp, Staphylococcus aureus; identical to SEQ ID NO: 1814

SEQ ID NO: 2047 - DNA, 298 bp, Staphylococcus aureus
tgaacaagagaattcgtcaacattaaatcaaataatttacataaaaataacaagaggctaaagcattagcctctgttatatacttgttattccgttacttcagtttgagattcaacttctgcaactggtttagctgttttttcgtattttacgtcgctataacgtctcataccagtaccagctggaattaacttaccaataattacgttttctttaagacctaataagtcatcacgcttacctttaattgctgcatctgtaagaactcttgttgtttcttggaatgatgctgcagata

SEQ ID NO: 2048 - DNA, 298 bp, Staphylococcus aureus; identical to SEQ ID NO: 2047

SEQ ID NO: 2049 - DNA, 309 bp, Staphylococcus aureus
taccttttcagcttccatatgaccaccacgagtcttagcaccttgtgccaacttcagctcaaatgcgcgtacgttagataactgtgcaacctctttaaataaaccttcactaaaattaccttctttatcacgaacaccaaataaaccgggaccaatttggaaaatgatatccccattaccttttaaatgatattctgataagccaccttcacctgtattcatccaagtgcccgctttagctagacctttagataaagctgtaatggcattttttcctaaagcgccataactcataccagattgtcctac

SEQ ID NO: 2050 - DNA, 183 bp, Staphylococcus aureus
tgttttcaacgtataatctttttctaaacttttatatttagtattgcttgaagcaccctggtcactacctccatgaccaggatcaagcactattgttttaccttgcaaaggatttttctccttcgtattatccgcgacaatatctaaatttgtgtgccatccagctatccaacctttttcatt

SEQ ID NO: 2051 - DNA, 540 bp, Staphylococcus aureus
gttaataatttacgatcttttaacgttcttcctgtcatatcgtcgttaactacttttaatccttgtttagttaataaatcagcaactaaccatttcaagcgtccaggtaaataacctatttcaatatttgcaccttcatctaatgagtcagggaagacacaaacagagtatccttctaatggagatttttctctgttaagccctgctgaaagtagtgctgctggtccatgacataatgtaactataaagcggtcattgtctaatgcccaatctaatgtttgttgaacgtcctcactttcagaaataccaacaactgcagcatgtccgcctgggataaagacagataaatagtctgaatcaggtcctaattcatttttaatcacatctgctaatttttttggctgttttaatttttctttcaatttattataagtacttataactgcctcgtcttcagttggcatagcccataattctaatttaactggataaccagataatgtcgcaacatcaacgtcaaaacctgcttccattaaatga

SEQ ID NO: 2052 - DNA, 196 bp, Staphylococcus aureus
tatcttgatctgaagcagaatcatagaatgcatgaccatattggtgtttaactttttcagcagtttcataagaagtgtttaatccttgtgcaatatcgtctgtaatatcacgccctgccatttcgatagaatcagcatctactaattcaccgcgttcataaaaagcaacttgcgtaacgtcttcaccaatatcaat

SEQ ID NO: 2053 - DNA, 250 bp, Staphylococcus aureus
ccttcgttattgtctaagattttattataaagttgtgtcgtcgaaagttgaaaatgtgacgttggttttttcagtaatttgtcaattttagttgtttcagtgtatgtgtctactgacatcctaaatccctccaaagcgataatttaaatgtaagcctttacatttaattagtataacacattaacataattaatctacaatattttactgtaaatttatttgtgaaaaattgacattaattcattaatta

SEQ ID NO: 2054 - DNA, 112 bp, Staphylococcus aureus
tgaatggtggtcttttttgtgtgtacgtaagtgttcgtttactgcgttgatttctgcagtaagtacagcgatttgtacttctggtgaaccagtatcagtttcgtgtacacgg

SEQ ID NO: 2055 - DNA, 371 bp, Staphylococcus aureus
ttttacattttctgcctcattaatttcttcaaaaccaccaatttcatttaataaatatgttaattcattacgtgctaatggctcatcatctatgattaatgctttcatatttattcctcctcttgtctttcataaggaagtacacaccaaaaagtggtaccgctcgatgtcgattcaaattgtaatgctgcggattttccaaataatccttttaggcgtaagtttaaattttctaaagcactaccagttccagactctgattctacagatgtttctcccaacaaatgcattttatctttagaaataccctgaccattatcttgtacaataatacgtacatgtgttgcagtttctttaatcactgacacgtc

SEQ ID NO: 2056 - DNA, 310 bp, Staphylococcus aureus
ccaccttcaaatcctggtcttacaccaccgcctgaacgagctttttgacctttgtgtccgcgaccacttgttttaccgttacctgtcgcaacaccacgtccaacacgattgcgttctttacgtgaaccttctgccggttttaactcatgtaatttcatttcggcacctccttgattatttttcttctactgttactaagtgcttaactttgttgatttgcccacgaatagcagggttatcttcaacaactactgaactgttagtctttttaagacctaaagcttcaacagttttacgttgtgtttcagga

SEQ ID NO: 2057 - DNA, 371 bp, Staphylococcus aureus
gtgcatcgattttaacaataacgtcaccaactacagctactgtaccttcttctaccataacttcttctacagtaccagatgctggtgatgggatttctactactgatttatcgttttgtacctcagctaaaacatcgtcttcttcaatagtatctccagctttaacaaaccattttacaatttcaccttcgtggataccttccccgatatcgggtaatctaaattcaaatgccacgtttttgccctcctaagatttcgtaaattaaacatttcattttaatcaatgagactaaaatacgctaacttcgttaacttttaaaatgtattaaaattctaaagtttcttttgctttttcgatgatgtcatttttg

SEQ ID NO: 2058 - DNA, 158 bp, Staphylococcus aureus
tacctccatctcaccaaaacgttgtccaccgaattgcgctttaccgccaagtggttgttgtgtaacaagtgaatatggtcctgttgaacgcgcatgtaatttatcatcaaccatgtgcgcaagtttcaacatgtacattacacctactgaaatacggt

SEQ ID NO: 2059 - DNA, 310 bp, Staphylococcus aureus; identical to SEQ ID NO: 2056

SEQ ID NO: 2060 - DNA, 189 bp, Staphylococcus aureus
tactaccttgtaatcgatgtgctaatttactagactcatccattaactgttgataagttaattcatcagttgtgtgtctaacagcaatgctttgtggatttgcatccgcaaacgcttgcagcttgttaataatatctgtcatattaagtctccctcattagaactcattataaatgaagttattgtgtg

SEQ ID NO: 2061 - DNA, 299 bp, Staphylococcus aureus
gaatagtataattagtacaatatatacaaccataccaacattacttgaaggatttgcagcattcgcaatgttttgtgcccattctttatctggatagaacaacgttaatgttctaggcagtaagaagaacgccattgcaaagattacaggaataacaccggctgagttcacttttaaaggtagataagttgcctgtgaacctaatctttgagcagtttgtttcttagcatattgaatcggaattttacgaacggcttcaagtacataaatagcacctacagttaatagtatcagtgaca

SEQ ID NO: 2062 - DNA, 423 bp, Staphylococcus aureus
catctgttgaataaatccaatcgtaaaatttattgcctgaagggaacattaacgcagcaggcatttggataaataaatcccaaaaataatcactgcgacccgcttctaatactaagacttctttatctttatcttcactcagacgattacctagtacagaacctgcactgcctcctccaatgatgacataatcatatgatttgtttttgttactcatcgttatgacctccaaagtttgttgtatttcaaagtgagtattgcatgaaatatttgttagtggctgattggttatcgttgaattgctaaacttagctaaccaaaacactcgcttttccttttacgattgttactaacagtaatgaaataatctatgattcattttgcgtttagtccaaattatcaatcaacatttcgccacttata

SEQ ID NO: 2063 - DNA, 260 bp, Staphylococcus aureus
tgggcgtttaataccatctgctactggtacttctacgacatttttaccatcgaagcgatccgtctcaacatgaacatcagcagcaacaatgatacctgttgcattttcaatatcttgttcagttaaatggtttttaatgccgcttgaaccattcgtttctactttaattttaatacccattttatccgcttgctttttcaatgcatcacgtgccatatatgtgtgtgcaatacctgttggacaagcagttactgctaaca

SEQ ID NO: 2064 - DNA, 87 bp, Staphylococcus aureus
tatgcagataaaactttacggcctttacgacgacggcgcgctaaaactttacggccattttttgtgctcatgcgttttctgaaacca

SEQ ID NO: 2065 - DNA, 267 bp, Staphylococcus aureus; identical to SEQ ID NO: 1910

SEQ ID NO: 2066 - DNA, 261 bp, Staphylococcus aureus
agcttcccaatcacggataataccaacacgaagtccgattggattaattttttgacccacagtattccctccttaaaagttaattaagcttctttagcttcttctttaccgtcacttacgacgattgtaatgtggcttgtacgtttgttaatcgcacttgcacgaccttgcgcacgtggacggaaacgttttaatgttggtccttcgttagcatatgcttctttaactactaattcatctgtgttcatgtcatagttatgt

SEQ ID NO: 2067 - DNA, 185 bp, Staphylococcus aureus
caacagttgctttctctgtagttaaattcacttgggcattaacgtcatcaagtttattcagtttcttttcgatacgatttgaacatgcggcacaagtcataccagtgatatctaatgttgtttttttcgtattagccacattattgcctccctgtgattcattgttacacgtctaatgtaccccc

SEQ ID NO: 2068 - DNA, 511 bp, Staphylococcus aureus
taaagaagatacctgatgttcttgatacacctggtttcgttttgatgatttgtaaagctggacgcacagtgtcgcctgttgaatgtgctgcaccactaactaaaccatctgctttaccagcataaacaagcattgtaccgaagtagttcacattgtttaataattcttgtgcttgttcttcagtcgctttacctttacgtcgttcaacaaatgattgaactaattcagctttcaattcacttgtcgcaggattaattaattcaatattagaaatatcaagatcaagtttttgcgctaaagattgaaccttagtctcatcacctaacacgattggtgtaacataatctgttgcttgtaattgtgttgcagctgttagaacacgttcgtcctctccttcaggtaatacgattttaacgtttttaccagaaagtttgtcttttaatacatttaataaatcagccataatgtcctcctgtaatataaatcttattaatcattcacggtataatta

SEQ ID NO: 2069 - DNA, 132 bp, Staphylococcus aureus
cttagtttcttaaacgcttgttgtaagattgttaattcatcctttgttaacacatcaaacgcttttgttaatgtctcagcatgcttagggaaaatatctgccatttgactttgacctttttcagttaaacaa

SEQ ID NO: 2070 - DNA, 467 bp, Staphylococcus aureus
cttcaccttcgttatcacgaattgatttaataaattcatttgtgaatttttcacttgatgtgtaaatcactttggcatctggattattatctaaaacatgatgaccaatggcatgcattaaatgggtttttcctaaaccaacacctccatagataaataatggattgtacgctttggctggtgcttcggccacagctaaactcgctgcatgtggaaagcggttaccgggtccgattacaaaagtgtcaaatgtgttatgggcattgaattgctctctaccaagcacatgattatcctcagttgtttcagtagaaggttttgttgtttcttttggagtagcagtttcattattactataatttgctaattcttcagtagtaataaagtgaggtttaacttcatagcctacaacatcaaataagattgcttggataatttcagcatattgttgatttaaccaatttgca

SEQ ID NO: 2071 - DNA, 278 bp, Staphylococcus aureus
gagcagcatcttcaccttgttcaatgtatacttgaacagcaccagaccatgtagcacggccacaaagtaccccgttgaatttagcaccagcttcgtgagcaaattttaaagtttcttggaataattccgcagaaacaccagcacttaagtaaatgtatggtaaatgagttgctgcatcttgatctttaaagtgttgtgccgcttcctcttttgtataaaccacttcaccttcagcaaagccttctacatatttcatgtttactggtacttcaactttc

SEQ ID NO: 2072 - DNA, 339 bp, Staphylococcus aureus
taaaatgttatgtactgcctttttaaaaatacgtaccatcgttttcacttctttatttgacatacttaacactggcacaaacgtaatgacattttctaaatttctaatcattagcccgttttctttacaattacgtacaatacgttcaactttttcaatttctaacggcgttttactatctttatctgtaactaattcaactccaaacattaagcctcgtcctcttacatcaccaacatttcgatgacgcttcagcgcatgtaactgtttctcaagtgttgatgatgtcgtttcaatatgtgacaataacttacgtttttcataaagtcttatattttc

SEQ ID NO: 2073 - DNA, 336 bp, Staphylococcus aureus
tgtttacgtccgtcgtatactgcaaaagtatgtccgatgaaattagggaaaattgtagaacgacgtgaccatgttttgattacttgtttcttttcgcttccttcttgagcttcaacttttttcattaaatgctcatcgacgaaaggtccttttttaatactacgagccatttgggcgcctcccttcttattatgtgcgtgcagctttaagccgcacacccaaataagttgattatattattttttcttacgtccacgaacgataagtttgtctgatgattttttaccacgacgagttttcttaccaagcgtaggtttaccccatggtgacattgga

SEQ ID NO: 2074 - DNA, 218 bp, Staphylococcus aureus
gtatcatttacaactgcatcaatccaagcttttgcttcttcttcagcttcatccacttcattaccttcataaaagtcgacgcctttgttttccaattcaacgtgtttggtataaagtgtacccatgtcttcaccatgaatacgtagaccatctttcatatcagcacctgctttagttcctgataatgaacattttgcctcatccacttctaaagaatt

SEQ ID NO: 2075 - DNA, 1077 bp, Staphylococcus aureus
atatcttccaaagcgatcacctaaaacatcttcaagtgataaatcttgaattatttcactcactagatttcctcctcatcaaattgatcattttcaagcacttgtacttcagaattatctaaaatactttggtcctcttgcataccaaactcaacatgcttttcaatccattcacgtctaggttgtactttgtcacccattaatgttgttacacgtttagatgaacgcacttcatcttcaacttgtacacgaattaaagttcgtgtttctgggttcatcgtcgtttcccataattgttcagggttcatttcacccaaacctttgtaacgttgtaacgtgaagcctttaccaagttctttttgcaatttattaagctcttcgtctgtccaagcgtattcaactcgctttgttttgcctttacctttttccaatttataaagtggaggtaaagcaataaatacacgacctgcttgaacaagcggtttcatatatttgaagaagaatgttaacaatagcacttgaatatgcgcaccatcagtatcagcatcagtcataataattacacgattataattactatcttcaattttaaagtcagtaccaacgcctgccccgattgtgtggataattgtattaatttcttcatttttaaaaatatcttctagacgtgctttctctgtattaattaccttaccacgtaatggtaatatcgcttggaatttgcggtctcgtccaagttttgctgaacctcccgcagaatcaccttcgactaaatacaattcatttttttcagtgtttttactttgtgcaggtgttaatttaccagatagcaaagtgtctttacgcttgtttttcttacctgaacgagcatcttcacgagctttacgtgcagcttcccttgcttgttgtgctttaatcgcttttttcacaagtgatttagacaattgtcctttttcttctaaatagaatggcaatttgtctgcaacaactgaatcaacagcacttctagcttcagaagtacccaatttagatttcgtttgtccttcaaattgcaataattcttctggaatacgaaca

SEQ ID NO: 2076 - DNA, 217 bp, Staphylococcus aureus
caattttaaatgcttctccgattgaatttgtacctgttgcacatgctgtaactgttgcaccatttggtccttttgcacctaagtcaattgatacttgcccagttgccatatcaggaattaacattggtacgaaaaatggactcacacgtcttgggcctttatccattaattgtttatgtgcaatttcaaatgtttccataccaccgataccagaacc

SEQ ID NO: 2077 - DNA, 336 bp, Staphylococcus aureus; identical to SEQ ID NO: 2073

SEQ ID NO: 2078 - DNA, 218 bp, Staphylococcus aureus; identical to SEQ ID NO: 2074

SEQ ID NO: 2079 - DNA, 275 bp, Staphylococcus aureus; identical to SEQ ID NO: 1865

SEQ ID NO: 2080 - DNA, 336 bp, Staphylococcus aureus; identical to SEQ ID NO: 2073

SEQ ID NO: 2081 - DNA, 1076 bp, Staphylococcus aureus
atatcttccaaagcgatcacctaaaacatcttcaagtgataaatcttgaattatttcactcactagatttcctcctcatcaaattgatcattttcaagcacttgtacttcagaattatctaaaatactttggtcctcttgcataccaaactcaacatgcttttcaatccattcacgtctaggttgtactttgtcacccattaatgttgttacacgtttagatgaacgcacttcatcttcaacttgtacacgaattaaagttcgtgtttctgggttcatcgtcgtttcccataattgttcagggttcatttcacccaaacctttgtaacgttgtaacgtgaagcctttaccaagttctttttgcaatttattaagctcttcgtctgtccaagcgtattcaactcgctttgttttgcctttaccttttccaatttataaagtggaggtaaagcaataaatacacgacctgcttgaacaagcggtttcatatatttgaagaagaatgttaacaatagcacttgaatatgcgcaccatcagtatcagcatcagtcataataattacacgattataattactatcttcaattttaaagtcagtaccaacgcctgccccgattgtgtggataattgtattaatttcttcatttttaaaaatatcttctagacgtgctttctctgtattaattaccttaccacgtaatggtaatatcgcttggaatttgcggtctcgtccaagttttgctgaacctcccgcagaatcaccttcgactaaatacaattcatttttttcagtgtttttactttgtgcaggtgttaatttaccagatagcaaagtgtctttacgcttgtttttcttacctgaacgagcatcttcacgagctttacgtgcagcttcccttgcttgttgtgctttaatcgcttttttcacaagtgatttagacaattgtcctttttcttctaaatagaatggcaatttgtctgcaacaactgaatcaacagcacttctagcttcagaagtacccaatttagatttcgtttgtccttcaaattgcaataattcttctggaatacgaaca

SEQ ID NO: 2082 - DNA, 117 bp, Staphylococcus aureus
cattgtttgaatcgaacttgttaaacttaatgaagctgttggcgaactacctgccgctaatgatacaatcatcgtttctccaattgctcttgaaatcgcgagaacgattgaagctac

SEQ ID NO: 2083 - DNA, 316 bp, Staphylococcus aureus
tatgaataaatcaatcattaatctagtcattcagattatatttataattcatcattattatctctgttatctgcttcatcgtttaaatcatgtaatcaaatttaatattcgtaaaattattctacaacgatacccatactacgtgcagtaccttcgataatacgcatagctgcttcttcgtcagcagcgtttaagtcttgcattttgctgttagcaatttcgcgtacttgatctttagttactgtagcaactttagttttgtttggttcgcctgaacctttttcaataccagctgcttttttaagtaatactggag

SEQ ID NO: 2084 - DNA, 898 bp, Staphylococcus aureus
cactgcctttaattcgttcaacttcaatctctaagccatcatcaagaataagtactaatttaccaccgtattggttacctagacgtggttctagtcttggctctttagactttttagttggaaatccaaataatatcgaatggatgaatgcttgaatcgtcgatttacccgcttcattttcaccaaaaatttcagtgaagtttttattaaattcaattttacgttgaacaaattgaccgtaaccataaatttcaagtgatttaattatcattttgttcacctctcatttcagcttttaatatttcttcagcacgattaactaatgctgtatggtcgaatgttccataatcgtctaggaacttagatgcccttggatttaaatataaatctgacatcgctttatcaaaaacagtttgatcgactaataattccgctgaaaattcattaactaaaggtgactcatcattttgtgcatattgtatttttaactcatcaatatatacaaattgattttcgttttcttcataatctgtaatcatttcttcaacttgtaataaatcttgaggtgaaattaatgtctcactattaataacaagcgttaaacgataaaaggcttttccttcttctctcacttgttctttaaagttttgaatgacctcgtataaaccttgcttagatgtcttatccgtttcaatagttgcttcttcaaatctaatatactgtgtaggataaaatttagtctttaattttaagtggtcaccctcgattaataagcaacctttttcaccttgctcattaaaatgtctaccttgaatattacctgaatagttaattacaggcatatcacttaattgttgacgttcatgtatatgacctaaagcccaataatgatacaatt

SEQ ID NO: 2085 - DNA, 335 bp, Staphylococcus aureus
gcataaatctcatttctttatattaatcttggcaagactcacatacaccataaacttcaagtttgtgtttgtgaatattaacaccaggtagtgataattttatctgatctattggacaataatctattacctttgtatctccacacttttcacagataaaatgatgatgatgatggtttgtacaagcgattctaaacttcatttcaccatcaagttctgtattttcaataattcctaaatctttaaataagtgcaggtttctatatattgtgtcgaatgaaattccaggataattttcatccataacttgttgtatatactttgcgtttatatac

SEQ ID NO: 2086 - DNA, 393 bp, Staphylococcus aureus
ttgcaattgacttttaccttcaagtttagcactacgaccttctacattgatattagcattcatacgtttgaactctgcaacatgcataaaacggttttcaaaaacagtttcggttacgactttatgaccatttgccgttaataacaatgccatcatttgtgattgcatatcagtcgggaatccaggatgtggtagagttttgatgtctacaggttgtaattccccttcagcacgtacacgaataccatcttcttgatagtccaattcaacgcccatttcttctagtttatagactaaactcgccatatgttctttgattgcaccacgtacaaaaatatcaccacgcgttatagcaccagcgattagtaatgtgcctgcttcaattctatctgg

SEQ ID NO: 2087 - DNA, 205 bp, Staphylococcus aureus
aatacttctgaaattctcgcgtagtttctacgtttacgatgtcttccatattggacaacttgacctgccaaacagattcacccctcaaaaattatgtgatccgcttttagctaaataccataagcatattaataaaaagacaaaaagaaaacggcaacactaatgatgacaccattttcgattctatatttattcttaattaact

SEQ ID NO: 2088 - DNA, 204 bp, Staphylococcus aureus
tgtaattgtgctatcgcctcttcgactgtcacacctttaagttgtgttgccgcattggttaaatgtccaccgccaccaagtgcttccattgttaactggacatttactgaaccgagtgaacgcgcagatataccaatcagattatcttcacgtctcgcaacaacatatgatgcttcaataccttctaaacttaacagttcatct

SEQ ID NO: 2089 - DNA, 484 bp, Staphylococcus aureus; identical to SEQ ID NO: 1870

SEQ ID NO: 2090 - DNA, 136 bp, Staphylococcus aureus
atgaattgcaatgttgatacggtttgcagcacgttcaatctctacgtgagaaactgatgcttcttttaattcattatcaataaatttacggatttttaaatcttcgtgtaaaagtgaagcgaagtctttttcagca

SEQ ID NO: 2091 - DNA, 280 bp, Staphylococcus aureus
ccgtccacacatagctacccagctatgccgttggcacgacaactggtacaccagaggtatgtccatcccggtcctctcgtactaaggacagctcctctcaaatttcctacgcccacgacggatagggaccgaactgtctcacgacgttctgaacccagctcgcgtaccgctttaatgggcgaacagcccaacccttgggaccgactacagccccaggatgcgatgagccgacatcgaggtgccaaacctccccgtcgatgtgaactcttgggggagataa

SEQ ID NO: 2092 - DNA, 903 bp, Staphylococcus aureus
caattggcacctgacaactaccatccatttctgctaaaaacgttcgttcagcagtcacacattttgcaacctcatcattatgtactttgcttaataatgttaatagttcttcatcgtcactacgacattctatccctaaagcaccttgtccgattgcaggtaacaatgtatctctatcaagataagatgttacaatatcatctgaccagcccattcttcttaaaccagctgcagctaaaataatcgcatcataatcttcagtttgtaacttttctaatcgtgtatctatattacctctaatccatttaatctctaaattaggatacttagataatatttgtgcaccacgacgtaatgaactagtaccaataatactgccttctggcaattgggatagtggtgtatgtgttttagaaatatacgcatcaaaaggtaattctctatcagggatacaacctaatgttaaaccttccggaattacacttggtacgtctttaagcgagtgtattgccatatcgatatttttttcaaaaagttcatgttgtatttctttaacaaataagcctttgcctccgactttagacaattgtttatctactatacgatcgcctttcgtgacaatttctttaatttcaatttctagatttggctcgacagcttttaatttatcaataaattgctggctttgtgttaaagctaatttacttcttctggagccaacgactaatttacgcatgttcaattcctcctaggaacggattgctctagattattttctcaattcacaaaatgtgttgcaaaaaataaattaatcatatttaagcaaaataaaataatgttatagtatattaaatatcttgaattcaaccatttgttgattctaagtaaaatataacttccata

SEQ ID NO: 2093 - DNA, 536 bp, Staphylococcus aureus
tatttacagcattgttaataccaacacctgttccacaaatacaaacacctaagtctgcattaccgctaacaacttgttcgccaacttttttaccaaaaattggataatgtgttcttgtgaaatcgtatgttcctacgtcaatgacttcatgtccttttgattttaaaaattcagatacacgcatttttgtatctgtaacaatatggtcgcatcctaatgcaatcttcatagtaatttttcctccttagcacattttattaagcatatctacgcggatttggtgtctaccaccatcgtatttaccttcaacaaaacctttaacgacatttttcgctaatgtgtctccaacaatttcagatcccatagtgatcattcttgaattgttatggcctctagtcatatatccagagcgttcatctgatacttcagcagcaatcatgcctttgatttttgtagcaaccataaagctacctgcaccaaatgcatcgataacaatacctaagttaccttcttgactttgaacatcttttgctaca

SEQ ID NO: 2094 - DNA, 160 bp, Staphylococcus aureus
catatttgctaaaaatttatctattctcatcgtaaaaacctaactctacgtcttaatttttcaggaatttcacctaagaattcgtccgcaagacgcgttttaattgtgattgtaccgtaaattagaatacctactgtaacacctaaaataataatgatta

SEQ ID NO: 2095 - DNA, 533 bp, Staphylococcus aureus
gctttagtcatactatattctccactcacattatatgcaacaactggaacattcgtatgatttttaacatctcgaactatatctaaataacttagagcaggtttaacaatcatcatgtcgcacccttctttaagatcactttctaattcacgaagtgcttccaaacggttagcagggtccatctgatacgtttttctatccccaaatgatggcgctgaatctgctgcatctctaaaaggtccaaagaaacttgatgcatacttgacaccataactcattataggaatattgtaatagccggcttcatctaatccacgacgaatttcagcaacaaaaccatccatcatattacttggcgcaataatatcagcaccagcttccacttgagaaattgctgttttaacaagtagtggcaatgatttatcattgtcaacgtcatgtgtatggtcatcaatcacgccacaatgaccatgatcagtatattcacataaacaagtgtctgcaacaattaataagtcatcatacattttttt

SEQ ID NO: 2096 - DNA, 303 bp, Staphylococcus aureus
gctaaagattgacgtaatcctttattactcgccacgccaccagcaacaattaatcgctgaacaccatattctttacaagcttgaatagctttaaacgtgagcacctctacaacactgttttgaaagctcgttgctacgttagcttcaatgattggaatatttttttgtcgttgattgtgaagttgattgattacggcacttttcaacccactaaaactaaaatcataactatctttatccaaccaaacacgagggaatgaataagtatcttcaccttcagcagccaaccgatcaacttgtgga

SEQ ID NO: 2097 - DNA, 201 bp, Staphylococcus aureus
tctgttttacctacaattggttcaacttcatctttccatcttttagtatcacgtttaataccttctaaagatgttttttcaaaattaatgtgaccatatgaatgactcgcaaatgaccatccatcccgtttcattgcgcgaacaacttcctcagctgcctttttattctttgtataatctttactcgttaattcattcgtg

SEQ ID NO: 2098 - DNA, 282 bp, Staphylococcus aureus
tcctcaaattttactgccactttcatcatttcaagttgtttcttcatttcttttacgataggtagtcgctcttgatttttaactcttgaaaatgcaaatgactctaacatcagtcgcaaatcatacatttctttcttttcttgttccccaaacggcaacacatgtgcacccattctttctaattggatgagttgattttgttgcaataatttaaatgcatctcgaattggcgaacgactcacattaaattgctttgccatttgattttcagtgagtaacgta

SEQ ID NO: 2099 - DNA, 407 bp, Staphylococcus aureus; identical to SEQ ID NO: 1785

SEQ ID NO: 2100 - DNA, 150 bp, Staphylococcus aureus
agtgttactttcgcaccgattggcataccttcacgtaaacggaaagtcgcgattgattttttagctttagttactaatggtttttgaccagtgatcaattctaattcttcaacagcattgtctaatactttagaattttgtactgcgtca

SEQ ID NO: 2101 - DNA, 126 bp, Staphylococcus aureus
ggtgtgtttgatcctaatgatttacttaagatatcagtgatacctgctaattcaagtacggcacgaacaggaccaccagcgataactcctgtaccaggtgcagccggtttcataaatacgcttcct

SEQ ID NO: 2102 - DNA, 834 bp, Staphylococcus aureus
catttttctgatgcattaaatcttcagaatcactaaacattgcgccaaatgctacacccttgtctaagtttctcgcataagtaccgccacctatagtataaggttcagtcatatcatttgtttgatttctatatgcagtaactaacttttgtacaaaaggatcatttttatcaacataatgtggtggttggactttacctaatttcacttcaaagccatattgttgaatctcatttgcaaaacgatccatagctttttcaaattcaaatccttctgggtagcgtaagttgataccgaaaagacctgcgttttcattatcatatgtaataacaccaatgttagttgtcacgtcacccatgacatctgtatggaatttcattcccatcttttcaccaaaatctgaattaaataagtagcgattactaaatgctacaaacgcttgtgcattattatcaagatttaatgatgctaagaattttagtaagtaaagacccgcattcacaccgatagatggatccataccatgaaccgctttaccttcaactgttaaaactagaatgccactatcaacagtactatcaccttgtaaatgattttgttctaaaaagtactcaaagtcttgaataacatctgtcatattttctttaacaagcactcttgcttctgcatgatcaggtaccatgttgtaacgttcaccagatttaaaagttattaattcataatcaggttcatcttgatcttcagtaagtttattttgaactaaatcaaatgttgtaatgcctttttcaccatgaatacatggaaattctgcatctggtgcaaaacctaatgttg

SEQ ID NO: 2103 - DNA, 322 bp, Staphylococcus aureus
cactcatcgaaccagatgtactcgcacttgttgagtctgatgttgaatcactaacactatcagataatgacgttgaatcactcatacttgttgatgtacttgtcgaaagcgacatactttgtgaatcactagtacttgtacgcatcgaagtactagttgaagctgatgtactacgagagtcacttgttgatgttgatgtacttgctgatcctgatgcacttgtacttcttgatgtgctttgtgaatcgcttaatgatgttgatgttgaatcggattcacttgtactttctgatgttgagccagactctgatgtacttaccga

SEQ ID NO: 2104 - DNA, 150 bp, Staphylococcus aureus
catcaaaggcactgcttgacgttgcatgttcgcacccatcaatgcacggtttgagtcatcattttctaagaatggaatacatgctgtcgctgctgaaacaacttgcttcggcgatacatccatataatccattttttctttagccataac

SEQ ID NO: 2105 - DNA, 213 bp, Staphylococcus aureus
tcaacttggccagttttaattttaggattaactgtttcagggtcacgcttcgtaactgtaccttgaacttctacaacatattcagaacgtactgtttcagcaattttcaatgcctcttctgaaaatgcaggattaaacacgacttgtacaattccttctctatctcttaaatcaacgaaaatcaatccaccaaggtcacgacgattgttaacc

SEQ ID NO: 2106 - DNA, 152 bp, Staphylococcus aureus
taaccaggttctgcttttttagttaaatcaatcattgctgctaatgaaccaggttccgtatcagtcatataacccgcattaccttccatattcacttccatcatggcattacatggacataccgtcgcacattgaccacaagatacacatga

SEQ ID NO: 2107 - DNA, 321 bp, Staphylococcus aureus
gattttcttatgtctgctaacatctgcaatgatcaaatccggttttaatttacttatcacttccatattcggttgcggtctagatccaaccgattcatatgccccaatcttatctcttactgactttgttatatttttagtgctgccatcatctgcaataccaacaggtttcatatctaatgctgctaaataatcagcaaaactatattctaatacaacaacacgtttaggatttttcttaattttttcagttcctaattcatcttttattgtcgtcatttcagttttctcttcagtatctttttgaccacaacccgctac

SEQ ID NO: 2108 - DNA, 200 bp, Staphylococcus aureus
tattgtgttactttgcaaataacgtgccgtgcgatgaatgctattatcgatgtcagacataatttgcgccatatgttgttgcactgccgtttgattatctgcactttgagccatatgttgcaaaatacgcgcaattgcttctttataagttgttatttttttactttttccatcgataagccatacctctggatgataca

SEQ ID NO: 2109 - DNA, 329 bp, Staphylococcus aureus
ttcactcggaagatagttaatcgctacatctgcaccttctttagcatacgcaattgctgctgcacgccctattgctgagtcaccacctgtgactaatattttatagccttgtaagcgttgatgaccttggtaagacgtttcgccacaatcgggtgctggcgtcatttcagattgtaaacccggtacctcttgttcttgtttttcataatccgttgttttaaattttgttctaggatcttgagctgccatttttttacatctccttattcgcttaatggttattatttacccaatcttcctaggaacttaatcatgattacactaaaaat

SEQ ID NO: 2110 - DNA, 736 bp, Staphylococcus aureus
aatgctttgattttcttatcatcttgatgtccttctttaacagcaattaagtttgcataaggattatctttcgcactttctacagcaatagaatcttttttaggatttagtttttgttcgattgcaaagttcgaattaatgataacagcatcagcgtcttcattttgataaattttaggtaagaattctgctgattgtttattattaaacttaatatcttttttattctctgtaatatcactaaacttagcatcttcaatttttacgccttttttgattttaattaaacctgcatcaacgaagaattttaagaaacgtccttgttcagctggattattagacacatagactgttgcaccttttggtaattcttttaaacttttatactttttagagtatacagccataggttctaagtgaacatcaccggcacttacgattttgtaacctttatcctttttctctgtgtttaaatatggtgtatgttggaaatagtttgcgtcaatttcacctttgtctagtaatttattaggtgtagtgtaatcgttaattgttttaatatctagttcataaccttttttctctaataatggttttgctttttctaaaatttcagcatgtggtgctggtgaagcacctactgttattttcttgtcgtcactgccacttttgtttccattaccgcaagctgctaatacaactgcaaatgttaatactaaaataagaccaaataatt

SEQ ID NO: 2111 - DNA, 373 bp, Staphylococcus aureus
atagtcatacgtggttggatgtagtcttttgataaaccttctttaaatcctttatgtttaaaaccaagcgctttcaaattttgcaaagcatctgtacctttatcaacttcaacatcaggatcgattttaattgcatacgctttctcagctttagcaatttcttttgcactgtctaacaatgcatttaacgcttctttattactataatcaacaacaaaaccacgcgaaatataacatagcgtataaggtaatttaggtacttttttaaaaagtaactgcgcaacaccctgaacttcaccgtcacgacctacagcgattcttcgcgcgtaccatccagttaatttctttgtttctgcccatttcgttaattgta

SEQ ID NO: 2112 - DNA, 774 bp, Staphylococcus aureus
cacttgttgatgttgatgtacttgctgatcctgatgcacttgtacttcttgatgtgctttgtgaatcgcttaatgatgttgatgttgaatcggattcacttgtactttctgatgttgagccagactctgatgtacttaccgatgtagataaacttgcaatggtcgacatgcggtttgaagttgatgtacttagcgaatcacttaatgatgctgatgtgctttgtgaatcggattcactgctttgcattgacgcagatgttgaatcacttaaagatgttgacgacaaatcggattcacttgcgcttgctgagttactgagcgatgttgacgtacttgctgatcctgagttacttgtacttgttgagtcactgagtgatgttgacgcactttctgatgttgactcacttgcacttgttgagatactttgtgaatcagattcactctctgaaccacttaatgacgctgatgtgcttaccgaacctgattgactcgtacttttagatatacttgttgaatcgcttagtgacgttgatgtcgatgtggattcactttggcttgttgactgacttgtatatgatgatgtgctttgtgaatcggattcgctcgtgcttgtacttgttgagtttgaggcactttggcttgctgagtttgagtctactccgctttgattcattgaggcacttagtgacaatgatgtactcgttgagtcagacaaacttgtactcgttgacgtacttgtacttcctgatgttgattgagacatacttatgctca

SEQ ID NO: 2113 - DNA, 166 bp, Staphylococcus aureus
cctgtcgcaacaccacgtccaacacgattgcgttctttacgtgaaccttctgccggttttaactcatgtaatttcatttcggcacctccttgattatttttcttctactgttactaagtgcttaactttgttgatttgcccacgaatagcagggttatcttcaaca

SEQ ID NO: 2114 - DNA, 224 bp, Staphylococcus aureus
catgaactttcataactttcaggaaccactaactctgtgtcaaatatatctgacatcatttgacgccatacttcacttttcgcaaaaccacctgttgcttttatcatcttaggtgtttcattcattacttcaataagcgcaagatagacggtatacaaattgtaaagaacaccttctaatgcagcgcgaatcatatgttcttttttatgagataaagttaaacc

SEQ ID NO: 2115 - DNA, 166 bp, Staphylococcus aureus
catttcacccaaacctttgtaacgttgtaacgtgaagcctttaccaagttctttttgcaatttattaagctcttcgtctgtccaagcgtattcaactcgctttgttttgcctttacctttttccaatttataaagtggaggtaaagcaataaatacacgacctgct

SEQ ID NO: 2116 - DNA, 465 bp, Staphylococcus aureus
attttttcactatcattgtgatggtgtggtattgggtcacctagtttaacaccacttaattccgccatatgattagccactttattgactgtaccaggtccaaccacaacttgaatgcgttcatcgtgtataacacccatgacaccatcaatatgccttagttcttggtcatctactttattctcatctaatactttaatacgcacacgtgtcatacagttcatgacactatctatattatccataccacctactgcagcaataattcgttctgcaagttgttgttctttggtcatttaaatccctcctaaggttgtctatctctgattgctcgtttaacaatgtcaccattgtttaataaccgtcttgttgcttcttccttagaaatgccacacatacccataactgtcgcaactttcacatcatgctcagatacctgatataacgccattgcttcatcatatg

SEQ ID NO: 2117 - DNA, 403 bp, Staphylococcus aureus
tacattgatattaaaatgacatctctcactgcattcgtttaaccttttataaattttcaaaattaacaactaatcgttcgtccatgttcgcgattcaacgctaatgcatgatagtaatcatccatcaaatcatatcaaccaaattccattatcaatcgctattgattgtcattcaactttctaatagtgatatgcttctcaggcttaaaaatcgtcatatcttttctattaattaaatcatctgtgagctttaatgctactaattcattgctgccataatacttaatatataacgttcttgtagttaaatttattacggtctgatacatcgtatagtgattgtcagcatcatgcggacgtacaattccaatcggtatatttaccgcatctaataaataaaatg

SEQ ID NO: 2118 - DNA, 203 bp, Staphylococcus aureus
tattcttgttaactcttctgcattgtcgaaaatttcagtcgctgtgccttctttatagacagtccctttattcataacgataacatgatctgcttccatcgcctcagataaatcatgcgtaatagaaatgattgtaatattatgttctgatttaacttttctcactaaatccaataaattttgacgtgcatcaggatctaaca

SEQ ID NO: 2119 - DNA, 353 bp, Staphylococcus aureus; identical to SEQ ID NO: 1868

SEQ ID NO: 2120 - DNA, 191 bp, Staphylococcus aureus
gtagcgttctgatcattattgataacatttgtttgcgttgcttgtaattgatcaatttcatctttagccgcttgtttcttcacaacttttggtgttaccgcattaatcgctgcttctgcatttgctttagcttcatcaacttgtgcgttagtagttgctgctgaaatggcttgatttgctttaccattttc

SEQ ID NO: 2121 - DNA, 245 bp, Staphylococcus aureus
taagtttgttgagttcacgctttaaatctttatttagttgatggggtactctgagctagacaatatttgtatgtggcaaacattatcgttgcactcatttgctttatataaaagtagttagtgtatttatataaattcttatactaattcgataattactgattcagcaccgtcaccgcgacgagggccttgtttaaggatacgagtgtaaccaccttgacgttctgtgtaacgctctgcgattt

SEQ ID NO: 2122 - DNA, 384 bp, Staphylococcus aureus
gattcttctccagtaatatatagtacttttttcttttgagataacgatgcacaaatttgtaaaagtaacgttgacttaccaatacctggatccccaccaataagtactaacgatccgctcacaatacctccacctaatacacggttgaattctgctgaatctgttaacactctcggcgttgtttcatgtttaatactatttaatttttgtactttacctgctaattccttggttttaactccatgtttaggattggctgctttttcaacaatttcctccatttgattccaagcgccacaattaggacatttccccatccatttaggagattgataaccacaagccatacattcaaaaatcacttttttcttggccaaaattgca

SEQ ID NO: 2123 - DNA, 620 bp, Staphylococcus aureus
tctttattatccaacattttcacttcctcattcatcttctaaagcttgccttacatccgcttcggtataaccaaatgcatttaactttttcaataactgcttaccattggaatggccgattcgcaattttctacttaaaatttctctacggcgccttgcatctttcccaacaattaaccccaactctattagcacagatttatcaattgattcataagcttcatcaaagggtgaactaacatgcattaacgcttctttaatatcaattaagtcggcatgttcaacaccaattttcccttttttatttttagctttttctctatcaatatacgcatgtttaacacctttgacatgttcagtaattgtacttctaattttatctcctgggaaatctggatctgttaatacaataacgcctcgactttgttgagcatttctaattacttctaaagtttgttcgttgatggcactaccattcgtttcaatcgtatcacattcaacagctcgtttaacacgctcagtatcatctcgtccttctacaactataaactcattgattttcatttaaaacgccttcctacaattcttaatttcaaagctctaaccatctctatcgcacg

SEQ ID NO: 2124 - DNA, 936 bp, Staphylococcus aureus
ctttttttaaaatttaaggctgctacgtttagttcaaatgattatgaatgacatttcatggtatcatccagcctcagtacttggagataacattttggcggtgagacagaaatcatatttttacaaaatttatttcgtcgtcccaccccaataaagaaaaagtatttctttattgttgtgtaacttctccacgttgtatttcactatccaaattttgtttcatattttcaaacaactcttgaaatctaacctcatcttgatcagaataacctttaaaaataactgaatctatattttcctcgttaaaataataaatttcatcttctacaacaccaatcggatatttacatgcagaatagtcaaacatatacttttgattttcaatttctacaattggtcctctattaataatcattaacttttgcgaaccttcttttaaataaataatgcttcctattgtttccatttattttcctcctttgtcaccgtctcaatttcaacattccttcgcatttccaagtcaatcatctcttcttccactttacgaatgccatgttgaatttgctgttgctgctcgtataacgcttccgttgaacgtcgtttcgcaaaatgaaattcatcgcggaactgttccatacgactagccatattgctactataataacgctcacctaaatgttgatataattgatctatcgaatgattaagcgcatcactttcatctatcaatgctttaacctctcgcttttcatcatataagtcatccatttgctcatgtttcgctgtgattattttattgatttcatccagtttattcgacatcatttcaccacgttttaatttttaccaatttcattaccaatcattacgtcagtttggtcaaaagcctcaccaactttttgtatattatcgctcgcagttcgtattgcttcagca

SEQ ID NO: 2125 - DNA, 936 bp, Staphylococcus aureus; identical to SEQ ID NO: 2124

SEQ ID NO: 2126 - DNA, 266 bp, Staphylococcus aureus; identical to SEQ ID NO: 1674

SEQ ID NO: 2127 - DNA, 653 bp, Staphylococcus aureus; identical to SEQ ID NO: 2016

SEQ ID NO: 2128 - DNA, 162 bp, Staphylococcus aureus
acttcaacagattgtaatacttcatagtattaatttctctcgtatatttatctttaaacagttgatgtgcgcgctcacccatctcgtgcaattccttactcgagtgagtgttgatgaagttataaatggcatgtgcatcgccattatcaatttggatacccg

SEQ ID NO: 2129 - DNA, 467 bp, Staphylococcus aureus
agtcaactaatgaatactcacctttatgtgttgacttaccagcatcttcttccatgtgaagacgagtaataccgattcgttttgtttcaccgtcgacttcgatatcgatatatccattttcaccaattggttgatcaaattgagaaatttgatatgcttttggattatctggatagaaatagttcttacggtcaaacttagattctgttgcgatttccatatttagtgccattgcagcacgcattgcccagtctactgcacgcttattaacaactggtaagacacctggatatgctaagtcgataacatttgtatttgagttaggttctgctccaaaatgcgctggtgatggagaaaacatttttgagtccgtttttaactctacgtgaacttcaagtcctataactgtttcaaaatgcatgatttccactccttataatttttcataaacgtcatgtaaattgtat

SEQ ID NO: 2130 - DNA, 365 bp, Staphylococcus aureus
tgcacgtgccgccataatacctttttcaaccactgtacgtgcgacttgtggattttcatataaaaatcgttcaaagtgctctgagaataatttatctacaacttgacgcacttcagaattacctaattttgtcttcgtttgaccttcgaattgaggatcaccatgtttgatagatataattgctgtcataccttcacgtgtatcttcaccagaaagtctatctttttcttctttcataatcttgctacttaaaccataactatttaagacacgcgttaatgcacgtttgaatccgtcttcatgcgtaccaccttcatacgtatgaatgttatttgcgtaagttaaaagatttgtggcatatcctg

SEQ ID NO: 2131 - DNA, 152 bp, Staphylococcus aureus
tccaggttttacattacttacttttacagctttataagttgtcacacctgcgcatgtaatagaagacgctgctgctggatctaatttttcaggtactttcacagcatagtctgcagtaacaataacttgttcagccattgcaccatctactg

SEQ ID NO: 2132 - DNA, 186 bp, Staphylococcus aureus
ctcacgtttcttaacggcaccacctgtattatttgctgcatctaaaatttcgttagctaaacgatcttccatcgttttttcaccacgaagacgtgcatagttaactaaccaacgtaaacctaaagtagtacgacgctctggacgaacttctactggtacttgatagttagaaccacctacgcgacg

SEQ ID NO: 2133 - DNA, 185 bp, Staphylococcus aureus
ggttgaataaacgtgcgaagaaaccttttttctcttcttgaggttttggttctgacatttctgactgtgaagctgtgctgtcattttctgctttcgcttccaatgaatcgttcgaagtagcttgtttagaagcttctgcatgggcttctgctacttgttgttcagcatcatgttgcgcttctgca

SEQ ID NO: 2134 - DNA, 265 bp, Staphylococcus aureus
tctacaagtattttcacattaggtcccgcatccattgtaaaataacacggataccccgcttctcggcattcgtgaacaagcgccatgacatcataactttcttgcacaagatatgtgaacggcggtgttgatcctagattcgtggcatgcatacgcaaaccattttcttcaattacttcaccaaggcgtttaaaatctttgtcttgaatcgctgcttttgcttcagctaaatcttcatcaatatgatctaaccaatattgataaa

SEQ ID NO: 2135 - DNA, 155 bp, Staphylococcus aureus
ttcttcacaacttttggtgttaccgcattaatcgctgcttctgcatttgctttagcttcatcaacttgtgcgttagtagttgctgctgaaatggcttgatttgctttaccattttcagtatttgcttcagcatcagctgcttgtttttcttcatc

SEQ ID NO: 2136 - DNA, 80 bp, Staphylococcus aureus
caaatcaggtaaaccaggatgtgcacctactgcaacattatgtgctttggcaagttttaccgtttcattcattacatttt

SEQ ID NO: 2137 - DNA, 360 bp, Staphylococcus aureus
cgctcgcgttcttgatggtgttgcaatatctttattatccaacattttcacttcctcattcatcttctaaagcttgccttacatccgcttcggtataaccaaatgcatttaactttttcaataactgcttaccattggaatggccgattcgcaattttctacttaaaatttctctacggcgccttgcatctttcccaacaattaaccccaactctattagcacagatttatcaattgattcataagcttcatcaaagggtgaactaacatgcattaacgcttctttaatatcaattaagtcggcatgttcaacaccaattttcccttttttatttttagctttttctctatcaatatacg

SEQ ID NO: 2138 - DNA, 255 bp, Staphylococcus aureus
atacaagtgattttacaacttgttggcatcgtggacatagatgcgtcaattcatcaacagcaccaagatcctctgaatagttccaacatctttcacatttttcaccatctgcatgttcgatgacaatatcaccatgttcataagctgttgcctgatcgtctaacttatctacaactttaacttgtgacacgataaataattgatgtaatgcatcaaatgaagttaagaattcagatgcattaaatttatcgttac

SEQ ID NO: 2139 - DNA, 353 bp, Staphylococcus aureus
ccttgatttgaaaagtattcaactaattgaacgataacttctgtatctgtttctgaaatgaatgatacaccttgtaagtattcaccttttaactcttcatagttttcaataacaccgttatgaactagagtaaaacggccatttgatgattgatgtggatgagagttttcatgattcggtacaccgtgtgttgcccaacgtgtgtgaccgattccaacaggtccatcaaaatcgctactatcagcaactttacgtaattctgcaatacgacctttttctttaaatacagttgtattatcatcatttactactgcgatacctgcagagtcataacctctgtattctaatttttc

SEQ ID NO: 2140 - DNA, 224 bp, Staphylococcus aureus
tcttgtttgcgaataagtgagatgtgaaagctcttgaacgttttaattgacctgaagcagttcttttaacacgtttagctgctccgcggtgagttttcatttttggcataatataagtcctcctgtaatagctttaattatttttcagctgttggcgctaacatgataaacatttgacgcccgtccattttaggtttttgttcaactgttgctatatctttgca

SEQ ID NO: 2141 - DNA, 198 bp, Staphylococcus aureus
acgtcctgcgcttaatgcgtagttgcctcctgatccaatagcgataaggtcatcatctggagcaataacttcgccagttccactgacaactaaaatagcatctttatccattacaattagcatagcttctaattgacgtaattgtttatcgcctcgccattcttgtgccaattcaacagcagctctttctaagttacc

SEQ ID NO: 2142 - DNA, 222 bp, Staphylococcus aureus
tgtgacattattttctgctttggcagtttgttgtacttcctcaaccaatgttgttccaatacctgttacagatgttaaaattgttaatgctgctaaactcttgatgactacgtttttgttcattttaagttcctctcttttaattattttgatatctagatacataattcagtatatttagttaattatgtaaccgttttcttaatcactctttaaaaaatc

SEQ ID NO: 2143 - DNA, 104 bp, Staphylococcus aureus
cccatactacgtgcagtaccttcgataatacgcatagctgcttcttcgtcagcagcgtttaagtcttgcattttgctgttagcaatttcgcgtacttgatcttt

SEQ ID NO: 2144 - DNA, 662 bp, Staphylococcus aureus
tgcatactttcaacatgaatacgctgaacaccttcacttactgcatatcttagttcctcgtctgtcttaccagggccaccaaaaataatatgatttgctggtttaaaagcaagaccttttgctatttcaccttgagatgcaacttcgaatccttcaacatactgactaattgtatctaggatttttcgttcactatttgctttcattgcatagtacatttgacaattactcggcaatgacgatgtaatatgttgcaaatgatgttccagtccgactaaatcatagatataatgacaaactggatgagattgtgcttttaattgttcaataacaggttgaactatacgcattagccttcatcccctttctgtttagacgtcgctagagatgcacttaaatggcgatatatttttccgcgatcatcacctaaaataaatgtttgtacaccttgtgcctgccattttgcaatatcttcatcttcacgtggtaatgcacaaaaatgtttaccatgtgcattcacaacttcaaaaatatgttgaacatgtgatgttacttgatcatcacgcgtttgccatggtatgccaagtgactgcgataaatctgcggcaccttcgactatcatgtctaaaccttcgacttgtgctatatcgtcaatggccata

SEQ ID NO: 2145 - DNA, 812 bp, Staphylococcus aureus
aaaggaaattcttcatttttgtcattttgaaaaacaagttgttctttatctatttgaccttttagctttacttgcaagtaaattttaccagtcatatctgaaatcaattgcgccttttcgtcaactagttgttgttcctcagttacatttttattttcttgattaaaaattagtaactctaacgctttattctcttttatcttttcatcaaaaattgatgtagttaattctgttttatcttttgcttcaggttgattaaatttggctgatggatattttatctcatcagccaacacgctaccaatcattgttgtatatgtaagtatacctaagctaataatagctataatagattttgtagcaatttgtttaacatttctcattattccacattgcctttagatttttttctaacaaacaatgtgattgcgattaataatgctaaggatgcaactggtattgcatatatatatgcaggtgtaccagcatttgtttgtggattttctactttgtctttattcgaactattagattcactttgaccagtagtcgttccatcagatcctttgtcactacctgaagcagaatttttatcatctttacctggtgcattagcacctgctacatcagttggtccattaaatttatatgtaatgttgtaatgatggtcatatttgaatggctttccatttactttttcatcgatataaacgtcaatttttccatctattttaccgttcaacttacttacttcaaattcagaagtgcgttcatctttggcagtgtttttactaataatattttctttatgt

SEQ ID NO: 2146 - DNA, 102 bp, Staphylococcus aureus
tagtttactgggattgggttcccctcaaacatatgatcaacagccacaacaccttcttttgatccaacatgtgccaattgtaattttcctatacaatcacca

SEQ ID NO: 2147 - DNA, 325 bp, Staphylococcus aureus
taaaatatcttgcaatttatcgttatactttttcgtttcttcagaacgtttatcattcgataaatctccgttatttttaatctcatttaatttattaatcaacgctaactttgtaatatcgttatcatctaaataagtggcaatattaatcgcttcatcaagatgtccttgtcctaattccatccaatataataagtagtctttgtttgaatttggtgtcacattattaagtaaattttctttcttatctttttctaaaccttgtttatttgtttggatataacttttggcataaatgtaaagtgcctctttatctaatttttta

SEQ ID NO: 2148 - DNA, 215 bp, Staphylococcus aureus
ccgcgaagtgttactttcgcaccgattggcataccttcacgtaaacggaaagtcgcgattgattttttagctttagttactaatggtttttgaccagtgatcaattctaattcttcaacagcattgtctaatactttagaattttgtactgcgtcacctacacccatgttcacaacgattttatctatttttggtacttccattactgaactata

SEQ ID NO: 2149 - DNA, 197 bp, Staphylococcus aureus
taatcttcatccatttcatgcgcttcatcattaccttgcgctttttcaacaagttgcgcttcaaaacgacctttttgatcaataggatcatttaattcagtaaatgcatttgcatgctctctacctacaatgaacaattcgaaacgatcagtaaatctaggatcttcaggatttttcttcgctaaaggtgaaatttc

SEQ ID NO: 2150 - DNA, 280 bp, Staphylococcus aureus
tgcttctttgtcagtaatatgtgaagatgtttcttcatggtcatcatgcattaaactgtcatcatattttcctaatctaggaataatgagcttagttgtaactagcaatatcgtaggaagtaatacaacgacactcgctgcgataaagtaccagttcatagcaacgtttgttttaatagaatctgaaacgatacgtgttgccggttctgtaaatgaatagaccaaagcatcttgcataccaacaactatatttgctgcaaatcctccaacagcggaagca

SEQ ID NO: 2151 - DNA, 75 bp, Staphylococcus aureus
tatggtaacgcacacctggtaagtcttttacacgtccaccacgtacaagtacaacactgtgttcttgtaagttat

SEQ ID NO: 2152 - DNA, 309 bp, Staphylococcus aureus
aacgccacctggtgttgcatttttaacagtacatacgataacatcgccgatgtttgctgttttacgaccagatccacctaatactttgattgtaagaacttcacgagcaccagagttgtctgctactttcaagcgtgtttcttgttggatcattagttaaacctcccttatctctaaacttgtattaaataattactgactcttcaacaatctctactaaacgaaaacgttttgttgctgataaaggacgagtttcttgaattttaacaatgtctcctaatttagctgaattgttttcatcatgagttt

SEQ ID NO: 2153 - DNA, 267 bp, Staphylococcus aureus
tcactttcacgtacatatacaaacccacgagattgaatttcaggtcccgcagctatacgtctatttttaggatctaacgttacaacagcaataaagataccatcttctgctaaaagatgacggtctctcaacacgatatttcctacatccccaataccaatgccatctattaaaatatttcctgaatttaccttttcatttaatatcatatctttaccgttgtaattaatgacatctcctttttccacaaggaaaatcttttctggt

SEQ ID NO: 2154 - DNA, 180 bp, Staphylococcus aureus
tgcatcaatattggcatgatttccagacaataaaacatctggaactgttagacccttaaattcacgcggacgtgtatattgcggaaactctaataacccatctgaaaatgaatcgtcttgatgtgactgttcattacctaaaacacctggaatcagtctaacaatagcatcagtcatggt

SEQ ID NO: 2155 - DNA, 135 bp, Staphylococcus aureus
aaatggacctgatttaatacgaacttgctcgccaacttcgagttcaacatcgatagtcttttctttaagacccatttgttttaagatgaagcgaacttcttctggtaacaatggatttggcttagaccctgcacc

SEQ ID NO: 2156 - DNA, 147 bp, Staphylococcus aureus; identical to SEQ ID NO: 1791

SEQ ID NO: 2157 - DNA, 552 bp, Staphylococcus aureus
tcacgataggtgattcattgttaaatgggtaggttgcaactaagcttgaaggaatcaatggtgtgacttcttgtggaatcatttggtatatattttttctaaataatgtacctaattgttcacttcgttcagtttgatagtctgcttcgtcttgctcattataaaaatgaataccagcaacttcatcaataattgttgatgcataggacttaaatatgacatctttctccaaaatatcatttaaaatacgtgtcattagtggaccattgtgcgtcgtttgttctgataatgtacgaatctcacctgtaatatgaacgtttgtcgacaatttgatgtgtggcgacatagctgggtatttaggaactaatgttctgaaagataaaccagcataataatccaacgtatgttttgcttcaatgattaattctttatctacttctgcttgataatcagaatgtaatacgtcatctaattgccatggatgaacaatcataatgtgataatcattaaagttaaactttggcgtaaattcattttctaattgtttaatta

SEQ ID NO: 2158 - DNA, 151 bp, Staphylococcus aureus
caactatacatttcgaaaaattcttctagtgaacctgcgccaccaggagccatgacaaatgcatctgcaagttctgccattttatttttacgttcatgcatagaatcaactaaaattaattcagttaaacgttggcttgtgatttcatgtt

SEQ ID NO: 2159 - DNA, 201 bp, Staphylococcus aureus
gatactaatggcgttaacaattcatgtacatgaggaatgacataagtgtcgccttctttttcaagaccctccatagaaataatacatggatgtgcaccacgtgctactacctctttaacgttaccacgaattgataaattaactttctcttgtgttgctaaacctacaactggtgtaccttcttcgattaaggcaattgta

SEQ ID NO: 2160 - DNA, 231 bp, Staphylococcus aureus
ccaatgccatctattaaaatatttcctgaatttaccttttcatttaatatcatatctttaccgttgtaattaatgacatctcctttttccacaaggaaaatcttttctggtgcaacacctgcttcagctgctagcttcgcatgtgctatctgcattttaaattcaccttgtacaggaataaagtattcaggtttcataatattaatcatcatttttaattcttccatgcaa

SEQ ID NO: 2161 - DNA, 140 bp, Staphylococcus aureus
tacattaacagcagctagcttttgttgaccattctcagatgtagtaaaaccagcaacctcatgcccctcttcttttagtctttgaactaatttaatgccaataaggcccgttgcaccagttacaaaaattttactcatta

SEQ ID NO: 2162 - DNA, 165 bp, Staphylococcus aureus
tgatgttgaatcactaacactatcagataatgacgttgaatcactcatacttgttgatgtacttgtcgaaagcgacatactttgtgaatcactagtacttgtacgcatcgaagtactagttgaagctgatgtactacgagagtcacttgttgatgttgatgtact

SEQ ID NO: 2163 - DNA, 302 bp, Staphylococcus aureus
caagatgatcccggatccccttgtctaccagaacgaccacgtaattgcctgtctacacggctattttccatatgttcatgaataataacagctaatccacctaatgcttcgacaccttcaccaagtttaatatctgtgcctcgacctgccatactagtcgcaacagtcatggaaccaatttgccctgcttcagctatcatctgcgcttcttttgcaacattttgcgcaatgagtaaattattaggaatatccatttggaataatactttcgaaaagtattcagccgcttcagcagttctcgt

SEQ ID NO: 2164 - DNA, 385 bp, Staphylococcus aureus
tttacctattattttttcttgttagctaccgttttaactggtcctttacgagtacgcgcgttgtttttcgttttttgaccacgaactggtaaaccacgacggtgacggataccacggtatgatgaaatttccattaaacgtttgatatttaagttagtttcacgacgtaagtcaccttcgactttataaccgtctacaacttcacggatgcgacctaattcgtcatcagttaaatctttcacacgagtatcagctgatacgttagcttcttcaagaattttttgagcagttgacgtaccgataccgtatatataagttaatgagataactacgcgtttttcacgtggaatatctactcctgcaatacgtgccatattaatttaca

SEQ ID NO: 2165 - DNA, 532 bp, Staphylococcus aureus
tgcgcttcatcgttgtttgtatcaacgcttcttatatgaaaatgaccaccattgtcgtcataattgatatctggtctctcagatgtcaatcctataatcgcattaacactaccaaacaatacagctgaagctccagcacaaacgatatcatgaccatattcaccatggtcagcatggccatccataataacgtctgttactttgccttcatcattaactgtaatatcaacagtaatcataataattacgcgttgattttatcgattgttaatttagtgtatggttgacgatggccttttttacgttttgaatttttacgacgtttgtatgtgaatacagtgatttttttaccgcgaccttgtttattaacagtagcagtaactgttgcaccttcaactgttggcgctccaactttaactgaatctccacctacaaataatactttatcaaatgtaaaagtatctccttcgtttacgtctaatttttcaacgaagatttcttgaccttcttctactttgatttgttttccacc

SEQ ID NO: 2166 - DNA, 162 bp, Staphylococcus aureus
taaaatcattcgcagcagtcacttcaataccttgctctttcgcttgttttaaaattgaacaaatacgcgcatgtgcatattgagcatagtaaactggattgtcttgagattgctctttcgctaattccatatcaaaatcaaagtgactatcaggactacgca

SEQ ID NO: 2167 - DNA, 265 bp, Staphylococcus aureus; identical to SEQ ID NO: 2134

SEQ ID NO: 2168 - DNA, 259 bp, Staphylococcus aureus
tcagcgcatcaccaatgccgtgtaatataacgtttgcttgtttaattttgtctaaagtgtttatgactgatggctctaacaacaatgtattatatgttgtttcactgacattatcaggtacatacatcgtcgtataataaccgccagcttgttgtgccatactggctgcaattgtgtttgcctgaaagacaacattttcgcctagtccacctctggctggtacgaagaatacattatatggtaataaatgaattgcttc

SEQ ID NO: 2169 - DNA, 320 bp, Staphylococcus aureus
tgtcaggtatatatgggaaaatcagcgttctagaattatttttaggatctttagaaacagtagtgacacgtttaccttctacaattaaatctttccagtaactgtcatcctttgttttcatcactacatatttttgaccatttaaagttgctgtatagaatggatgttcaacaaagccgtccataactgactcactattttcttcactttcaaaaacaacaaaatgcgcttcttgtaaatctgttaattgatcatttgtaggtgtaacattttcaaattccgtcactgctgatttaacttgatcagctaactctactcta

SEQ ID NO: 2170 - DNA, 572 bp, Staphylococcus aureus
catcacataagaaagctaatgttacacgatctgcaccaagtgatggctcgatacaatatggaatatatttttcgttcgtttctggatcatggtatctgaaatcttcaccagagtgttcagcatgtttacgtaagtcgaagtctgtacgacttgcgataccccataactcaccccaaccaaatgggaatttatattcaatatcagttgttgcatttgagtaatgagataattcatcttcatcatgatcacgtaaacgcatattttcactgctcatatttaagcttgttaaccagtcacttgcaaaagttttccaataattttgccattcgatttcttctccaggtttacagaagaattcaagttccatttgttcaaattctcttgttctgaaaatgaagttacctggagtgatttcattacggaatgatttaccaatttgaccgataccaaatggtaattttttacgcattgaacgttgcacgtttttatagtttacaaaaataccttgtgctgtttcaggacgtaagaaaatttcatttgtagaatcttcagttacaccttggaatgtttta

SEQ ID NO: 2171 - DNA, 174 bp, Staphylococcus aureus
tgccagctgaaagcaactcttttttgaacttttcattgcagtctgcttttttaagcgtttcacgctcttctttcgtacgatattggtcgtcatcatctgatgaatgagctgtcatacgacttgttactgcttcaatcaaagttgaaccttgaccagaaatagctcgatctcttg

SEQ ID NO: 2172 - DNA, 252 bp, Staphylococcus aureus
agctaagtcctgaacgtgtgcaaatcctgctttacctttaccacgcttagtcattaatcgtccagctatagcgacatgactatccgcttctttttctaccaattcttctttagaatactggtcccactcttctttcaaatcactagataaacctgaacggtcaaatttagaaccaaacgggtctataccaagatcatataattcttgtaatttttgacgtcgaaccaacatttggtcattcatttcttctga

SEQ ID NO: 2173 - DNA, 298 bp, Staphylococcus aureus
aacaacagcgtctaaacgacttgctaataagatcatgaagttttcaccgtgtacaccgaattttttaccagcgatgtcaaatgtgttacggaattgtctttcagtcattccatataagtaacgtaatttttgtttttcacgtaattgtaaaccatattctgataattttttacgttggtttggaccatgttgtcctggtgcgtaaggacgtttttctaattctttaccagtaccgcttaaagagatacctaaacgacgagattttttccagtttgaacctctgaatcgagccataata

SEQ ID NO: 2174 - DNA, 118 bp, Staphylococcus aureus
tgaaattaatttgtctaagaattcatacattctttcaccgcgaagtgttactttcgcaccgattggcataccttcacgtaaacggaaagtcgcgattgattttttagctttagttact

SEQ ID NO: 2175 - DNA, 126 bp, Staphylococcus aureus; identical to SEQ ID NO: 1983

SEQ ID NO: 2176 - DNA, 136 bp, Staphylococcus aureus
tgcttcttcgtcagcagcgtttaagtcttgcattttgctgttagcaatttcgcgtacttgatctttagttactgtagcaactttagttttgtttggttcgcctgaacctttttcaataccagctgcttttttaagt

SEQ ID NO: 2177 - DNA, 364 bp, Staphylococcus aureus
taaaatcgtagtacctaccgtagtaaagaacattgcgattttcggcgtcgcatgaagtgcatttaacgtattaccaattccggcaataattgctgcagccggtaaaatggcaactggtaacattaacgaacgccctaaattttggaaaaatttatacattgaatgtcatccttcttaaaataatgtagaaatataaagattactaatgtaactagaataactacttcgatactccgttatagtcacctaggcttactaaccagctatatttctacctcaagttattttataaactttttacaatttcatgcaattcttgttgtaactttgctgttcgtgtttcaatctcttttgtaatataatc

SEQ ID NO: 2178 - DNA, 444 bp, Staphylococcus aureus
accatcgatatcacaaataccttcgaccttcggaggattaaatacaagatgatacgttgtaccacatgactcacagattcgacgacctgtaagacggttcattaattcttcttccggaacttcgatattgatgacagcatcaatgtttctgtcaagctcagacataatattatttaatgcctcagcttgctcgattgttcttgggaagccatctaataaaaagcctttttttgcatcgtcttcagaaattctttccttaacgatacctacagtcacttcatcaggaactaattcgccacggtccatataagacttagcttctttacctaattcagtttcttcttttatagcttttctgaacatgtcaccagttgaaatgtggggtattgggaatttcttgacaatttcacttgcttgagttcctttacctgcgccaggtaaacc

SEQ ID NO: 2179 - DNA, 508 bp, Staphylococcus aureus
cctccctatattatggagtgacgattatttataacgataagtaattcttccgcgtgttaaatcgtacggagacatctcaacagttactttgtcgccaggtagaatacgaatgtaattcattctgattttaccacttacgtgagctaaaatctcatgaccattttctaattctactttaaacattgcgttcggtaaagtatctaatacagtaccttctaattcaattacatcttgtttagccattgattaacttccccctttttgcaatagtaaggtaatcgtcaatagacaactttattgttacgaatctatcagtgattaattttataagttaaacaaaaattacgggaattaattatcgttaattgccactctcatctatctaatatgattaaatcatgcctcacttaaaatagaccgctaaaagttgatctattacaaatgatctaaaatatcaatgacatctttggtaacgtcgctaatatcttttgaaccatcaatatttttc

SEQ ID NO: 2180 - DNA, 220 bp, Staphylococcus aureus; identical to SEQ ID NO: 1984

SEQ ID NO: 2181 - DNA, 225 bp, Staphylococcus aureus
aaattaacaatttcgtcttgtgttgctaattcaatattatctgtgccgaaataagattttaatttaatgtcattaatttcatgatggccacgcactaaaaccataatatattcgccatcaactttgaaaatcatcgttttaacgatttcatctactggtctacctaagaagtctgccaattcttgcgcagtcttaacatttggtgtttcaattttttctaaaggt

SEQ ID NO: 2182 - DNA, 299 bp, Staphylococcus aureus; identical to SEQ ID NO: 2061

SEQ ID NO: 2183 - DNA, 294 bp, Staphylococcus aureus; identical to SEQ ID NO: 1808

SEQ ID NO: 2184 - DNA, 542 bp, Staphylococcus aureus; identical to SEQ ID NO: 2040

SEQ ID NO: 2185 - DNA, 184 bp, Staphylococcus aureus
cgccgtccatttgagcagcaccagtgatcatgtttttaacgtagtcagcgtgtcctgggcagtcaacgtgagcgtagtgacgtttgtcagtttggtactcaatgtgagaagtattgattgtgataccacgttctttttcttctggagcgttgtcaatcatgtcatatgattgtgcaactgagtc

SEQ ID NO: 2186 - DNA, 238 bp, Staphylococcus aureus
acaaacaatctagctataacggatcccattgaatgtccgattataatgtatggtttatcaacattgcctctcactgtttgcgctacttcaaaggcatcaccgataactcgtttcatatcatcgtaatgccctcttgttgattcatcaatattaataccatgtcctcgatgattatgacgtatcacatcgaagccatgctttgaaagtgcatgtgctaatttatcgtaacgttccatat

SEQ ID NO: 2187 - DNA, 416 bp, Staphylococcus aureus
cgtgcttctgcaattgattgtgtgttcatcaattgatgtcgaagttcgctagcgcctcttatgccacgcacatagattttaaagaatctacgcaagctcttgaattgtcgtatttcatctttttcatatttgttaaacaatgataaatgcaatctcaatagatctaatagttccttgcttgtgtgttcgcgtggttctttttcaaaagcgaatggattgtggaaaatgcctctaccaatcatgacgccatcaatgccatatttttctgccagttcaagtcctgtttttctatcgggaatatcaccgttaattgttaacaatgtatttggtgcaatttcgtcacgtaaatttttaatagcttcgattaattcccaatgtgcatctactttactcatttctttacgtgtacgaagatg

SEQ ID NO: 2188 - DNA, 893 bp, Staphylococcus aureus
tatgaattcacctataaattgctttttcaaaagttcaaatgcttctgcatcttggaaattgccttttttatcacgcaactcatctaataataatttttttaatttatctggttcttcagtagcacttgtcacgattgaaaaactatacgtcggctctagtacaaattgataaccaaatgtatcatcgataagtccttcgtttaataaattctgataaaaatctgtttcttccccaaaaattaactcaaagaataatgacatttctaaatcacgttgtacatatttttgaggcgcttcttgtaatggtttatttttaaaaccaagcattagtcttggtgattgaattttcatagattcagtaacaaatgcttctttaacatcctccggttcatcaacaagtcctcgttcgattttgggttggttaactttattacgagcatcctcgtgttgttttactattcgacatattgcttcaggatccacatcgccaacaacaaataaaaccatatttgatggatgataaaacgtttcataacatagatacaaatcatcttttgtaatatcgtatatactttctacactaccggcaatatcaacacgtattggatgttgttgatacattgcacgcaatgtattaaacattaatttatatccaggttgctcttgatacatttttatttcttctgcaataatacctttttctttatcaacagtttcttttgtaaaataaggcgtttcaaccattgtaagtaaacgtttaatgttgttttcaatattatcagttgcactgaacaagtagcttgtacgatcaaagcttgtaaactgcatttgcttgtgcgttatcttcagcaaacgcagtaaataagtcttcttcttctttttcaaataattta

SEQ ID NO: 2189 - DNA, 189 bp, Staphylococcus aureus
tgatctagattgtgctcattagtcatatcacgaactgtcacaacaacaccacttttacctccctgttcaatcttgtcgatatagcttgtggtcacaacaaagaatcgtgcattcatttctaaatcgcgcatttcagtttgttttgatttaaaagtatcttctatttgtcttaataagaaagctttagca

SEQ ID NO: 2190 - DNA, 278 bp, Staphylococcus aureus
tctaattcacgaatattagattgaatttgatttgctatataatttaaagcttctggtggaatatctaatttttcttcttcaattttcttctgcaaaattgccattcgagtttcataatctggtggcgtaatatcaacaattagcccccattcaaagcgtgaacgtaatcggtcttctaattgtgcaatttcctttggtggtcgatcactcgaaataactatttgcttgttattctgatgcaattcattaaaagtatagaaaaattcttcttgtgtttg

SEQ ID NO: 2191 - DNA, 142 bp, Staphylococcus aureus; identical to SEQ ID NO: 1662

SEQ ID NO: 2192 - DNA, 393 bp, Staphylococcus aureus
taatcattaaagttgtatgctcttgttatcaagatcgctacgataaatcgcttctataagggcatttacattgcgtgcttcttccggtttcaccacaatctcttctatccctaaacacgcattgacaaagttacgcgcctgtctctcaccagcaatgtcttcgttatgctcaacattagctttgctttcaaaaatagttccaaagcggggctcatatatttcaaatggaaataaattgataccgccatcttctcctgataaactaacgtgaaccttatcttctttgatatttgcagaccacgaacattcaaactgcatgcttgctcgattggcaaatgtcatataactagtaacatgatcatcgacatcaaatttagtatgatcaaatgttcc

SEQ ID NO: 2193 - DNA, 121 bp, Staphylococcus aureus
attttgatagttttctaaattttcatggtaatctagatgcgccgaataaatgttagtaattatagcaatgtgtggtttatacttttcgattccaagtaactggaatgacgacaactctgta

SEQ ID NO: 2194 - DNA, 269 bp, Staphylococcus aureus
tttttgacctttgtgtccgcgaccacttgttttaccgttacctgtcgcaacaccacgtccaacacgattgcgttctttacgtgaaccttctgccggttttaactcatgtaatttcatttcggcacctccttgattatttttcttctactgttactaagtgcttaactttgttgatttgcccacgaatagcagggttatcttcaacaactactgaactgttagtctttttaagacctaaagcttcaacagttttacgttgtgtttcagga

SEQ ID NO: 2195 - DNA, 282 bp, Staphylococcus aureus; identical to SEQ ID NO: 2098

SEQ ID NO: 2196 - DNA, 174 bp, Staphylococcus aureus
tcatctttcacaagtctttcactcatgataacggcatcctcatagttgtaaccgtcccaagtcatgaaaccaactactacgtttctacctaatgccatttctcctaattccatagatggtccatctgctaaaatctcgttatactcaacaacatctccaactgcaacgattgga

SEQ ID NO: 2197 - DNA, 444 bp, Staphylococcus aureus
catcacttacaggtaatgccggtctgacatttgctaagcctcgatataattcccacaaatcttcaaatgaagatggcattaccaatacgtcattgtcatttctctctcgatgcatatcattgattaaatattcaagtctcgctttatttgattttaacgtttccatttaagcctccggtaatgctaggaatgcttctttatcgacatcatccaatttgaacaaccaattttcttctggtttttcagagtttaaaattgtcggttcttcttccgcttttgtatttcgctcaataatcgttcctgacaatggcgtttgcacatcaatgaccgttttcgatgcttcgatactcacaatttcatcatccactttaacttcatctggacttacgaattcaacataacctactgtcccaatatcatcttgcaattcaggtgtcatactaa

SEQ ID NO: 2198 - DNA, 146 bp, Staphylococcus aureus
taataatgccatatgacgagaacgtttgatagctgtagtcaacatacgttgatatttagctgaagtaccagttacacgacgtggtaaaattttaccgcgttctgagataaaacgttttaataattcagtgtctttgtagtcgatat

SEQ ID NO: 2199 - DNA, 396 bp, Staphylococcus aureus
tctgtgttgatagcgataaattcaacattattcattccgtggtcaatcattcggtttacggcgttgttaccgccaccacctacaccaatgacctttaaagtcgctaaatgattaaatccttgttcaaattctaacatttaaatttcctcctagttttattggccaataatcattcaaatagagatttcattagttttttgaatttactttcttctttatctttatctttgtcttgaacatgttcatgattctgtttatgttcctgatgattatcttctgattgataaatttcttcatctgttgactctacttcattttcatgagtatcttttttgtttgttttacgtttaaaccaatcaaatccgcctaatttagattcgttatctttgtctttca

SEQ ID NO: 2200 - DNA, 75 bp, Staphylococcus aureus; identical to SEQ ID NO: 1867

SEQ ID NO: 2201 - DNA, 477 bp, Staphylococcus aureus
tgctctaccaagctgagctacttcccgttattcaattaatttaaaaatggcgcgcccgataggagtcgaacccataacctcttgatccgtagtcaaacgctctatccaattgagctacgggcgctaaaatggtgccgaggaccggaatcgaaccggtacggtgatctctcaccgcaggattttaagtcctgtgcgtctgccagttccgccaccccggcaaaataatggagcagaagacgggattcgaacccgcgaccccaaccttggcaaggttgtattctaccgctgaactacttctgcattattttgctaaatataaaaattaaatcgtaatgagccatagaggattcgaacctctgaccctctgattaaaagtcagatgctctaccagctgagctaatggctcaaaagatggtgccggccagaggacttgaacccccaacctactgattacaagtcagttgctctaccaattga

SEQ ID NO: 2202 - DNA, 607 bp, Staphylococcus aureus; identical to SEQ ID NO: 1875

SEQ ID NO: 2203 - DNA, 607 bp, Staphylococcus aureus; identical to SEQ ID NO: 1875

SEQ ID NO: 2204 - DNA, 86 bp, Staphylococcus aureus
taccgtcacttacgacgattgtaatgtggcttgtacgtttgttaatcgcacttgcacgaccttgcgcacgtggacggaaacgtttt

SEQ ID NO: 2205 - DNA, 254 bp, Staphylococcus aureus
tgtttacgtgccatttaaaatttgcctcctttacctattattttttcttgttagctaccgttttaactggtcctttacgagtacgcgcgttgtttttcgttttttgaccacgaactggtaaaccacgacggtgacggataccacggtatgatgaaatttccattaaacgtttgatatttaagttagtttcacgacgtaagtcaccttcgactttataaccgtctacaacttcacggatgcgacctaattcgtca

SEQ ID NO: 2206 - DNA, 256 bp, Staphylococcus aureus
gtggttgcgatacaggtacataatcttgtttttcaacatcgtaaacaagtcgagctttagtttctttatcctttttgtaaaatccttgtttcgttttacgtccgagtgcgccattgtcaaacaacgtatttacaattttgacatcatgaaaataaggtgtttcttcaggtacttgttgcatgcctttaattacagacactgcaatatctaaaccgactaggtcagatagcgcatatgtacctgttttaggacgacc

SEQ ID NO: 2207 - DNA, 134 bp, Staphylococcus aureus; identical to SEQ ID NO: 1873

SEQ ID NO: 2208 - DNA, 264 bp, Staphylococcus aureus
tgttgtggatatgcaggacctacaattgtcccgacatattcaatttcatccattgttaatgttaaatttaattcttcttttacttctcttaacagcgcgtgtacttgtgattccccttcttctattttaccacccgggaaataatacttttcgcgattccttacttgaacaagcaatattttatcagctgtttcttcaactaaacagacacatttaatcatctttgacaccccaactttgtgaaatcaatttttcaaattatac

SEQ ID NO: 2209 - DNA, 196 bp, Staphylococcus aureus; identical to SEQ ID NO: 2052

SEQ ID NO: 2210 - DNA, 319 bp, Staphylococcus aureus
aatcttttcaatttcgatttcgataaagttttccattgtccattgacctctacaatcacaaacacgacggacaaaattatttaataaatcattaccatattctgtatgacgtacttctggatggaattgaacaccataaatgcgacgtttcttatcttcgattgctgcatagtctgtgcttgggctatcagcgataacttcaaagccttctggaatttcaataactttatcagaatgactcatccaaacagtttgttctgctggtaagccagcgaataactcatctgacttcgcattaatgattgctttaccgtattca

SEQ ID NO: 2211 - DNA, 75 bp, Staphylococcus aureus; identical to SEQ ID NO: 1867

SEQ ID NO: 2212 - DNA, 244 bp, Staphylococcus aureus
tctacgtgaacttcaagtcctataactgtttcaaaatgcatgatttccactccttataatttttcataaacgtcatgtaaattgtattgtgtttcatattgataagcgacacgatataacgttttttcatcgaatggtttaccaatgaactgtaaaccgattggtcggccatttgattgtccacaaggaacagaaataccaggtaatccagctaagtttactggtgttgttaataaatcattgg

SEQ ID NO: 2213 - DNA, 393 bp, Staphylococcus aureus
ctaattactggtatacctccaccaccagcagcaataacgagtgtatcatttttaataagtgttttaatactctctaattcaataatagagatgggttgtggtgaaggaacaacgcgtctatatcctcttccagcatcttcaacaaatataaatcctttttctttttgaatttgttcagcttcttctttgttgtaaaataacccaattggttttgaaggattgttaaatgccggatcattttcatcaacttcaacttgtgtcactagtgttaccacttgtttatccattccaatagaatgcaattcattttgtaagctttcttgtaattgatagccgatgtaagcttgactcattgcgccacattcagcaaatggaaatgccggaccttggtta

SEQ ID NO: 2214 - DNA, 229 bp, Staphylococcus aureus
gattggactagctgaaattgcattaacgcgaatattatctggacctaagtctaatgctaaatatttaacatttgcttctaagctcgctttagcaacacccatcacattatagttttgaactgcgaattcgccacctaaatatgttgttgcaacaatgctaccaccttctggcattaattttttagcttcatgagccacaattgttaatgagtaagaactaatgtcttga

SEQ ID NO: 2215 - DNA, 359 bp, Staphylococcus aureus
tgtaattaacagaatcggacttaaaactactaaaccatatattgaactcactacatcgaataatcgcttcataattatctcctcacttcaacagattgtaatacttcatagtattaatttctctcgtatatttatctttaaacagttgatgtgcgcgctcacccatctcgtgcaattccttactcgagtgagtgttgatgaagttataaatggcatgtgcatcgccattatcaatttggatacccgcatcatattgttcaacatgttgaacgatatcagattgcttatccatgatgagtaccaacgctttcttagctgcaagatagccataattcttgctcggcacgcctaaaccgacg

SEQ ID NO: 2216 - DNA, 149 bp, Staphylococcus aureus
ttacgaccttctgtaattgtaatttcaaccaatgttgtgtttttatctttatcttgtttcttaactttcacttcagccggttgcgtcataccatcttctaattcaatacctttttctagcgctttcacttcttctctcattaaataacc

SEQ ID NO: 2217 - DNA, 116 bp, Staphylococcus aureus
aacgataagcttcaacaaagcgctttagctcttcttcatcttgaatgtcatcaaccatgtgtggtgtcggcacaatcattttaagctcacgataagcgtccataaattctttttta

SEQ ID NO: 2218 - DNA, 229 bp, Staphylococcus aureus; identical to SEQ ID NO: 2214

SEQ ID NO: 2219 - DNA, 229 bp, Staphylococcus aureus; identical to SEQ ID NO: 2214

SEQ ID NO: 2220 - DNA, 562 bp, Staphylococcus aureus
cattgttaatggatcatcaatttcttcacctaaattaaacgcagttgtaggcgctgttggaccaactactacatcataattttcgaatactttatcaaagtcatttttaatcaatgttctaactttttgagattttttatagtaagcatcatagtaacctgaacttaatgcaaatgtacctaagaaaatacgacgttttacttctttaccgaaaccttcagatcttgacattttatataattcttctaatgaatgagcttctttagaatgataaccataacgaattccgtcaaaacgagaaaggtttgacgaagcttctgatgatgcaatcacgtaatatgatggaataccaaatttagtatttggcaatgatacttcctcaacgacagcacctaaagattttaaagtttctacagcgttttgaactgcttcttttacgtcatcagctacaccttcacctaagtattctttaggtaatgcaacttttaatcctttaatatctttaccaatttcagatgtaaagtctacatcatcaactggtgcacttgtagagtcattaaca

SEQ ID NO: 2221 - DNA, 562 bp, Staphylococcus aureus; identical to SEQ ID NO: 2220

SEQ ID NO: 2222 - DNA, 256 bp, Staphylococcus aureus
actaataataagtgatgtagctaagtcacgtaacatagctttacgttgatcagaagtacgacctaattttctgtaacccatgagttaacctcctttatcaatcttcttttcttaatcctaatcctaaatcttctaatttgtatttaacttcttctaaagatttacgacctaaattacgcactttcatcatgtcagcttcagatttgtcagctaactcttgaacagaattgattcctgcgcgttttaagcagttata

SEQ ID NO: 2223 - DNA, 175 bp, Staphylococcus aureus
acctattgctttatgcaatagtacagctacaacagatgaatctacgccgccactcatcgcacataatacacgacggtctcctacgcgttgacgaatcttttcaatttcgatttcgataaagttttccattgtccattgacctctacaatcacaaacacgacggacaaaattattt

SEQ ID NO: 2224 - DNA, 142 bp, Staphylococcus aureus
atacttagcgcaaaaccaatacctgtttcacttggaccatctagcaattctaataaaccattataacggccaccaccacaaagcgttgtaatggcaccatcatagttagggttatccatcattaattcaaatgctgtatgtg

SEQ ID NO: 2225 - DNA, 276 bp, Staphylococcus aureus
tgcttcctgtaacagaatcctcattttttgtcacttctcttatttctaatgcctcaatactatcaacattaattgcctgaccgagacgttcaaacgctatcttatttgcagctaatctcgcaccattgtatgcataaacatctctaccatgaaaagtatgactttcttccgaatgaggcaatcggcttttcacttcatcaatttcgataacttttttaataccttcgtaatgtttaatatgacttaaagaaccattatcaggtgtaataatgtaat

SEQ ID NO: 2226 - DNA, 135 bp, Staphylococcus aureus
atactggtttagctgttgcaggacgcttacggtgtttaaatgcttctctatttgcatctgtaaagttatgaatatcaactaatgaacctggtaataacttcgtatcacctgcttcgataattctaactttacgta

SEQ ID NO: 2227 - DNA, 134 bp, Staphylococcus aureus
aaccgtcattacgacgaacacctgacttagtacgtacgattacagctttgacaacgtcaccttttttaacaacgccacctggtgttgcatttttaacagtacatacgataacatcgccgatgtttgctgtttta

SEQ ID NO: 2228 - DNA, 426 bp, Staphylococcus aureus
ctttttctacagccattataaattgctccttatttaagtatttcagctacacgtaatttcgcgcttcgtgctctgttattgtcatctaaatcttcttctgtagcggtaatcggtttacgattaacacgctttaacttaggtgtatatgcttctggtataactggtaatcctcttggtacctctggacctttttcatattcttggaacacctgtttacataaacgatcttctaaagaatggaaagtgattaccgaaatcctgccatctactttcactaattcaatcgcttgttctattgaatcttcaaaagctgacaattcatcgtttactgcaattcgtagtgcttgaaatactcgttttgcaggatgtccgccttttcttcttgcttttgcaggaataccttcttttataatgtcaactaattct

SEQ ID NO: 2229 - DNA, 447 bp, Staphylococcus aureus
tcaataccaacacgactagttcctggaataggcgcttctatacgaatatctttcgctgccaatgccattttaatgtcatcttgtaatgccgtaattcttgaaactttaacacctttttcaactgataattcaaatcttgtaacacttggaccttcagttacatcttgtacttctgcaggtacattaaagtaaaataatgcgtcattcagttctttctttttatctgtaatccagtcctcgtccgactcaataacttgtggttcttctagtaatgaaacacttggcaatttaatatttgggcctttacgaatcatcggcttagatgtttgtacagcttgatttgttgcaacatcttgttggttcgtccgaggtctattttcattagctgtatcttcatttttatttgaaaatgatgactgtaaatctttttgttgatcatcattatct

SEQ ID NO: 2230 - DNA, 135 bp, Staphylococcus aureus; identical to SEQ ID NO: 2226

SEQ ID NO: 2231 - DNA, 490 bp, Staphylococcus aureus
taaagtttctatttcattttcacactcggatatttgtcgttcaagtttgcgttgttcacgtctttgttctttttggttatgatacgacgattgttccatagactttttatgtgcttgtacgttaactgactgttcttcttggtgcgctttcaacgcttccgcttcctcaactttttcaatgtaatattgataatctcctaaatacatctttccgccatcaattgttaaatcaaataccttgtttgctaattggttaataaagtaacgatcatgggaaacaaatagtattgttccttcaaaatgttggagtgcttgctctaacatttcttttgaatctatatcgaggtggttggtaggttcatctaaaataagtacattgtcacgttgcaacataagtagtgctagttgtaaacgtgctttttcaccaccagataaatcattaattatctttttaacatcgtcttgtacaaataagaaacgtccaagaact

SEQ ID NO: 2232 - DNA, 190 bp, Staphylococcus aureus
aggtttgttgccatcttctttgccaggcttgttgccgtcttctttaccaggttttttgttgtcttctttaccaggcttgttgccatcttctttaccaggttttttgttgtcttctttaccaggcttgttgccgtcttctttgccaggcttgttgttgtcttctttaccaggcttgttgttgtcttcttta

SEQ ID NO: 2233 - DNA, 181 bp, Staphylococcus aureus
tgaatagattcatctaaaagaattttacgaatgatttcacctgatgtcgtcattttcccttgaccagcaagatatagtggataatagaaacctgagaagaataagaatgtttctaaaaatacactcgtaactctggccatatattggtcgtatatcgaagcttctttaccccaaagtttgt

SEQ ID NO: 2234 - DNA, 168 bp, Staphylococcus aureus
agctgttttaagtgctgtatcggcaagacctttacgtgcaccgtgagttgagatgaagtattcaagtactgttaaaccttcacggaatgaagatgtgattggtaattcgataatcttaccagatggtgcggccatcaatccacgcatacctgctaactgtgtaaagtt

SEQ ID NO: 2235 - DNA, 288 bp, Staphylococcus aureus
tgtggtatgtctgtaactggcatcaaaccattggtaccgaaatcgaacaagtacatgtgtgcttgatcaggacgatggtgtcttgcaacatcgaaaataatgttgtgtaagaacgttgttctaccatatcctggacttccgattaacgcgatgtgcccagcttttttcaattgcaataccatcggtccttgatattgttcttctggtacgtctttaagtcctaatgttaattccacttcttttgcatcatctgaccataattttctgaaatctgtttctactaaatct

SEQ ID NO: 2236 - DNA, 390 bp, Staphylococcus aureus
ctgggttaggctctgtttgacgttgtttcgtataatttaatacttttgttaagtcatcttcagatgctagcgctttttgttgattattttcgatagttttaacaccatcgtatactgtaaagttataaggtcctaaatatttcactaaatatttatggtcaaatgtacgtgttaataattctggtctgtcagtttcagcaaaagctaagtttaagaagaataatgctactgaagccgccattacgacaggaacaaatttcttactaaatgcttttgtgtctaaccattttgttttaaatattaaaatgaataagtaaactaacgtatcaatgaaataaacaaagtcataccatttgaatgatgcactaaccgcaccacccatagattcta

SEQ ID NO: 2237 - DNA, 344 bp, Staphylococcus aureus
acgaattgttttgtcctgattgttgaccaccgaatccttgaccgtaatcttggaattcattttgttgacgttggccaccattttgttgcgcatttttaggttcaaggaattgaacgctatcacacacaacttcagtaacaaacacacgacgaccttcttgattttcataattacgggattgtaagcgaccatctacaccagctaaactacctttagataaatagttatttacattatctgcttgtcttctaaaaacaacacagttaataaaatctgcttcgcgctccccttgagcattcgtgaacgtacgatttactgcaagagtgaatgtcgctacactcaca

SEQ ID NO: 2238 - DNA, 266 bp, Staphylococcus aureus
tatcttgtactttatcaacagcgtcttcgacattgttcgcttcaatgaccgatttcccttgactattacctagtttagcaaacttagctttcgtttgtccgaatacaaccatcgcgcgaacattttccatataaggaatgagttcgtcaaattcattccctcgatccaaaccaccacataaccaaatgattggttgattaaatgaatttaaggcaaactgtgttgctagcgtgtttgttgctttggaatcattataatatttatta

SEQ ID NO: 2239 - DNA, 543 bp, Staphylococcus aureus
gtacgagtaggagcaaactcacctaatttatgacctaccatatcttcagttacatatacaggtacgtgtttacgtccgtcgtatactgcaaaagtatgtccgatgaaattagggaaaattgtagaacgacgtgaccatgttttgattacttgtttcttttcgcttccttcttgagcttcaacttttttcattaaatgctcatcgacgaaaggtccttttttaatactacgagccatttgggcgcctcccttcttattatgtgcgtgcagctttaagccgcacacccaaataagttgattatattattttttcttacgtccacgaacgataagtttgtctgatgattttttaccacgacgagttttcttaccaagcgtaggtttaccccatggtgacattggagatggtctaccgataggagcacgaccttcaccaccaccgtgtgggtgatcgttagggttcattacagaaccacgaactgttggacggatacctttccatcttgaacgtccggctttaccaacgttaactaattcgtgttgt

SEQ ID NO: 2240 - DNA, 77 bp, Staphylococcus aureus
accatatgcttcaagtgcccatacctccatctcaccaaaacgttgtccaccgaattgcgctttaccgccaagtggtt

SEQ ID NO: 2241 - DNA, 398 bp, Staphylococcus aureus
tacatcagatcactcgcattaccttgcatgacaccaacacctgacgtgacggtttgtgtcgctttattcccacttccgtaaaaatgcggcgcaactgtcgacgcataatattgtaaattaatccattgtgccacaagtgccggaccagaaatgatggtatttaataatgtgccatctttatctttacgccaatcataattgtgtaaaaatgtccgcccttctaaatcaatgccttttgttaattggcgtcgtccaattataaatgatgcatttttagccaatccccattctggacgtacctcactccaatcactcgcaaaccgctgcgcttcttccactggatgattcacacgaccaatcgttggcagtttgtccaaacgttcgcgattcgcgtgttc

SEQ ID NO: 2242 - DNA, 386 bp, Staphylococcus aureus
tctaccatgattcctaattctatatcatccgaaatgtcatgaccttcatttttaaggttttctttttcttctaataatatagctttagcttctctaaattcgttaattgttgcaaccattgggaacatgatatttaacttaccataaactgatgcacgtaataatgcacgtagctgtggtctgaaaatatcttgttgcgcaaggcataaacgaatcgcacggtaacctaagaatggattcatttcttcaggcaagtttaagtatgataattctttatctccacctatatctaaagtacgtacaacaacacgtttaccgcccattgcttctaatacttctttataagcttcaaattgttcttcttctgtaggcatttggtcacgacc

SEQ ID NO: 2243 - DNA, 168 bp, Staphylococcus aureus; identical to SEQ ID NO: 2234

SEQ ID NO: 2244 - DNA, 99 bp, Staphylococcus aureus
tttaaatcattatctaataacagcaccttgttcaattaatgctgcttcaatttccgcttgtacttttgaaacgcgctcatctgtcaatgtttcttctgt

SEQ ID NO: 2245 - DNA, 295 bp, Staphylococcus aureus
tacttcatgattattatctgttgtagacactgctggatcttccgatgtatctttcgatgcatctttcgatttgtgtatttgctgattcaaatggtctaggtcttctaacgccttatttaccattgcttcatcatttttatcatctttttctccatgttttgttgtagccgtttgtgacatatcatttttcattgcattaagatcgtcctcgccactttgttgacccctatcaacatttgaagaaacctcatttaaatctttaagcaattgatctaatttactgtctatatcactt

SEQ ID NO: 2246 - DNA, 225 bp, Staphylococcus aureus
  misc_feature (1)...(225): n = A,T,C or G
aattgttncaatagttccaccttgggcaatagctatatcgattaatactgaaccttttttcattgatttaaccatctcacgagtaaccaattttggcggtttcncacctgaaattaaaattgtagaaataaatacatctgctttcttaatttgttctgctaaattttctggtgttgatttgactactgtgacatctttttctgcatacatatcttcaagatattt

SEQ ID NO: 2247 - DNA, 330 bp, Staphylococcus aureus
taccttttttacctttaccgccaccagtgaactgtttcatcattttcttcatatcgttaaattgtttcatcaaacgattgacttcttgtaatgaacgaccagaccctttagcaatacgctttttacgtgatacattcaatgtgtctggattgtttctttcagccggcgtcattgactggataatcgctttaatatgatcaatttgcttttcactcatattaagcttatctagccctttcattttattcatacctggaatcattttcataatatcatccagtggtcctagatttttcacctgatcaagttgttctaaaaaatcatctaaag

SEQ ID NO: 2248 - DNA, 165 bp, Staphylococcus aureus
gtaatattcataagcacaccttgtgcaccaacgatagatgtttcaagtaatggagaagagattgcttttttagcagcttctaccgctctattttcaccagaagaaacaccaatacccattaatgcagaaccttggttagacataattgtcttaacgtctgcaaag

SEQ ID NO: 2249 - DNA, 435 bp, Staphylococcus aureus
ccattgacacatgcttagcaacttctttaggctgtttagcatttttaaatgtcacaggtccacctaatgaaatataaaaattcagcttattagttacaatatctgcaatttctggagaaccactaaagctatgcataatcccgcctacctcttcagcatgctcctccaataagatatcgatacagtcttgagttgcttcacggttatgaatgataattggtaacttcaaacgcttagctaaagcaatttgctttctaaaaacttccttttgaacatctgcaggagatttatcccagtgataatctaatcccatttcaccaataccaatcacttttggatgctgagctaaagattcaatccattccaagtgttcttctgtaaaatcaattgcgtcaactggatgccaaccgataatgccatataaaaaatcatact

SEQ ID NO: 2250 - DNA, 214 bp, Staphylococcus aureus
atgacaaccgtttcgtattcacccttaacgtttttaacatctttatacaaacgattaatttcaaacttaccttccagatgttgatgcgcctcgttttgtattttgacttcaaattgtttctcttttttatacgcttgatataagcgttttgatttttctgatgttgaggcacgtccaaccatatcaatctcataatctgattttaaatagcaaa

SEQ ID NO: 2251 - DNA, 234 bp, Staphylococcus aureus
ccgcgtaatttggcacgcttaattttaataccaccaggcaatctgccacctactttagcaacaatgacatattgtcctgcatcaacgttcggtgcaccacaaacgatttgtacaggttcgtcttctccgatatcaacttggcaaacatttaatttatcagcatcaggatgtttctcttttgacttaacgaagccgacaactaaatttttgatatcttttgtgtagtcaattaaa

SEQ ID NO: 2252 - DNA, 348 bp, Staphylococcus aureus
cattggctttaacgacagccatcactgttttatttggatgcaatgtactgaatactttgaaatttgatgcaacagcgtttaaatctacattcatatacgcagatctataatatttatccgacatattacttcctcctgtaattcccacacgttttaaaactagatcttaattatcattgtataacaaatttaaaatgctgacttttctaaaacaacttggctcatcgcataatgctcagtgtgtgagatactaacatgtacgataaacccttcgtaatcaatctttggtttgccaagttcgtcgttgtaacagtctatatcgttaaaagctacatgttttcctaagcc

SEQ ID NO: 2253 - DNA, 614 bp, Staphylococcus aureus
agtgcaagcaataatcgttctatacttagcgcaaaaccaatacctgtttcacttggaccatctagcaattctaataaaccattataacggccaccaccacaaagcgttgtaatggcaccatcatagttagggttatccatcattaattcaaatgctgtatgtgtataataatccaatccacgaactaagttaggatcttcaatatatggaatacctaaatcatctaaataagcttttacttgttcataatatgccttagattcctcatttaagaaatcagtgattctaggtgcagtcttaatcgcttctttatcacggtctactttacaatccaaaattcgcatcggatttgtatgcaaacgtgattgacaatctgaacaaaattcatgaattactggttcaaagtgtttcactaacgcttcgttatattcttttcgagacgccatatcccctacactattaataacaagctttaaatgttttaatccaaatgattgataaatatgcataaccatagctaatacttctgcatctacgctaggattttcagcaccaatagcttctacaccaaattgattaaattgacgatagcgtcctttttgcttacgttcata

SEQ ID NO: 2254 - DNA, 238 bp, Staphylococcus aureus
cgtaaacgacttctgctttttcgatgttagcagcataatcactttctttactgtaaacgattgtatcctcaccgatagcacttaatgccataaattcatgtgtatggctaccgcctatagcacctgaatctgcaactactggtcttgcgttaatgccaactctctcaaaaatacggctatacgcttgatacatatcttgatacgtttgatctaatgatgcctcgtcagcatggaatga

SEQ ID NO: 2255 - DNA, 219 bp, Staphylococcus aureus
atcttacgcccgtcttcagcacgaactaaaccgtgtaataatacatcattaaatggacgacgatctgtaaattctaagccttggaatatcatgcgtgctacccagaaaaagataatatcgtaacctgtaactaaggcatttgttgggtagtatcgtttaaagtcttcactttctaaatcaggccaacctaacgtagagaaaggccataaagcacttgag

SEQ ID NO: 2256 - DNA, 411 bp, Staphylococcus aureus
ctcttgaagctaaagtcataatatgaccaagttctgcaaggtttgatttttcaactataattaacgtaaaatagccgtcatctaacttagcgtccggcactaatttttcaaatcctgccattgaatttgttaaacctaaaaagaataataatgcttctccttggaaaacattaccatcatattcaattcttaaatctacagctttcatttgaggtaacatttcgaaacctttgatgtaataagcaaatggaccaacaatagatttcaatttactcggtgtttcataagagacttgcgtcaattgtccgcctgcagctaaattaataaagtatcgattattcattttaccaatatctactttagtagaatgaccttcaatgatgacatcaagtgcccccatgatgtcattag

SEQ ID NO: 2257 - DNA, 239 bp, Staphylococcus aureus
tgattttcaatttctacaattggtcctctattaataatcattaacttttgcgaaccttcttttaaataaataatgcttcctattgtttccatttattttcctcctttgtcaccgtctcaatttcaacattccttcgcatttccaagtcaatcatctcttcttccactttacgaatgccatgttgaatttgctgttgctgctcgtataacgcttccgttgaacgtcgtttcgcaaaatga

SEQ ID NO: 2258 - DNA, 136 bp, Staphylococcus aureus; identical to SEQ ID NO: 1923

SEQ ID NO: 2259 - DNA, 573 bp, Staphylococcus aureus
taaatacaacggtatcttcaggtataattttaatttgcttatgagtaccattagcaattctagataatgctgccattggttcaccttgtgaaccagtacatagtatcaataactcatgcttcggtacggtattaattttattaggttcaataaatgtttcaggtggtgctttaatataaccaagttccatacctattttaatattgttttccatcgaacgaccgaacgtaacaattttacggttatttttgatagcagcttcaactgcttgttgaactcggtaaatattagaagcgaaggtagcaaatataatacgacctttacaattacggaagatcttatctacgttttgaccaacttcacgttcgcttaaagtaaaatcaggcacaagtgaatttgttgagtctgaaagtaaacatagaacgccttcttcgcctaattgagccattttagcaatgtttgctggtttgcctacaggtgtaaaatcaaatttaaagtcaccggtatgaactacttttccttcaggtgtatctacgatgacgccataagtttcaggaatactatgtgtagtta

SEQ ID NO: 2260 - DNA, 179 bp, Staphylococcus aureus
cttttcaacccactaaaactaaaatcataactatctttatccaaccaaacacgagggaatgaataagtatcttcaccttcagcagccaaccgatcaacttgtggaccacctggataatttaaaccaattgttcgtgccactttatcataagcctcacctactgcgtcatctcgtgtttc

SEQ ID NO: 2261 - DNA, 165 bp, Staphylococcus aureus; identical to SEQ ID NO: 2248

SEQ ID NO: 2262 - DNA, 124 bp, Staphylococcus aureus
ataagtgtcgccttctttttcaagaccctccatagaaataatacatggatgtgcaccacgtgctactacctctttaacgttaccacgaattgataaattaactttctcttgtgttgctaaacct

SEQ ID NO: 2263 - DNA, 183 bp, Staphylococcus aureus
tgatttcatctgtttcaggtaacaacaatggtagctcttcttcaggaacagttgtcattgttccatcttcccaatgaatgacaggaattggttcgccccaataacgctgacgactgaataaccaatctcttaatttgtaattaactttcttttcgccagcacctttttgctctaataattgaa

SEQ ID NO: 2264 - DNA, 543 bp, Staphylococcus aureus; identical to SEQ ID NO: 2239

SEQ ID NO: 2265 - DNA, 183 bp, Staphylococcus aureus; identical to SEQ ID NO: 2263

SEQ ID NO: 2266 - DNA, 164 bp, Staphylococcus aureus
tgttaaaagaccgtgaatcttagtaggaccaacataagcaacaggtaatattggtgacttacttaacattgcaattgttgaagcaccacgtttcaaaggtgcaccttcttgcgatgtgcgagaacctgttgggaagataccaactgtcttattatctttcaaca

SEQ ID NO: 2267 - DNA, 203 bp, Staphylococcus aureus
gactgaaatttttacatcaaaaccgacaatagcttcaacaacaggtaatactctgttcatctcttcttctaatgaaaccatttcatgaccgggtctcgttgaaacacctccaacatctataatgtcagcaccttcatctatcatggctttcactctatttatagctgattcaacattattaaattttccaccatctgagaatg

SEQ ID NO: 2268 - DNA, 520 bp, Staphylococcus aureus
tggtggtggttgtataaaatctggattttggtcatagaactctaataaacggtctgtatatttactaatattaaagaaataactttcttctttaactagttcaacttcgtgtccagaatctggacttttgccaccaataattttaccgttttcgtattgtgggtctactaattgtgactctgtatagtatgtttcatccggaacagaataccaaccttcatattcacctaaatagatatcaccttgctttaataaacgttcaaacacttgctcaacgacatgtttatgacgttcttcagttgttctgataaaatcatcatttgaaatttcaagcttagcccacaattgtttaattccagcaatcatctcatccaaatattcaatttctgtcttaccagctttttgagctttttcttgaattttttgaccgtgttcatccgttccagtcaaatagcgaacatcatatccttgcattctcttatatcttgcaataacatctccagccactgtagaatatgca

SEQ ID NO: 2269 - DNA, 135 bp, Staphylococcus aureus; identical to SEQ ID NO: 2012

SEQ ID NO: 2270 - DNA, 217 bp, Staphylococcus aureus
ctttcaactatcctttaatcaatattattcttcaatccattgtgtatggaatacgccttctttatcttttctttcgtacgtatgagcaccgaagtagtcacgttgtgcttgaattaagtttgcaggtaaatcagcagcacggtaactatcatagtaattaatacttgatgagaaaccaggtgttggtacaccattttgaacaccagttgcgacaaca

SEQ ID NO: 2271 - DNA, 149 bp, Staphylococcus aureus
ggaaattcttattgtttttagcatgagaaatatagtaagccatacttccaatcattgtttctctcggaaatactacctcacccttgcctaatattttatgcgcaagattgatacctgcaactaagccgctagctgcgctttctacataa

SEQ ID NO: 2272 - DNA, 85 bp, Staphylococcus aureus
taatgatttactcatcttacgcccgtcttcagcacgaactaaaccgtgtaataatacatcattaaatggacgacgatctgtaaat

SEQ ID NO: 2273 - DNA, 543 bp, Staphylococcus aureus; identical to SEQ ID NO: 2239

SEQ ID NO: 2274 - DNA, 246 bp, Staphylococcus aureus
ctttagagtttatctattatttaccagttttaccttctttacggcgaacgtattcaccttggtaacgaatacctttacctttgtaaggctctggaggtcttactgaacggatgttagatgctaatgctccaacttgttcttttgaaataccttcaactttaacgactgtgtttttctcaactgagaaagtaatgttttcttcagctttaatttctactgggtgagaataaccaacgttaaggatta

SEQ ID NO: 2275 - DNA, 246 bp, Staphylococcus aureus
tgtaacaataccatcataaattatacacgacgacgttttggtggacgacaaccgttatgaggtactggagtaacgtctctgatcgcagttacttctaaacctgcagattgtaatgcacgaatagctgattcacgacctggaccaggtcctttaactgttacttcaactgtttttaaaccatgctccatagctgatttagatgcagtttcagaagccatttgtgctgcaaatggtgttgatttttta

SEQ ID NO: 2276 - DNA, 189 bp, Staphylococcus aureus
tgtattaacttcacgatcccaatcataactgaaccctaattctttaatttgtcgtttaaaagtttggatatttttctttgtaaattcacgtgggtcgttgccagtgtctaaagcatattgctctgctggtaatccgaatgcatcccaccccatcggatgtaatacattatatccttgcattcttttata

SEQ ID NO: 2277 - DNA, 155 bp, Staphylococcus aureus
atacgttaaatttgttcctttgcgtccaaattcaatttggaaagctttcttttgactaagtctcttttcaatttcctctggcttcatattaatgactgtagataatttctttgcagtctcttttttatcaactacatgcctaggttttttagaat

SEQ ID NO: 2278 - DNA, 118 bp, Staphylococcus aureus
ggtttggattaccttgcattttatgttcaatatatgaacgcacaactgcagctgttccctcaggtcttaatgtaatacttctatcgcctttatctttaaatgtatacatttctttttg

SEQ ID NO: 2279 - DNA, 173 bp, Staphylococcus aureus
atgattaatttcgctaccatcgaatcataatatggcggtatcgtataattagtataacatgctgactctattcgaacaccatatccacctggtgcaagatattgctcaattttacctggtgatggcataaagttcttgtaaggattttcagcattaattctaaattcaattgc

SEQ ID NO: 2280 - DNA, 424 bp, Staphylococcus aureus
tatagttcacacgttcaacaggtgaatacaatgaatcaacagggattacaccaattggtaaatcactagtattattttgttctgctaatgcgtaacctctacccttgttagcaactagacgaatttttaagtgaccacctttagatactgttgcaattttaagctctgggtttaaaatttcaacatcactatcatgtgtaatgtcgcttgctgttacttcgccttcatcacgtacatcaatttctaaagttttatcttcttcagagtaaattttcaatgctaattgtttaatgttcataataattgtagaaacatcttcaactacattgtctactgctgagaattcatgtaaaactccctcaatttcaatatacttaacggctgcacctggtaatgaagatagtaggatacgacgtaaggagtt

SEQ ID NO: 2281 - DNA, 968 bp, Staphylococcus aureus
acgtcaatacctttccaaatttcttcatttctaagcagttcaacttgatcaatttcatcattagtcattggaccaaaatgagagaaatcaaaacgtaaacgatctgcttctactagtgaaccagcttggttaacatgatcacccagtactgatttcaacgctgcatgtaataaatgtgttgcactatggttcttttgaatgtcacgtcgatcattttggttcacttcagcagacactgtagcgccaacatttacttggccaaattgtactactcctttatgcaagttttgaccatttggtgctttggttacttcactaacagcaatttcaaaattgtcattataaacaatacctgtatccgcaacttgtccaccactgattgcataaaatggtgtttccgttaacatgaagtatactgtttcacccgcttcaacttgtgaaacttcttcaccattgtatatcaagtgtgttagtgttgtttgagctgtcgcagtatcataaccaacaaaagtacttgcagatgtaatatttttcaatacttcactttgaacttgcattgattgagaattttgacgtgcttgacgtgcacgatcacgttgttgttgcatttctgactcgaatgttgtcatatcaactttcaatcctgcttgcactgctatttcttcagttaattcaattgggaacccatacgtatcatacaatttaaatgcatctttcccattaatttcatttgttgtcgctttagcttttttaattaattcatttaaaatcgctaaaccatcttctaatgtttcatggaatcgttcttcttcagactttataacacgcttaatgaaatctgctttttccttaacatttggataatatggttccataatgtctgcaacaatatcaacaagtttgtacataaatggctcattgattcctaacgtttgactaaaacgaacggcacgacgtaacaatcgacg

SEQ ID NO: 2282 - DNA, 276 bp, Staphylococcus aureus
cccagctgagctaagcccccataataattacagtatatcgggaagacaggattcgaacctgcgaccccttggtcccaaaccaagtgctctaccaagctgagctacttcccgtataattaacgcgcccgataggagtcgaacccataacctcttgatccgtagtcaaacgctctatccaattgagctacgggcgcatatgtttttattgaaaatggtgccgaggaccggaatcgaaccggtacggtgatcactcaccgcaggattttaagtcctgtg

SEQ ID NO: 2283 - DNA, 128 bp, Staphylococcus aureus
cattaatttcatgatggccacgcactaaaaccataatatattcgccatcaactttgaaaatcatcgttttaacgatttcatctactggtctacctaagaagtctgccaattcttgcgcagtcttaaca

SEQ ID NO: 2284 - DNA, 118 bp, Staphylococcus aureus; identical to SEQ ID NO: 2278

SEQ ID NO: 2285 - DNA, 169 bp, Staphylococcus aureus
ttgtgcttgaattaagtttgcaggtaaatcagcagcacggtaactatcatagtaattaatacttgatgagaaaccaggtgttggtacaccattttgaacaccagttgcgacaacatcacgtaacgcatcttgatattcagtaacgatgtttttaaagtaaggatctagc

SEQ ID NO: 2286 - DNA, 96 bp, Staphylococcus aureus
cttcaatttcacgtgcgttaacgccttgttctataacaagcttacggtcaaattggaatgcttctttaataccttctttaagttccgcttcattat

SEQ ID NO: 2287 - DNA, 193 bp, Staphylococcus aureus
cgctttgtcgttcattttaccattttcatccataacgataatattttctaattgatgtctttgaccaatttcaaaatcattagggtcatgtgctggtgtcactttcatagcaccagaaccgaagtctatatcaacatactcatctgctaaaataggcagttcgcgtcctacgattggtaatataacagtttta

SEQ ID NO: 2288 - DNA, 217 bp, Staphylococcus aureus
tgtgttgctaaacctacaactggtgtaccttcttcgattaaggcaattgtaccatgtttaagttctccaccagcaaaaccttctgcttgaatgtaagaaatttctttaagttttaacgcaccttctaaacttacgttatagtcaatagtacgtccgataaagaatgcattgcgtgttgtttctaagaaatctgtagcaatttgttccataattggtg

SEQ ID NO: 2289 - DNA, 276 bp, Staphylococcus aureus; identical to SEQ ID NO: 2282

SEQ ID NO: 2290 - DNA, 263 bp, Staphylococcus aureus
tactttactttttcgttcttttttcgttactgtttcctcatcaatcgagtcgctattttgttctttaggagctgattgaggttgttcgttgtcgactgaaattacattcgattcattttggtcgtcaatttcttgattatatctataatcctcattttcaatattagagtctgtagaatcatcgatattattatcattcgcatgactagaagcagaatcattatttttatcattgctttcttcttttttgaagtctttattta

SEQ ID NO: 2291 - DNA, 435 bp, Staphylococcus aureus; identical to SEQ ID NO: 2249

SEQ ID NO: 2292 - DNA, 128 bp, Staphylococcus aureus; identical to SEQ ID NO: 2283

SEQ ID NO: 2293 - DNA, 85 bp, Staphylococcus aureus
atttgtagttacaatttttgaactcaatgtcccatcttcatttaccattaaacgccatacgcgatctaagaatcgacgagaccca

SEQ ID NO: 2294 - DNA, 205 bp, Staphylococcus aureus; identical to SEQ ID NO: 1725

SEQ ID NO: 2295 - DNA, 193 bp, Staphylococcus aureus; identical to SEQ ID NO: 2287

SEQ ID NO: 2296 - DNA, 331 bp, Staphylococcus aureus
tgatttctacgacattaactttaatatttcgttttttagcacgttgtcttaaagcaataatatttcctatatcactgtataaattcaatttatctgacataaaatgataaatagtcaattcatgcatattatgattgacctccttcaaacgaacggtttaattgttcaagcataggcgctaatgatgtatagtttggtattgcaactgtgaaacctttataatccatagtctttgccgttgctttataaatatcacgctcaactataattggtacttcaacctctgctaacttcaatcgcaattgaagttcttctgctcgtgtacctgtca

SEQ ID NO: 2297 - DNA, 435 bp, Staphylococcus aureus
ccacggtatgggataaatgaagcaccgactgataaatcaatatagcctcgtgtttttagtttacccgaactatcccttgataatgattgtgacatctgcggataatatttcattttcttagatatcgtcgaaatatcaccgattacttgaagtccatctgtcgtaaacaattcaattctgctttgtttgtttttacttggggcgtatgtcacttcggcaatatatcgtctaacttcaggtgtcatttcagataacgccttaatcatatcatcttcttttgtacctttgaaaccatccatgacaggtgcatcattaattttgacatcatttgaacctttaagcaatttaccattttctaataaaggtaaatatttacctttatatttcactaaagcaataatttcattttctgtgatatctacgtttaatgtgttt

SEQ ID NO: 2298 - DNA, 349 bp, Staphylococcus aureus
ttgatacaaatccataattaaccttattattgtggttttaccagcgccatttctaccaataaaaccagtgacgaatccttgaggaactttgaaagagatattctttaaattaaactgatcacttgaataattaacattacttaattctatggcattcatgatgattcctcctcataaatgaacgttaaaatatcctgcagttcctcaagtgacatttcgatggcttgcgcttcattaaccaattctttaaccaaattttcaatggtaaaaaattgtttctcttttaaaatagaactatcttgctccttaacaaaggtcccttttcctctaattgttgtaacaaaaccgt

SEQ ID NO: 2299 - DNA, 189 bp, Staphylococcus aureus; identical to SEQ ID NO: 2276

SEQ ID NO: 2300 - DNA, 180 bp, Staphylococcus aureus
ccgttttaactggtcctttacgagtacgcgcgttgtttttcgttttttgaccacgaactggtaaaccacgacggtgacggataccacggtatgatgaaatttccattaaacgtttgatatttaagttagtttcacgacgtaagtcaccttcgactttataaccgtctacaacttcacgga

SEQ ID NO: 2301 - DNA, 240 bp, Staphylococcus aureus
aacgccgcattcaacaccagtctcaccatgtgcttttaacatacggtattcaccatgaataggtaagaaatatttcggcttgattaatcgaagcattaattgttgatcaccttgagaaccatgccctgaagtatggatgttagaaatcttgctatggataacatctgcaccagctttatacaaggaattaatagttctgttaatactttttgtattacctgggataggtgatgaactaaa

SEQ ID NO: 2302 - DNA, 163 bp, Staphylococcus aureus
cactttcaatcatatctttagtcgttgttttaccattagaccctgtgacggcaattactttagggtttacatgtctcaagtaagcttgtgccaattgttgtaatgccgttaatgtgtcttcaacccatataataggcccgcttacattttcatctataggtgt

SEQ ID NO: 2303 - DNA, 186 bp, Staphylococcus aureus
tgttactgttgtcgattgaccaaatgatgacgttttttgttgcaactcattactccatccaatttgaccaggtgcttctccatcaaacatacctttagttgattttccaaatccaaatcgttcataccaagatttcattttgtctgcaccaactaaatcttgtaaatgcatcatcaatgtattaga

SEQ ID NO: 2304 - DNA, 176 bp, Staphylococcus aureus
catttcatgatagctaaaatgccccggtttaatctttaattgtttacgtaattcctcaagtaaaagataatgtgttgaataacgatgtggtataccaaaatggtaatcatcgccattattattaaattcatttaagtgcatacctttttgtcccataatgacattgccttcatgat

SEQ ID NO: 2305 - DNA, 435 bp, Staphylococcus aureus; identical to SEQ ID NO: 2249

SEQ ID NO: 2306 - DNA, 216 bp, Staphylococcus aureus
tgtggaccatccataagcggttctctttgtcgaacgccaccactttggttgccaattgattcgctatcaaagtacgatttatcttgatttgattgttcttgaatatgttcttcattatcagttgttgcatattcactatccacctctgttttttccattgttgctgtatggaattgtacgaagttctcttcttctaatgctttgatttcttctttc

SEQ ID NO: 2307 - DNA, 116 bp, Staphylococcus aureus
aatataatgttttgtgatttcagcatgtctcgaatttcatctgctcgtgcaaaatctttgtttttccttgcttcattacgctcttcgattaatttttcaacatcttcatccaataa

SEQ ID NO: 2308 - DNA, 222 bp, Staphylococcus aureus
catcatagcataactttctgcaattaattgcatgtcagcatattcgataccattgtgtaccattttcacatagtgtccagcaccattaggtccaatataagtaacacatgaagcaccgtcttttgcctttgcagcaattgcatcaagaatatctgcaactttgttataagcttcttcttgtccacccggcattaatgacggaccagttaacgctccaatttc

SEQ ID NO: 2309 - DNA, 361 bp, Staphylococcus aureus
tcaggtgtaaatacgccatctgaaccaaatggtaattcacgcattagataataacgtgtagcatctaaaccatagcgatcaattaaaatattagggtctacgacattacctttagatttactcatttttccatctttcatcaaaatccaaccatgtgcaaagacttttttaggtaacggtaagtctaatgccatcaataaaataggccaaataattgagtggaatcgcacaatttccttagccattaaatgaatatctgctggccagtatttgttaaatagtgactcatcatctgataaatagcctaatgctgaaatatagttaactaacgcatcaatccaaacataaacaacatgttttg

SEQ ID NO: 2310 - DNA, 454 bp, Staphylococcus aureus
taacgtattaccaattccggcaataattgctgcagccggtaaaatggcaactggtaacattaacgaacgccctaaattttggaaaaatttatacattgaatgtcatccttcttaaaataatgtagaaatataaagattactaatgtaactagaataactacttcgatactccgttatagtcacctaggcttactaaccagctatatttctacctcaagttattttataaactttttacaatttcatgcaattcttgttgtaactttgctgttcgtgtttcaatctcttttgtaatataatcgatacgctcgtttcgttttaaatctttaggtaaatcgttaatatcgattggtttgccaatatttatgtatgcttgtcctgttaaaagaccgtgaatcttagtaggaccaacataagcaacaggtaatattggtgacttacttaacattgcaat

SEQ ID NO: 2311 - DNA, 161 bp, Staphylococcus aureus
gaatgtttggtaacactgtgaagtattgccaaatttctctttcaagaccttcttctctaatcacttggcgtaaaatcgcgtctgattctctaacgatttctagtttatcttcagtaatttctccaagtacacgaataccaagaccaggtcctgggaatggt

SEQ ID NO: 2312 - DNA, 488 bp, Staphylococcus aureus
aaattaaatgctttatatttggctaatcattatattgttaaaacaaatttatctttaattatactatgtcttcagtcatttttcatcgaataatcattatatcaaaaataataagagcaggacataagcatcagatttctttcagctttttcctactcttataattcattcgatcttaattattttaagttatcatatttatttgtaatgacagtcattaagtcatcaatgtgaacttcttcgctatcacctgttaaacgttctttaacttctacaataccttccgatgcacgtttaccaacaacaattcgcagtggtaaaccaattaaatcggcatcattaaatttaacacctgcacgttcctgacgatcatcgtacaacacatcaaatttagtattaaattcagcatatagtgcatctgctagttctcgttgatcatctttcttaggattaatagaaattaaatgtaaatcaaacggagtaactga

SEQ ID NO: 2313 - DNA, 135 bp, Staphylococcus aureus
gctacaacatactctaattctttacctgtgtattctttttctaatttgattgatgctttatcccaatccagtgcttctgctacagcgtcagacaaggcttctgcaataatatatttttcgccatttacattgtat

SEQ ID NO: 2314 - DNA, 491 bp, Staphylococcus aureus
tacacatgttgtatacacgagagctcttactaacaatcaacgtcatttatttttgtctcatataagggaataataatacgtctctgattgatggagagtcagttaataacataaccaatctgtcaataccgataccaagaccacctgtcggaggcataccatattctaacgcttcaatgtaatcttcatccatttcatgcgcttcatcattaccttgcgctttttcaacaagttgcgcttcaaaacgacctttttgatcaataggatcatttaattcagtaaatgcatttgcatgctctctacctacaatgaacaattcgaaacgatcagtaaatctaggatcttcaggatttttcttcgctaaaggtgaaatttcagtcggatgaccatagataaacgttggctgaataagtgtttcttcaactttttgctcaaagaattcatttaaaatatgaccatatttcattgtatctttaatttcaataccatgt

SEQ ID NO: 2315 - DNA, 319 bp, Staphylococcus aureus; identical to SEQ ID NO: 2210

SEQ ID NO: 2316 - DNA, 361 bp, Staphylococcus aureus; identical to SEQ ID NO: 2309

SEQ ID NO: 2317 - DNA, 240 bp, Staphylococcus aureus; identical to SEQ ID NO: 2301

SEQ ID NO: 2318 - DNA, 491 bp, Staphylococcus aureus; identical to SEQ ID NO: 2314

SEQ ID NO: 2319 - DNA, 328 bp, Staphylococcus aureus
tgcctgtttcaagtctaacagcctttacctcattaagatcaaaattttgtggatttccaggtggcgttaataaatcgccaagttgattacgccataaatcattagccttctccgttttagtacgatgtatattcaagtcattagaaaagaaacaaactaacggacgtttaccacctgatacataatctatgcgcgctagaccgccgaagaataatgtctgcgcctcatttaattgatatacgcgttgttttatttctttcttaggcataataattttcaattctttttcactaactaaatgcgtcatttggtgatcttgaataatacc

SEQ ID NO: 2320 - DNA, 263 bp, Staphylococcus aureus; identical to SEQ ID NO: 2290

SEQ ID NO: 2321 - DNA, 328 bp, Staphylococcus aureus
taaagtattgttgtggtttgaactgattaatctcttgttgtcgtgtatttactaattgaatcgttggtgtctgaacacgtcccagggatagctgtgcatcatactttgttgttagtgcacgcgttgcattaatcccaacaatccaatctgcctcacttctcgctaacgctgcataatacaaatcgttatattgacgaccgtcttttaaatttttaaaaccttgttgaatagcttttttagtaactgagctaatccataatcgacggattggctttttgttaccaactttatccaaaatcaatcttgcaactagttcaccttctcgtcc

SEQ ID NO: 2322 - DNA, 122 bp, Staphylococcus aureus; identical to SEQ ID NO: 1971

SEQ ID NO: 2323 - DNA, 160 bp, Staphylococcus aureus
tgcctcttttgataaaggaacgtgaaccgccatttggtcaccgtcaaagtcagcgttataagctgttgttacaagtggatgtagacgaatcgcacgaccttcaactaaagttggttcaaatgcttgaataccaagtctatgaagtgttggtgcacggtta

SEQ ID NO: 2324 - DNA, 257 bp, Staphylococcus aureus
ggacctgtcaaaccatcttccacaactttaacccacgctaatcctttagcaccatagatgtttacaaattctgttaaagcatccatatctttacgagtatattgttcagctgcacctttagcgacaattgctttaatttcaccatcattttcaacagtatctttaaatactttaaagtccatatcacgtcctaattgagaaacgtcaattaattccatttcaaaacgtgtatctggtttatcagaaccatagcgacg

SEQ ID NO: 2325 - DNA, 109 bp, Staphylococcus aureus; identical to SEQ ID NO: 1797

SEQ ID NO: 2326 - DNA, 122 bp, Staphylococcus aureus
ccctgcatcatcgataattgcagcttgaataccaggtaatggtttgcccattgagccaagcttgacgtccatcgttggatagttaacaatcatatgtccacctgtttctgtcatccaccaag

SEQ ID NO: 2327 - DNA, 520 bp, Staphylococcus aureus
gacatgtgtatcgattaacataattatctctcctaatttttaaaaatacagttatttaatcactgcaccatttggaattgcacttggtaaacttactaaggttaatacaccatctttttcagcagataatatcataccttcagatttttgtcccattaatttagctggtttcaggttagtaacaactgctacttttttaccaataatatcatctggtgtatagaatttggcaattcctgatacaatttgtctttgttcagaatctaagtctacttgaatttttaaaagcttatctgacttcttaacatgttcagcatcaataatcgttgctgccttaatttcaactttatcaaagtctttaatatcaatttgaggtttgctaggaatctcttctttttcctctttagtagcaggcggttgcattgattctttgatatatgcaatttccgcttcgctatccaatcttgggaaaataggtttaggttgcccagtaaccataattgactcattaagcacacca

SEQ ID NO: 2328 - DNA, 162 bp, Staphylococcus aureus
actgcactcggtctcccgtgaaaatatcgtgtctctgtccagtgctgtccaatcaattttgatccaactatacgattgtcatacgtaattaaactgccatttgcttgttgataaaaaaatatttgaccaattaacgtgatagctaacgggaataaaaatcca

SEQ ID NO: 2329 - DNA, 286 bp, Staphylococcus aureus
tatctcttgcttccattatccgagcacctcctcaacttttttagcagcagcttcagtaattactaagctgtcagcattagtgatatctaaaacatttaaaccttgagcagttgtcacttgaacgccagggatgttgcgtgctgataattcaacatttacatcttcgttttcagtaactactaatacttttttaggttgttctaatgtagataatacatttttgaattctttagtttttggagcttcgaagttgaatgcgtcaactacagttaagccattctcttga

SEQ ID NO: 2330 - DNA, 174 bp, Staphylococcus aureus
tgatttttttgtcttttattaaagttaataaattctcaaccgattcgtagcgaatgctcatcttacgcgtcctcctcattcatgattgtaggcactttaaattgtccatcttctgtttctttggcatttttcaaagctaattcttgtggaatacctttaattgctttatcttca

SEQ ID NO: 2331 - DNA, 281 bp, Staphylococcus aureus
ttgcttgaatcacttcagctaaattatgtggtggtatatctgtcgcgtaacctgcagatatacctgtagaaccattcactagtaagttaggaaatcttgatggcaataccattggttcgagtgtcgtatcatcatagtttggaatgaaagaaactgtctctttattaatatcacgtaataactcttcagctagtaagcttaacttagcttcagtgtaacgcattgccgctggcggatcattatcgatactaccattattaccatgcatttctattaagaca

SEQ ID NO: 2332 - DNA, 430 bp, Staphylococcus aureus
tgatggagaaaacatttttgagtccgtttttaactctacgtgaacttcaagtcctataactgtttcaaaatgcatgatttccactccttataatttttcataaacgtcatgtaaattgtattgtgtttcatattgataagcgacacgatataacgttttttcatcgaatggtttaccaatgaactgtaaaccgattggtcggccatttgattgtccacaaggaacagaaataccaggtaatccagctaagtttactggtgttgttaataaatcattggcatacattgttaatggatcatcaatttcttcacctaaattaaacgcagttgtaggcgctgttggaccaactactacatcataattttcgaatactttatcaaagtcatttttaatcaatgttctaactttttgagattttttatagtaagca

SEQ ID NO: 2333 - DNA, 136 bp, Staphylococcus aureus; identical to SEQ ID NO: 1923

SEQ ID NO: 2334 - DNA, 199 bp, Staphylococcus aureus
gtaaaagtgaagcgaagtctttttcagcataccatttagcttcccaatcacggataataccaacacgaagtccgattggattaattttttgacccacagtattccctccttaaaagttaattaagcttctttagcttcttctttaccgtcacttacgacgattgtaatgtggcttgtacgtttgttaatcgcacttgca

SEQ ID NO: 2335 - DNA, 162 bp, Staphylococcus aureus; identical to SEQ ID NO: 2328

SEQ ID NO: 2336 - DNA, 174 bp, Staphylococcus aureus
aataaattatatattattgttcttctttaacatatggtaataatgccatatgacgagaacgtttgatagctgtagtcaacatacgttgatatttagctgaagtaccagttacacgacgtggtaaaattttaccgcgttctgagataaaacgttttaataattcagtgtctttgt

SEQ ID NO: 2337 - DNA, 192 bp, Staphylococcus aureus
taattcgttcaaatctacatttttcttttctaaggctgctgcttctatacttacttgtccgccacaacaaaaatctattcccacacttctaaaaatatccgctgctttcggataatcagttactacatctgctactatgtcatttttatttatcattatagataacctcctcatttccagtgtatacaattt

SEQ ID NO: 2338 - DNA, 167 bp, Staphylococcus aureus
ttatcgtttctggtccgtattctgttaattcattaatcggatcttttgtgatttcttctttcgattcacctttactaataatttctccagttaatggattttttagtgttggcgtcgttattgtcttctcacctttttgtccttctcttgttactttttctgtccct

SEQ ID NO: 2339 - DNA, 176 bp, Staphylococcus aureus
aaatcttcgtgtaaaagtgaagcgaagtctttttcagcataccatttagcttcccaatcacggataataccaacacgaagtccgattggattaattttttgacccacagtattccctccttaaaagttaattaagcttctttagcttcttctttaccgtcacttacgacgattgta

SEQ ID NO: 2340 - DNA, 445 bp, Staphylococcus aureus
tgtaaactcatatgaccttgttgaataccttctgacacaagcgcgcgacatgctgcaaagttttgcgctaaaccaacggcagcaactacatgacctaattcttgtgctgactctacatttagtagctctaatgaagctttagcaattggtaatacttttgtaccaccgccaacgattgccaatgtcataggcacttcaattgtaccaatcaatcgttgacgatcttgatcgtaacgccatgtagcaataccacgatactgtccgtcacgactcgcgtatgcatgcgcacttgcttctgcaccacgcgtatcatttcctgttgctaaaacaacagcatgtatgccattcataacacctttattatgtgttgctgcacgatgaatatctacttgggccaatacagaagcacgttccattcgtttggcaacctcttctccagttctct

SEQ ID NO: 2341 - DNA, 265 bp, Staphylococcus aureus; identical to SEQ ID NO: 2134

SEQ ID NO: 2342 - DNA, 106 bp, Staphylococcus aureus
tcattgcacaagcaagttcgaagaagtatacgacgtaaccgaaagtttcttcatctaattgtggaatgttcactaccatgttaggaacaccaccatcagtatgcgc

SEQ ID NO: 2343 - DNA, 153 bp, Staphylococcus aureus
tattcaacgaattcaaattctccgccaagaattctaacgatatcaccatttttacaaccacgttctctaagcgcatcatcaatacccatcgaacgcatttgacgagcaaatcgacgtactgctggatcactgttaaagtcagtcattttaaac

SEQ ID NO: 2344 - DNA, 289 bp, Staphylococcus aureus
tcaggtaaataacctaagtcacgatattgctcaataaattgtaaaatttgcccatcacgtttacttaactttttacgttcttcattaacaattaatgacatatgaccaaaacgaggtggctcccagccaaatgcttcataaatcataatttgtttaggcgtgtttgaaatatgatcatcaccacgaattacatctgaaatttgcatgtaatgatcatctatagctactgcaaaattgtacgttggaatgccatctttttttacgataacccagtcaccaataccatttg

SEQ ID NO: 2345 - DNA, 217 bp, Staphylococcus aureus
aacgataagtttgtctgatgattttttaccacgacgagttttcttaccaagcgtaggtttaccccatggtgacattggagatggtctaccgataggagcacgaccttcaccaccaccgtgtgggtgatcgttagggttcattacagaaccacgaactgttggacggatacctttccatcttgaacgtccggctttaccaacgttaactaattcgtgt

SEQ ID NO: 2346 - DNA, 155 bp, Staphylococcus aureus; identical to SEQ ID NO: 2277

SEQ ID NO: 2347 - DNA, 222 bp, Staphylococcus aureus
gatagcaaagtgtctttacgcttgtttttcttacctgaacgagcatcttcacgagctttacgtgcagcttcccttgcttgttgtgctttaatcgcttttttcacaagtgatttagacaattgtcctttttcttctaaatagaatggcaatttgtctgcaacaactgaatcaacagcacttctagcttcagaagtacccaatttagatttcgtttgtccttca

SEQ ID NO: 2348 - DNA, 286 bp, Staphylococcus aureus; identical to SEQ ID NO: 2329

SEQ ID NO: 2349 - DNA, 142 bp, Staphylococcus aureus
gaatttaacaacgccgtcgattttagcgaataatgtatcatcgccaccacgacctacattttcaccagggtaaattttagtaccacgttggcgatataaaattgaaccacctgttacgaattgaccgtcagcacgtttagca

SEQ ID NO: 2350 - DNA, 126 bp, Staphylococcus aureus
aacaatggtttttcagataataatggcatgttgtagacaaactctgatgcaacgtgtacttcagttggtacgccagcccatttttctaaaaattctttacctactaaacctgcatggtagcttgta

SEQ ID NO: 2351 - DNA, 202 bp, Staphylococcus aureus
actgtatcatcggatttgtaagttaagatttcttgtaatgtgtatgcagcaccatatgcttcaagtgcccatacctccatctcaccaaaacgttgtccaccgaattgcgctttaccgccaagtggttgttgtgtaacaagtgaatatggtcctgttgaacgcgcatgtaatttatcatcaaccatgtgcgcaagtttcaaca

SEQ ID NO: 2352 - DNA, 172 bp, Staphylococcus aureus
atataaatcaacaggtaaccaatgttttaatttttcaggatctgctaacatattttcatttttaggatcgatgtaacgtaaataataccaacaactacctgcccattgtggcattgtatttgtttcacgacgtcctttcatacctgttttttcatctacaacatttacagat

SEQ ID NO: 2353 - DNA, 155 bp, Staphylococcus aureus; identical to SEQ ID NO: 2277

SEQ ID NO: 2354 - DNA, 154 bp, Staphylococcus aureus
ataaccgagtccttgaatcatgcctccacctgtaccgataccgcctacacgacgttgtgattggccgtcgaaataatgtagtgacgtaccggtaccaacatttgcaaaaatataatctgctaagtcatggccttgctcttttaacaaaatacct

SEQ ID NO: 2355 - DNA, 126 bp, Staphylococcus aureus; identical to SEQ ID NO: 2350

SEQ ID NO: 2356 - DNA, 568 bp, Staphylococcus aureus
gaaaattttacgcattgtttctatatcaaatgcaatcgtaatgataacaagtgaacttgcgaataataatccgccgacgaaaccgccaccaggtgtataatgtcctgctaagaaaagtgaaaaaccaaagaccattaccatgaaaaagataataactgcagcaaattgcaaaattagatcattttgttgtctattcatgatttttcacctcgttaccttgcgtttgacgctttttacgtaatttaatcattgtatatacagctaatcctgcgataccaagcacagatgactcgaataaagtatccataccacggaaatcaacaagtatgacgtttaccatgtttttaccgtgagctaaatcataaacgtgctcttgataaaacttagatatcgattcaaaatgtctatttccgtatgcaattaaaccgataataatgacggacaaaccaacaccaccagcaattaaagcattagtaagctggaatgagcgcttttcattataacgatttaaatttggtaagtggtagaagcataataagaacaatgctgttgaaatagattcaacgac

SEQ ID NO: 2357 - DNA, 94 bp, Staphylococcus aureus
tggtgctctgtggaaatgagaaccgtgtgacataggtccacgagattgtccgtggcgtttaattgcaccttggaaacctttaccttttgataca

SEQ ID NO: 2358 - DNA, 127 bp, Staphylococcus aureus
cggcctttacgacgacggcgcgctaaaactttacggccattttttgtgctcatgcgttttctgaaaccatgaactttactatgtttacgtttatttggttgataagtacgttttaccatgcaaaaca

SEQ ID NO: 2359 - DNA, 265 bp, Staphylococcus aureus; identical to SEQ ID NO: 2134

SEQ ID NO: 2360 - DNA, 174 bp, Staphylococcus aureus
gtacttgaactacatctgcagtttcaatttggcttgcaactgcctcttcaacatatctattagcttgataacttgaaataattccatgaaactcatccatggctactaatactttcataaccttgaccaccttactttattatttgttgtgatacgttttttattcataaaaga

SEQ ID NO: 2361 - DNA, 265 bp, Staphylococcus aureus; identical to SEQ ID NO: 2134

SEQ ID NO: 2362 - DNA, 520 bp, Staphylococcus aureus; identical to SEQ ID NO: 2327

SEQ ID NO: 2363 - DNA, 289 bp, Staphylococcus aureus; identical to SEQ ID NO: 2344

SEQ ID NO: 2364 - DNA, 222 bp, Staphylococcus aureus; identical to SEQ ID NO: 2347

SEQ ID NO: 2365 - DNA, 203 bp, Staphylococcus aureus
ttcaccaccaggttcacgtaaatgaacatgaacatcgacaaatccaggtgacacaaagtgacctttcgcatctatgatgtcaacaccattgcttggttcaattgcaggtgcaatttgtttaattaccttaccatcaattaaaatatctgcttgttgtaattcgccattttgtaatactttaccgtttttaattaatttcatca

SEQ ID NO: 2366 - DNA, 153 bp, Staphylococcus aureus; identical to SEQ ID NO: 2343

SEQ ID NO: 2367 - DNA, 235 bp, Staphylococcus aureus
gaattgcaaaaccatcataaggtgatttatcaaaccttggtatatcataagtagctacaatatcttctgctaagatatgatttagacttttttcaagtgctaccgtaattgccggcattgaactctgctgattaacgatacgttgaattgcttctttaactgggattgggtttcttttttctactaccattaaaaatcatctccaaaacttttattttttcatgatatactagat

SEQ ID NO: 2368 - DNA, 192 bp, Staphylococcus aureus; identical to SEQ ID NO: 2337

SEQ ID NO: 2369 - DNA, 289 bp, Staphylococcus aureus; identical to SEQ ID NO: 2344

SEQ ID NO: 2370 - DNA, 185 bp, Staphylococcus aureus
caacttctacagtgaagtctacgtgtccaggtgtatcgataatgtttacacggtgaccttcccaagctgctgttgttgcagcagatgtgatagtaataccacggtcttgttcttgctccatccagtccatttgtgaagcaccttcgtgtgtttcaccaattttgtggatacggccagtgtaataa

SEQ ID NO: 2371 - DNA, 260 bp, Staphylococcus aureus; identical to SEQ ID NO: 1815

SEQ ID NO: 2372 - DNA, 162 bp, Staphylococcus aureus; identical to SEQ ID NO: 2328

SEQ ID NO: 2373 - DNA, 165 bp, Staphylococcus aureus
actatggttcttttgaatgtcacgtcgatcattttggttcacttcagcagacactgtagcgccaacatttacttggccaaattgtactactcctttatgcaagttttgaccatttggtgctttggttacttcactaacagcaatttcaaaattgtcattataaac

SEQ ID NO: 2374 - DNA, 143 bp, Staphylococcus aureus
tgccacgtaatttcgcaacatcttcagcatttttaaggttttgtaaaccatcgattgtagcacgaaccatgttgattggtgtgtttgatcctaatgatttacttaagatatcagtgatacctgctaattcaagtacggcacga

SEQ ID NO: 2375 - DNA, 160 bp, Staphylococcus aureus
gctcatcttcattcgtttcatcttctgcatcttcttttactttagcaaccgttgaaacaaattgatcatcacctaagcgaattaagcgaacaccttgtgctgcacgaccattttgagaaatatctgcaacatctagtcgaataatgacacctgcattagt

SEQ ID NO: 2376 - DNA, 491 bp, Staphylococcus aureus; identical to SEQ ID NO: 2314

SEQ ID NO: 2377 - DNA, 370 bp, Staphylococcus aureus
ctaagttaatttatcgtttagtatcgatagttctatataatttatttagcatctttaccatataattcttgtttgattttagtcgtcgaaatgccttctgtacgttttaaataaatgacttcacatttatcctttaagaagtcgaattcaccttcccagtcatgtcccataacaaaaacatctacatcaaatttttcgacatcgtcttctttttgtccccagcccttttctggaatgactaaatcgacatagcgtattgattcaagcatcatttttcgttgttcataatcataataagattttttatgtttaatttgattaaattcatctgttgataatgctactattaaataatcgcccatctctcttg

SEQ ID NO: 2378 - DNA, 547 bp, Staphylococcus aureus
tgcccttcatatttgttacctaaatttacttttccagaaaaatgaaaactcttattagagtcaatacgtgttcctaatgtaatagcacctttttggctgtatgcatcctgtgttaacgtcacaataccggtactttgatcataggtagcattacctgacgttgtcatatattgttttaagttatctttattaactgtaattgtattagcagttactgcggttgtcgtcgctgctgacgcaaatgttgacatagctaagcgactgaaagttcgaagttttactggtgcggtgctagttgacgttgtgctagttttgtttaagttgaccgaagatggcgttgtgctttgtgaagtgttatttgatgcagtactttgatttgttgatgtattaattggttgttctgtacttgaagttgaagctacagatttagtatcagaacttgatgtagtattctttgaggatgttgattctgatgtagatgtcaatttctcttgttgattgcttgtactattagttgtcgaagtgaccttttcagacttttcacttg

SEQ ID NO: 2379 - DNA, 209 bp, Staphylococcus aureus; identical to SEQ ID NO: 1678

SEQ ID NO: 2380 - DNA, 223 bp, Staphylococcus aureus
gtcataactttgaacgctaatgcagcgaattcagctgaatcgtctgctttcgcgattacttcttcttcagggttgctagcacggtgaccaataattggtttaacgtctagtggtgaaggtaagtaatcaattacagcgtcaagcattaattgaacacctttgtttttgaaagctgtaccacaaagtactgggtagaattctacgttagtagtagcttggcgga

SEQ ID NO: 2381 - DNA, 697 bp, Staphylococcus aureus
cattaatcgttcacttgcaactctaatagcaacaccatcacgattatcatcttgaggttcaagtgccataatacgtgggccatctttttcaaaggttgagtaatcatagttaataatttcattaatgatatttggttgtgcatgctcgtctgaatcaaaggcatcctcactgaatgataaaatttcatgtttaatgttcaatgcttttaacgtctcgtggaataacactacacctttcttcgtttcagccattttatcatgcatacttgctgacgcatcaattaacaatgtaaatgtcgcatcaaatgatttacttaaatcttgttttttgtaaaacaatttatattgatcgtcgataaaccaattaattaaatccttttgtaatcgcccttttgttaaattaaaacgtgcatctcgttgttctcgttcaatcgttttctttataatttgaattaagtctttgatttcatattgtacgtcttgtttcgattcttgatattctaaaacatattgtggctcaatttcaggaatttgccattttatttctacatttttgttcacaccatcaagttgaaatgcttggctttgaccaacagcatcgccttcttcacgatttagcgtatcgtttgatcctttgccctttttggtcatcatatcagtcatatcatctgtagcatcgccttcacgtgcttcatca

SEQ ID NO: 2382 - DNA, 179 bp, Staphylococcus aureus
ttatcttttctttcgtacgtatgagcaccgaagtagtcacgttgtgcttgaattaagtttgcaggtaaatcagcagcacggtaactatcatagtaattaatacttgatgagaaaccaggtgttggtacaccattttgaacaccagttgcgacaacatcacgtaacgcatcttgatattc

SEQ ID NO: 2383 - DNA, 279 bp, Staphylococcus aureus
tgtaggatcaattatcgtaaaattgcgttctataccaattcgatctgcatcacgacgtaaaatacgaacacacattgagtggaatgttgacatccaaataacttctgcttgatcacctactaatttttgaacacgttctttcatttctcttgcagctttatttgtaaaagtaatagccaaaacattgtatggtgagacatctttttcgtctaataaataagcaattctatgtgttaaaacacgtgtcttccctgaaccagcacctgccataattaacaa

SEQ ID NO: 2384 - DNA, 284 bp, Staphylococcus aureus
cacttccagcaacaataactatatcttcgcttgttgtatttttaatttgttgtaacagttgttcaaattgtgttgacgttatatgaggacccggtgcattgatttctgtttcttgtcctgtttttaatttcacattaatacgtgtatcttcatcaacttcaataaaattcgattgaattgcactgttatttaatgtatctataatgaatttcccaggaaatccacctgcaaatcccaaggcagttgactcaacatccaatgtctttaagacgcgcgagacatta

SEQ ID NO: 2385 - DNA, 165 bp, Staphylococcus aureus
agtctctttgaactttgacccataattctaagtaaactttagagcctagaagcatttctatatcacgtctcgcacgttttcctacttcttttaactttttaccgccttttccaatgacaattcctttttgcgaacctctttcaacatatatagttgcttcgatat

SEQ ID NO: 2386 - DNA, 104 bp, Staphylococcus aureus
atttaataaattaaactgaactttaggtaaaatttcttccaatgcttcattcgttaattgtcttatttttttcaggtctaattgtttaaaatcgccattaatac

SEQ ID NO: 2387 - DNA, 491 bp, Staphylococcus aureus; identical to SEQ ID NO: 2314

SEQ ID NO: 2388 - DNA, 79 bp, Staphylococcus aureus
ttaaatcatgtcctggagatgaacctgttgctaagaagtaacgcaagctatcagcaccgtattcgtcaataacatccat

SEQ ID NO: 2389 - DNA, 261 bp, Staphylococcus aureus; identical to SEQ ID NO: 2066

SEQ ID NO: 2390 - DNA, 260 bp, Staphylococcus aureus; identical to SEQ ID NO: 2063

SEQ ID NO: 2391 - DNA, 394 bp, Staphylococcus aureus
aacactaagaagttgtcttcactttcaaggtctttaacagcaatcattgtactaatgacttcatcattttcaagttcaatagcattcactacaggaatacctttagactgtcttgataactcaggcacttcgtaacctttaagtttgtatacacgacctttgttagtaaagaacaatacatggtcatgtgtacttaaagttaccaattgactgacaaaatcttcttccaatgtattcataccttgaacaccacgaccaccacggttttgagcacgatatgtagataccggcaaacgtttaatgtagttattatggcttagtgtaattactatttgttcttctggaattaagtcttcgtcctctaagtcttcaaatccacctaattgaatttctg

SEQ ID NO: 2392 - DNA, 349 bp, Staphylococcus aureus; identical to SEQ ID NO: 1962

SEQ ID NO: 2393 - DNA, 209 bp, Staphylococcus aureus; identical to SEQ ID NO: 1678

SEQ ID NO: 2394 - DNA, 104 bp, Staphylococcus aureus; identical to SEQ ID NO: 2386

SEQ ID NO: 2395 - DNA, 491 bp, Staphylococcus aureus; identical to SEQ ID NO: 2314

SEQ ID NO: 2396 - DNA, 256 bp, Staphylococcus aureus
tctgttttttccattgttgctgtatggaattgtacgaagttctcttcttctaatgctttgatttcttctttcgataacgctcgataccaatctttcgcttttttcgccgcaataggaacaacatctttttcaagatatccttcttttaacattgcattcgcaatttctatcgctttttgccgtttaattacttcaaattctttccatttttcggggtaacctttcattgtaaagggcattcccttaacctccaata

SEQ ID NO: 2397 - DNA, 124 bp, Staphylococcus aureus
tgacgagctgctgcgttgatacgtgtaatccataatttacggaagtcacgtttacgttgacgacggtcacggaaagcatattgacctgatttcattacttgttgcttagctactttgtataatg

SEQ ID NO: 2398 - DNA, 350 bp, Staphylococcus aureus
tgcaagatattgctcaattttacctggtgatggcataaagttcttgtaaggattttcagcattaattctaaattcaattgcgtgtcctgttaatttaatatcttcttgtttatacggtaacacgtcacccatagcaacttgtaattgtaatttaactaaatcaattcctgttaccatttcagttacaggatgttctacttgaatacgtgtattcatttccataaaataaaatttattatcatttaaatcatatataaactcaattgttcccgcattttcataatttacagctttcgctgcacgaactgcggcatttcccatttcacgacgtgtttcatcatctaaaattg

SEQ ID NO: 2399 - DNA, 435 bp, Staphylococcus aureus; identical to SEQ ID NO: 2249

SEQ ID NO: 2400 - DNA, 179 bp, Staphylococcus aureus; identical to SEQ ID NO: 2382

SEQ ID NO: 2401 - DNA, 349 bp, Staphylococcus aureus; identical to SEQ ID NO: 1962

SEQ ID NO: 2402 - DNA, 209 bp, Staphylococcus aureus; identical to SEQ ID NO: 1678

SEQ ID NO: 2403 - DNA, 156 bp, Staphylococcus aureus
gacgattacctagtacagaacctgcactgcctcctccaatgatgacataatcatatgatttgtttttgttactcatcgttatgacctccaaagtttgttgtatttcaaagtgagtattgcatgaaatatttgttagtggctgattggttatcgttg

SEQ ID NO: 2404 - DNA, 250 bp, Staphylococcus aureus
aatcataattgtgtaaaaatgtccgcccttctaaatcaatgccttttgttaattggcgtcgtccaattataaatgatgcatttttagccaatccccattctggacgtacctcactccaatcactcgcaaaccgctgcgcttcttccactggatgattcacacgaccaatcgttggcagtttgtccaaacgttcgcgattcgcgtgttcagaaatcatcggcatcgcgtcattcaatgattcatatgcatc

SEQ ID NO: 2405 - DNA, 82 bp, Staphylococcus aureus
gataatcctggattgttaggatttactgggccacttggatgagttggtctgctcggcttctctgggttttcaggtccttttg

SEQ ID NO: 2406 - DNA, 299 bp, Staphylococcus aureus
gcctttaccaattaccataccaggtttaccagtatgaattgcaatgttgatacggtttgcagcacgttcaatctctacgtgagaaactgatgcttcttttaattcattatcaataaatttacggatttttaaatcttcgtgtaaaagtgaagcgaagtctttttcagcataccatttagcttcccaatcacggataataccaacacgaagtccgattggattaattttttgacccacagtattccctccttaaaagttaattaagcttctttagcttcttctttaccgtcacttacgac

SEQ ID NO: 2407 - DNA, 394 bp, Staphylococcus aureus; identical to SEQ ID NO: 2391

SEQ ID NO: 2408 - DNA, 375 bp, Staphylococcus aureus; identical to SEQ ID NO: 2006

SEQ ID NO: 2409 - DNA, 245 bp, Staphylococcus aureus
aatcacgatcgtgtcataactatgtccatgtcgtgcagcatatttatagaaatcaaaagtgtccatgacataaatatattgggatttaggatcaatagcatttaatccaaaattttcttcagttaaactacgagaacgattagccaaatctacacttgttgttgaagatgcctcacttgctgctattgcagaaaaagcacctgtataactaaataagtttaaaacatggcgttctttggcatatt

SEQ ID NO: 2410 - DNA, 343 bp, Staphylococcus aureus
tacattagtggatgcacatgattttctaaattacgcgctaaccgaattctagaagacataacaattggtgtttcttcattacttttcatccattggctgatattatcatgaatattatgcgtcatcatgttgcacctcactctcagcttttagtgctttaatttcatctctaacaatggctgcttcctcaaaatcttggatttcaataagttttttcaaatattcattcttttcttcgatttttcgctttaaagctatctttttatgtgaagaatgtggtgtctttccaacgtgctcaaattgtccaccttgaactctgcggacgatatcaatgatgtcatct

SEQ ID NO: 2411 - DNA, 151 bp, Staphylococcus aureus
tatttcatcttccaattgctgcgtattaaagtaacctgcgcctattgtgcctaacccaccactgttacttactgatgcaactaatttcggtgtcgtacttcctgccatacctgcttgtataattggatattcaatacttaacatttgagta

SEQ ID NO: 2412 - DNA, 518 bp, Staphylococcus aureus
taactgtacccgcttcacgaatagcaccactgaagtacaatagtttttcagttaacgttgttttccctgcatcgggatgtgaaataatcgcaaaagtctttctagactcaacttcttgctttaagttcattagtctttctcctttttatatgtttctatccaatctgttagttgtgatgcaatcgattctgcctcttcctcttctttaaaaacaaacaattgcatgagtattgcttcaaaacaagtttcttcatctaatgtcattgccatctgatatgaccaaaaccaatctggtatagcaatgattatctggttatttaatgcttcgaataaataaacatcaatagttttaccttcatcaataaatcttttattaatcaacagggccaccaccgaactttttgtaagctgcttcaaggccaattaaatcatctcgatgtggcaccttaatatgccctggcatgatttgatatggttctcttccttttgatgctaaaacgacagtatccccaggctca

SEQ ID NO: 2413 - DNA, 221 bp, Staphylococcus aureus
aaagaatgcattgcgtgttgtttctaagaaatctgtagcaatttgttccataattggtgcatcgtcaacaattgcttctattgctgttgttacttttgctaattctctcaataaatcaatatctgcttcacgaccatgctcttttgcaacgatttgagacaagattgataatactgcaatttgtgcagtatatgcttttgtagatgcaactgcgatttcag

SEQ ID NO: 2414 - DNA, 392 bp, Staphylococcus aureus; identical to SEQ ID NO: 1693

SEQ ID NO: 2415 - DNA, 267 bp, Staphylococcus aureus
gatttcaatttactcggtgtttcataagagacttgcgtcaattgtccgcctgcagctaaattaataaagtatcgattattcattttaccaatatctactttagtagaatgaccttcaatgatgacatcaagtgcccccatgatgtcattaggtatatgcaatgcacgtccaaagtcattaacagtacccataggaatgacacctagcttaggacgattaggcttttctgcgataccattaactacttcatttaatgttccatcacca

SEQ ID NO: 2416 - DNA, 218 bp, Staphylococcus aureus
cgataattactgattcagcaccgtcaccgcgacgagggccttgtttaaggatacgagtgtaaccaccttgacgttctgtgtaacgctctgcgatttcaccaaataatttttgaagtgcagtttgtgtagtttcatcttcgtttaagatttcaacattacgtaaagttttagctgcattacgacgagaagctaaatctccttttttacctaaagtgatt

SEQ ID NO: 2417 - DNA, 193 bp, Staphylococcus aureus
taacatattagctataaaaatgtacagaatcagcgttactgctaagaagtggaattgaccaccttttttccaagccatgttaccttcaatgattcccctcacgaaatcaaaaatccattcaacgaaattttgtttgccagttggtctttttttcaaattacgcgtacaaatgatagcaagtagaaaaacaaga

SEQ ID NO: 2418 - DNA, 206 bp, Staphylococcus aureus
tgtcttcctcaaatgactgattaccgctattttggccaccttcgtaacctaattcactcttaatatccacgtggctattttcttcgatttcttcaatcacgccataattaccgtgaccattttcagttcctaaaccagaatgagaaatatgatgattgttttcagtaatttcctcgattggtccttgcgcttgaccatgttcttca

SEQ ID NO: 2419 - DNA, 344 bp, Staphylococcus aureus
gttacagctatgattggtgcttcagagattagataacttaactcaacttctgttaaaattttcaaacctcgtttcactgcttcatcaataatagatactgtataaggtattccaggatttttaacaattattggattattatcaagcaacgttaatggatgacttccacttacaacagaaatgcccatagattctaaatcttttgcatgagcatcttgtgataagtcttttccatcattgacagttacattcgcacctaatttacttaataatttagctgcttcataaccactttttgccaaaccgacaactaatacatttttattttctaaccctgtataatt

SEQ ID NO: 2420 - DNA, 250 bp, Staphylococcus aureus
gacctttagggttacgtgcttcgaaaatctcttgaatacgaggaagaccttgtgtgatatcgctacctgctaccccacctgtatggaatgtacgcattgtaagctgtgtacctggttcaccgatagattgggctgcaattgtaccaactgcttcaccaacttcaactttttcaccagtagcaaggtttttaccgtaacatttttcacaaacaccatgtcgtgcgttacaagtaaatgctgagcgaatata

SEQ ID NO: 2421 - DNA, 138 bp, Staphylococcus aureus
tatgaaccgtcattacgacgaacacctgacttagtacgtacgattacagctttgacaacgtcaccttttttaacaacgccacctggtgttgcatttttaacagtacatacgataacatcgccgatgtttgctgtttta

SEQ ID NO: 2422 - DNA, 217 bp, Staphylococcus aureus; identical to SEQ ID NO: 2288

SEQ ID NO: 2423 - DNA, 127 bp, Staphylococcus aureus
ccatatcttcagttacatatacaggtacgtgtttacgtccgtcgtatactgcaaaagtatgtccgatgaaattagggaaaattgtagaacgacgtgaccatgttttgattacttgtttcttttcgct

SEQ ID NO: 2424 - DNA, 127 bp, Staphylococcus aureus; identical to SEQ ID NO: 2423

SEQ ID NO: 2425 - DNA, 192 bp, Staphylococcus aureus
agccatcgcgttccccagtgattttcattaactcagcaaatgtttttaaaccttctctatcagatcgttctactgtcgtacctcgctttaaagccaagcgcacttttgaacgatttcggcgttcaaaactatttaataactcatcatcatttttatcaattggtgtaatcatagtcatacgtggttggatgt

SEQ ID NO: 2426 - DNA, 250 bp, Staphylococcus aureus; identical to SEQ ID NO: 2420

SEQ ID NO: 2427 - DNA, 424 bp, Staphylococcus aureus
tgttttaccccaatttactttgaagtttgtattttcgattgcatctaaaatatcttgtcttactttactgattgaggcaaaccattgtggtgtagcacggaagattacaggtttttttgttctccagtcgtgtggatagctatgtgtaataaagtctaattttaatagtgcacctttttctgttaataaatcagtaacggctttattagctttatcatagaacatcccttcaaattggccgccttcttcagtaaatacacctttatcatcgattggactaattactggcaattcatatttttgaccaacaatatagtcatcttccccgtgacctggtgctgtatgtacacaacctgtaccagcatctgtagtaacatgatcaccattaatcactaacgattctctgtctaagaatggatgttgt

SEQ ID NO: 2428 - DNA, 134 bp, Staphylococcus aureus; identical to SEQ ID NO: 2039

SEQ ID NO: 2429 - DNA, 206 bp, Staphylococcus aureus
ccatcagatgcggcaatacctttaattaatttagacatgattatttagtcaatccttcttttgataagacgtcactgattgcttgaatggcgtcagattcatcactaccgtcagcataaattgtaatttcagcatctttaccaacaccaaggctcataacacccatgattgattttaagtttactttcttaccgttatattctaat

SEQ ID NO: 2430 - DNA, 395 bp, Staphylococcus aureus
cgacttgcactgaaaccagcaattgccatatgagtaattggtgcttctgtaccaccagtaatcattgcatctgcatcaccgcgttgcacaattttaaatgcttctccgattgaatttgtacctgttgcacatgctgtaactgttgcaccatttggtccttttgcacctaagtcaattgatacttgcccagttgccatatcaggaattaacattggtacgaaaaatggactcacacgtcttgggcctttatccattaattgtttatgtgcaatttcaaatgtttccataccaccgataccagaaccaatccatacaccgattcgatctgcagtattttcattgatatctaattgcgcatctttaacagcctctctagctgctacaattgcatattg

SEQ ID NO: 2431 - DNA, 378 bp, Staphylococcus aureus
agttttactgtcagatttcttcttatcatctgaatttgaatcagaattattcgtcgaattgctgtctacattctctgatgaaaattctacgtctattttatctttttcagtaagtttttgtcccttactaattgattggtgggacacaaaaccgctaccttttaaatttactttaatatttgttaggttttcaaaagcaatgacatcttctttcgtccatcctgacatgtcaggcatagttaagtctccatctgttaataacagtactttactatgaggtaagactttattccctgcttttatagattgtgcttttatttgtgtgccagaaccaatagtaactggttctaatgattttgcactcacattatcaatagc

SEQ ID NO: 2432 - DNA, 306 bp, Staphylococcus aureus
gcattcgcactttcaatgactggcttttcattatcctcataccgtaaatcttccacgccatataatttcaatgctttcacttgtaaatcacctcaaatttgatttaattcacaacttttttctttttaaaaatacctgtcgcaaaataacctgcaatgacaatggaattacttacgagtaaatgttccatataaaaatcagtgatttgtcttaatggcccaagcataaaagttagcattgattctaccatattaattctctccttcattttcatctaaatcgagcggcttaagtaatgctttaata

SEQ ID NO: 2433 - DNA, 298 bp, Staphylococcus aureus
aaactcaactttagtgacatatgcttcaacttcgtcgccctcttttacaacttcacttgggctatcaatatgatgcgtagatagttgactaataggaataatcccattaaatttaccaccgttgatatgaacaacaacttgcttgtcttcaacttgttgtacctcgccagtgactttgtcaccttctttaatatcgttaatcattgattcattgaattcttcagtcatcttgtttgcctccttatacactacatatttataacatcttataaactgacagaattgtcaagaaattcta

SEQ ID NO: 2434 - DNA, 239 bp, Staphylococcus aureus; identical to SEQ ID NO: 2257

SEQ ID NO: 2435 - DNA, 134 bp, Staphylococcus aureus; identical to SEQ ID NO: 2039

SEQ ID NO: 2436 - DNA, 183 bp, Staphylococcus aureus
gcctaaaaaggctggattttccaatgtgtcatcattacggatctcgaagttctcataacgcacatcatgtaataacatattcatgcgtgctaagttgtatgtagtattgttacgttcttgtccgaaataacgatacacttgcgtttctttaccaacacgtaacaacaatgaaccggaaccaca

SEQ ID NO: 2437 - DNA, 215 bp, Staphylococcus aureus
tgatgtaatgcatcaaatgaagttaagaattcagatgcattaaatttatcgttactagcaatcgtaactttagcttctaatgatttaccaataactttttcattacgagcagtttctaatgcacggttcacatcatcacgtaaattcataaatgtacgccatttatccaataaagcttgatctacttctacaactttaggcatgtctgctaagtg

SEQ ID NO: 2438 - DNA, 190 bp, Staphylococcus aureus
aagaaaatctcacattcttcaggacttttactagagcaatcggctaatttacctggaaggcttgctacatctaacgctgatttacgacgtgttacttcacgcgcttttttcgcagcaacacgtgcacgtgccgccataatacctttttcaaccactgtacgtgcgacttgtggattttcatataaaaatc

SEQ ID NO: 2439 - DNA, 299 bp, Staphylococcus aureus
agatcatcgattaagacaccaatatatgcatctgaacgacttaatatcttttcgcctgtgtttaacactttacctgcagcgttaatacctgccatcaatccttgtcctgctgcttcttcataaccagatgtaccattaatttgacctgcagtatataagtttttaatcattttcgtttcaagtgtaggccataactgcgttggcacaatcgcatcatattcaattgcgtagccggcacgcatcatatctgctttttcaagacctggtatcgtctctaacatttgacgttgcacatgttc

SEQ ID NO: 2440 - DNA, 239 bp, Staphylococcus aureus; identical to SEQ ID NO: 2257

SEQ ID NO: 2441 - DNA, 136 bp, Staphylococcus aureus
catgctattcctcctgttgagatttcaatgattattttagttccatttgttgagtcgactgctaaagttccatttaaatgttgtacacgctgtgaaatacttttcacctcacaatcactatcgatacctttgccat

SEQ ID NO: 2442 - DNA, 197 bp, Staphylococcus aureus
catattcgcttaataagtcacgaacttccatttctactaattctaataattcttcatcgtcaaccatgtcaactttgtttaagaatactactaatgctggtacaccaacgttacgtgataaaagaatgtgttcacgagtttgtggcattggaccgtcagcagcagatactactaagataccgccgtccatttgagca

SEQ ID NO: 2443 - DNA, 306 bp, Staphylococcus aureus
tgttcaccatgtataccgtaaccaagtgctctatccgataatttttcagctgcgtattgtaatgaatcaggtactgaaattgcatatttattatttataatgacacatacaaaaggaagtttgtgtacacccgcgaagtttaaaccttcatggaagtcaccttggtttgagctaccttcaccaacagttgctgttgcaattttcttcttaccatccatttttaaagctaaagcagcaccaacagcatggggtatttgagttgctaccggtgaactttgagacaaaatattcttagctctactacta

SEQ ID NO: 2444 - DNA, 239 bp, Staphylococcus aureus; identical to SEQ ID NO: 2257

SEQ ID NO: 2445 - DNA, 279 bp, Staphylococcus aureus
gttcttgataatttcttcatttaatctttcactaaattcttcggccgtgttaatgcccatgatatttaatcgatagttcattgcagcgacctcaataattaccgcaacatttctaccaggtcttacaggtattgtttttttagtgatttcagtatctaaaatacttagcgtctcttcattaagacctacgcggtcatataacttttgcttgttccagttttccaaattaatatttaatctaattcgtttttcagttaatattgaacccgcgccaaataa

SEQ ID NO: 2446 - DNA, 279 bp, Staphylococcus aureus; identical to SEQ ID NO: 2445

SEQ ID NO: 2447 - DNA, 237 bp, Staphylococcus aureus
cattaaataaaccatgatatcatcacgacaaccaattacacttgataaatcacatataccggttttaattaattcttgagcattgcctaaccacacatctgtaccatgagataatcctgagatttgaactaattcagaaaatgttgttggctttgtatcttctaacatttgacgcacgaatcctgtaccgaattctggtaccccaaatgtacctgttttacataaaatttcatcttc

SEQ ID NO: 2448 - DNA, 197 bp, Staphylococcus aureus; identical to SEQ ID NO: 2442

SEQ ID NO: 2449 - DNA, 197 bp, Staphylococcus aureus; identical to SEQ ID NO: 2442

SEQ ID NO: 2450 - DNA, 150 bp, Staphylococcus aureus
tgccaggcttgttgccgtcttctttaccaggttttttgttgtcttctttaccaggcttgttgccatcttctttaccaggttttttgttgtcttctttaccaggcttgttgccgtcttctttgccaggcttgttgttgtcttctttaccag

SEQ ID NO: 2451 - DNA, 332 bp, Staphylococcus aureus
aaaaatttcacttttagttctattatcactatcattagttaattgtctcgtatggtcatgtcccatattatttatcaaatgtgcttctactttccaacctacacctttatgtgacgtagattgatcaagtaatgtacgatatgatggttgttgataactaatcgtctctgaataattactctcttttgtaatatttccagttaagcctccacgattaatcgaaaaatctccacctgttttataaccatacgtatatttaacttctcttgattcatcctgattttttggtgcaaagtcagtcacatttgtattgttgttgtcatcaacatttt

SEQ ID NO: 2452 - DNA, 391 bp, Staphylococcus aureus
caatgtgagaagtattgattgtgataccacgttctttttcttctggagcgttgtcaatcatgtcatatgattgtgcaactgagtcaccattttttgctaatacagtagcgattgctgctgttaatgttgttttaccatggtcaacgtgaccgatagtaccgatattggcatgttctttagaacgatcgaatttttcttttgccattataaaatctctcctattctaattaaaaataatatttaaatttatctctcatgatagtttctcaccatcatgagaaattatttatagcgatgcaaaaagaattttacaattcttttataatgcattcaccccaaaaaatcaaactataaagatgatagcttacatttaagctcaccttgtatttta

SEQ ID NO: 2453 - DNA, 310 bp, Staphylococcus aureus; identical to SEQ ID NO: 1685

SEQ ID NO: 2454 - DNA, 192 bp, Staphylococcus aureus
tgttcggccgcaagtgctcttacaacaccgatacgttgttgttgcccacctgatagttctgctggataacgctctaaaaatgactccggtaaatccacaagtttaattaattcctttgcacgtttatccttttcctctttagtccatttcaacaatttgggtaccaacacaatattctctttaatcgtcata

SEQ ID NO: 2455 - DNA, 98 bp, Staphylococcus aureus
ccttcgatgacttcaatgattggcaaatcaaactttttagcaaattcataatctctgtcatcatgcgctggtactgccataattgctccagtaccata

SEQ ID NO: 2456 - DNA, 395 bp, Staphylococcus aureus; identical to SEQ ID NO: 2430

SEQ ID NO: 2457 - DNA, 156 bp, Staphylococcus aureus
atgccgcattaccaatttcttctccaaatgataaagggatgatatccttaaatgtttctacgattgtgtcattactttttttagttgatttggacatcatagtcaccgcctatcattaaattaaacccattctacgtaaatcttctgttgcagttg

SEQ ID NO: 2458 - DNA, 244 bp, Staphylococcus aureus
tactttttcaatactaatttctaattgtttcgcgtactgcgtaatattcttcttaaaattatcaagcagctctttttcaaggttatttgtaaaatataacccgataatttgcataccaatgataatcagtaatacataaacaattacaagtttagtatgaagggattgtagttgttttagccacttcattcgtttcgacctctactcatgttgttggaggaaatatccaacgcctctacgcgtc

SEQ ID NO: 2459 - DNA, 395 bp, Staphylococcus aureus; identical to SEQ ID NO: 2430

SEQ ID NO: 2460 - DNA, 521 bp, Staphylococcus aureus
aatttgtgcgatcaatttttgcatcattgtcatcaccctcttttataaaattctaataaatgcttcattaaatctttcagtaaaattgttgtcattaaatgatcttgaccatgcatcatcgttacactgtatgcaatatcatcaccttgcgcttctttagccaacaggcttgtttgtgctctatgcgcttccgcaatgcaattgtttccttcttcaatcagtgcatctgcttttgcaaaatctccagcttgagctgctgttaatgcttctaaaaacttagaacgtgcatcccctgcaaatgcaacaatttcaaaacctaataattggacttcttctctattcatagcattaatccccttttaaacttattttctttgtttccaagatgtcgcagtatcttttaatactttatttaagtcatcaatatttttgaaaccagttgtacgtaaccattcacgagcagcatcttcaccttgttcaatgtatacttgaacagcaccagaccatgtagcacggccaca

SEQ ID NO: 2461 - DNA, 215 bp, Staphylococcus aureus
tactcaatgtgagaagtattgattgtgataccacgttctttttcttctggagcgttgtcaatcatgtcatatgattgtgcaactgagtcaccattttttgctaatacagtagcgattgctgctgttaatgttgttttaccatggtcaacgtgaccgatagtaccgatattggcatgttctttagaacgatcgaatttttcttttgccattataaa

SEQ ID NO: 2462 - DNA, 190 bp, Staphylococcus aureus
taacttgtccagtttcttcgtcagtgtgtgcatggaatgttgggtcttcttcttgtaatttaactaaagcttgagtcattttatcttggtcagctttagattttggctctactgataagtgaataactggctctgggaattccattgattccaagataatgtcatttttctcaccacataaagtatcacc

SEQ ID NO: 2463 - DNA, 422 bp, Staphylococcus aureus
tgtatctcaacacttttgattaatggattctcttcgagatcattaatagcattttttttactaaacgtatacatccttgaatcatttttaacacctaaaactttgtttatctttgaagtactaacgtgattatttccatttatatttacatgcgcaattttactaagtggtgaaaacatgtaaattaatataacagcaatcaacaataccaatattgtaataacactgtattggattcgcttttgtcgcttacgtcttaacttccgcttttcttcaagtgttaatggctttaattgtgttactttactttttcgttcttttttcgttactgtttcctcatcaatcgagtcgctattttgttctttaggagctgattgaggttgttcgttgtcgactgaaattacattcgattcattttggtc

SEQ ID NO: 2464 - DNA, 237 bp, Staphylococcus aureus
gctctactttctgctttcaatcctaattccatcaacacttcagagatggaaggatgtgcgtgtgttgttagtcctaattctaatgccgagccattcatgaactgtaacagtgatgcctcattaatcaattctgttacatgtggaccaatcatattaatacccacaatttcttcagttgattgatcaatcaccatttcgctatacccttcgtttgtgtcatggctatcaatcactgct

SEQ ID NO: 2465 - DNA, 380 bp, Staphylococcus aureus
tttcttgcaaacgcgcaatttgcacacgatcccatggttttagatttgtatatatttttttagtttctcgttccaatgacgcttcaagcatgtcaatttcttcttgtaaatccacatcatttttatcttgagattcttttaaagattcaattttatttcgaatttcaaaaagtggtttttcaaaatctaacattatttagtcacctcttgatggatttttagaatttcagacaatgtttgacgcatatcattacgatgtacaactttatccaattgtccatgctctaataaaaattctgcagtttggaaatcatctggcaatttttcgtttattgtctgttcaataactcgacgacctgcaaaacctatcaacgcttttg

SEQ ID NO: 2466 - DNA, 210 bp, Staphylococcus aureus
tctacaaagatacatgttagttgatcacctattgctttatgcaatagtacagctacaacagatgaatctacgccgccactcatcgcacataatacacgacggtctcctacgcgttgacgaatcttttcaatttcgatttcgataaagttttccattgtccattgacctctacaatcacaaacacgacggacaaaattatttaataaatca

SEQ ID NO: 2467 - DNA, 404 bp, Staphylococcus aureus
gtttgataaataacttcaagatctgtttcagctaatacttgcaattcacttgaatcttcatctaatcgctctgcacgtaatttagtctgactaagcgattcttctccagtaatatatagtacttttttcttttgagataacgatgcacaaatttgtaaaagtaacgttgacttaccaatacctggatccccaccaataagtactaacgatccgctcacaatacctccacctaatacacggttgaattctgctgaatctgttaacactctcggcgttgtttcatgtttaatactatttaatttttgtactttacctgctaattccttggttttaactccatgtttaggattggctgctttttcaacaatttcctccatttgattccaagcgccacaattaggaca

SEQ ID NO: 2468 - DNA, 395 bp, Staphylococcus aureus; identical to SEQ ID NO: 2430

SEQ ID NO: 2469 - DNA, 156 bp, Staphylococcus aureus; identical to SEQ ID NO: 2457

SEQ ID NO: 2470 - DNA, 174 bp, Staphylococcus aureus
aattgctggaatttctaaagaacgactcataattgcagagtgacttgttcttccgccaatgtttgtagcaaaaccttgtacgaattctttatttaattgagcagtatcagatggcgttaagtcattccctacaataacaacgctttcatcaatcatactcggattcggtaattc

SEQ ID NO: 2471 - DNA, 278 bp, Staphylococcus aureus
gttcatcaagtaaaagaacgtttgcacttgataacatcattttacttagcatacaacgtactttttctccacctgaaagtacactagcttttttcttaacttcttctccactaaatagcatacggcctaagaagccgcgtaaaaatgtttcagtttgctcatcttctggtgcgtattgtcttaaccaatctacaaggttcatattaacgccctcaaagaattctgagttatctttagggaagtaacttaatgacgttgttacaccccatttatatgaa

SEQ ID NO: 2472 - DNA, 210 bp, Staphylococcus aureus
tatactgcaaaagtatgtccgatgaaattagggaaaattgtagaacgacgtgaccatgttttgattacttgtttcttttcgcttccttcttgagcttcaacttttttcattaaatgctcatcgacgaaaggtccttttttaatactacgagccatttgggcgcctcccttcttattatgtgcgtgcagctttaagccgcacacccaaata

SEQ ID NO: 2473 - DNA, 196 bp, Staphylococcus aureus; identical to SEQ ID NO: 2052

SEQ ID NO: 2474 - DNA, 343 bp, Staphylococcus aureus
tatgcataatcccgcctacctcttcagcatgctcctccaataagatatcgatacagtcttgagttgcttcacggttatgaatgataattggtaacttcaaacgcttagctaaagcaatttgctttctaaaaacttccttttgaacatctgcaggagatttatcccagtgataatctaatcccatttcaccaataccaatcacttttggatgctgagctaaagattcaatccattccaagtgttcttctgtaaaatcaattgcgtcaactggatgccaaccgataatgccatataaaaaatcatactcatcgattaatttcatcgcgcgttcaattgtcgattt

SEQ ID NO: 2475 - DNA, 225 bp, Staphylococcus aureus; identical to SEQ ID NO: 1665

SEQ ID NO: 2476 - DNA, 163 bp, Staphylococcus aureus
cgcttgtcatgtatcactcttcatctatcacatgtacagtttcttcaccgaaaagatcttttgctttttgagcaatatctgtttgttgtgcttgttgctttggcatatcatcgccttcgtttttacgattttgtaaatattccgttcgaactctttgccattg

SEQ ID NO: 2477 - DNA, 255 bp, Staphylococcus aureus
accatatcttcagttacatatacaggtacgtgtttacgtccgtcgtatactgcaaaagtatgtccgatgaaattagggaaaattgtagaacgacgtgaccatgttttgattacttgtttcttttcgcttccttcttgagcttcaacttttttcattaaatgctcatcgacgaaaggtccttttttaatactacgagccatttgggcgcctcccttcttattatgtgcgtgcagctttaagccgcacacccaaata

SEQ ID NO: 2478 - DNA, 171 bp, Staphylococcus aureus
gcttgagcttgtccagtgaaaccaccaccatgaacgttaactaaaacatcatagttacctttagtttcagttacatcaaatggttggtttaagtctaaaattaatgattcgaatggtaagtattcgcgtacgtcacggttattaactgtgatgttaccttcacctggtact

SEQ ID NO: 2479 - DNA, 379 bp, Staphylococcus aureus
gttattccgcatcttctgaagaagatgttccgaatatatccttagaaaggaggtgatccagccgcaccttccgatacggctaccttgttacgacttcaccccaatcatttgtcccaccttcgacggctagctcctaaaaggttactccaccggcttcgggtgttacaaactctcgtggtgtgacgggcggtgtgtacaagacccgggaacgtattcaccgtagcatgctgatctacgattactagcgattccagcttcatgtagtcgagttgcagactacaatccgaactgagaacaactttatgggatttgcttgacctcacggtttcgctgccctttgtattgtccattgtagcacgtgtgtagcccaaatcataag

SEQ ID NO: 2480 - DNA, 80 bp, Staphylococcus aureus
gtacctttgaccggccattgtttctacagcaatctttttgtttctagctaaacttgctacgacagattctttatccataa

SEQ ID NO: 2481 - DNA, 108 bp, Staphylococcus aureus
tgttacgtcaataacgtcgccagctacaaaagtatctactgagacttcttgacctacttcgtaagcatccacgtctacattgcggaattcacgaatgaagcgcttagg

SEQ ID NO: 2482 - DNA, 535 bp, Staphylococcus aureus
tatgaggtaagactttattccctgcttttatagattgtgcttttatttgtgtgccagaaccaatagtaactggttctaatgattttgcactcacattatcaatagctttttgtttgtcttgaccttcaacatctggcactttactatactctgcattagatgtgtcatcttttgatttacctacatttaaatatttcaaagtattttccattattggtttaaacgctttactaacacctaattcataagcttcttggtcatttttttgtgccaagctcataccagcgtatacaataactttaggatttttcttcggcgcgtcacccataaaacttacaaaatatgggtttggacctttaacgtatccaccaccattaggtgcagcgacttgtgctgtaccagtcttaccttcgacctcataaccatcaatacgatagtttgcagcgtgactcttcttactattcacaactaaatccaattgcttttcaactttttcagcagtatcttttgttattggtttgcctgcgatttgttt

SEQ ID NO: 2483 - DNA, 169 bp, Staphylococcus aureus
caaaccaagtgctctaccaagctgagctacttcccgtataattaacgcgcccgataggagtcgaacccataacctcttgatccgtagtcaaacgctctatccaattgagctacgggcgcatatgtttttattgaaaatggtgccgaggaccggaatcgaaccggtacgg

SEQ ID NO: 2484 - DNA, 306 bp, Staphylococcus aureus
aatttttcaacttcttcaattactttatcttcagtgatattaaaactttctaatacttttgcagcaattccttcaggttctttcattaaccccaataataggtgttctgttcctatatttgaatgatttaaacgaattgcttcttcttgggcatgtgctaatacgcgctgtgcacgctcagttaatctaccaaataacataaataatgacctcctactttatatgttctcttagtatatctgctcgtttttcttttacagatttgtcatcttcttcatctaataaaaatggtgactgtatagctac

SEQ ID NO: 2485 - DNA, 219 bp, Staphylococcus aureus
tgcataacttctttatcatctacaggtattgtttttggatcaattcctgataaatcttgaagcatacgaatcattgttggatcatcgtgtccaagtatatcaagttttaatacattatcatgaatagaatggaaatcaaaatgtgtcgtcatccatgctgaattttgatcatcggcaggatattgtatcggcgtaaaatcataaatatccatgtaatca

SEQ ID NO: 2486 - DNA, 282 bp, Staphylococcus aureus
caccttttttgatatgcatgtgggcacctccttatttgtattggttgttattaattaaagtacttctggtgctaatgatacgattttcatgaagttaccttcacgtaattcacgagcaacaggtccgaagatacgagtaccacgtgggcctttgtcatcacggatgataacacatgcattttcatcaaatttgatgtatgaaccgtcattacgacgaacacctgacttagtacgtacgattacagctttgacaacgtcaccttttttaacaacgccacctgg

SEQ ID NO: 2487 - DNA, 153 bp, Staphylococcus aureus; identical to SEQ ID NO: 2343

SEQ ID NO: 2488 - DNA, 189 bp, Staphylococcus aureus
taatgcacgaccatttgctgcatatgggaatttagaagctttaattgctaaaccttcttctttagcttgcgcttctgaataaccaactgtagctaattctggttcagtaaagcatactgctggcataccaatgtaatcaacttcagcagcttgaccatcaattgcttcagcagcaactttagcttcata

SEQ ID NO: 2489 - DNA, 937 bp, Staphylococcus aureus
ctttttttaaaatttaaggctgctacgtttagttcaaatgattatgaatgacatttcatggtatcatccagcctcagtacttggagataacattttggcggtgagacagaaatcatatttttacaaaatttatttcgtcgtcccaccccaataaagaaaaagtatttctttattgttgtgtaacttctccacgttgtatttcactatccaaattttgtttcatattttcaaacaactcttgaaatctaacctcatcttgatcagaataacctttaaaaataactgaatctatattttcctcgttaaaataataaatttcatcttctacaacaccaatcggatatttacatgcagaatagtcaaacatatacttttgattttcaatttctacaattggtcctctattaataatcattaacttttgcgaaccttcttttaaataaataatgcttcctattgtttccatttattttcctcctttgtcaccgtctcaatttcaacattccttcgcatttccaagtcaatcatctcttcttccactttacgaatgccatgttgaatttgctgttgctgctcgtataacgcttccgttgaacgtcgtttcgcaaaatgaaattcatcgcggaactgttccatacgactagccatattgctactataataacgctcacctaaatgttgatataattgatctatcgaatgattaagcgcatcactttcatctatcaatgctttaacctctcgcttttcatcatataagtcatccatttgctcatgtttcgctgtgattattttattgatttcatccagtttattcgacatcatttcaccactgttttaatttttaccaatttcattaccaatcattacgtcagtttggtcaaaagcctcaccaactttttgtatattatcgctcgcagttcgtattgcttcagca

SEQ ID NO: 2490 - DNA, 143 bp, Staphylococcus aureus
ttcttcatctgatgattgttgtatatcttcttcaacacgatccatgaaatcttgtcttacttcaatacgtccatcttcatcattttcttctgaatcaatcacttcagtatgaattgcatttcctggtgtttcatcatttacaa

SEQ ID NO: 2491 - DNA, 255 bp, Staphylococcus aureus; identical to SEQ ID NO: 2477

SEQ ID NO: 2492 - DNA, 262 bp, Staphylococcus aureus; identical to SEQ ID NO: 1869

SEQ ID NO: 2493 - DNA, 219 bp, Staphylococcus aureus; identical to SEQ ID NO: 2485

SEQ ID NO: 2494 - DNA, 87 bp, Staphylococcus aureus
gtatcaagtgctccacgtacaatatggtaacgcacacctggtaagtcttttacacgtccaccacgtacaagtacaacactgtgttct

SEQ ID NO: 2495 - DNA, 169 bp, Staphylococcus aureus; identical to SEQ ID NO: 2483

SEQ ID NO: 2496 - DNA, 219 bp, Staphylococcus aureus; identical to SEQ ID NO: 2485

SEQ ID NO: 2497 - DNA, 169 bp, Staphylococcus aureus; identical to SEQ ID NO: 2483

SEQ ID NO: 2498 - DNA, 262 bp, Staphylococcus aureus; identical to SEQ ID NO: 1869

SEQ ID NO: 2499 - DNA, 219 bp, Staphylococcus aureus; identical to SEQ ID NO: 2485

SEQ ID NO: 2500 - DNA, 145 bp, Staphylococcus aureus
ctgttcctttttgcttccatggtttacgtccgccaccgcttactgctgaacgattcttaacagcatgcgtaccttgacgtaatgaagcacgttgtaaattaatagcttcgaataaaacgctattatttggctcaataccgaatac

SEQ ID NO: 2501 - DNA, 379 bp, Staphylococcus aureus; identical to SEQ ID NO: 2479

SEQ ID NO: 2502 - DNA, 87 bp, Staphylococcus aureus; identical to SEQ ID NO: 2494

SEQ ID NO: 2503 - DNA, 189 bp, Staphylococcus aureus; identical to SEQ ID NO: 2488

SEQ ID NO: 2504 - DNA, 225 bp, Staphylococcus aureus
ccttgaataataccaccagttggaaaatcaggacctttaatatatttcattaattgattgactgtaatatccggattatcaatatatttaagtgttgcttgaatcacttcagctaaattatgtggtggtatatctgtcgcgtaacctgcagatatacctgtagaaccattcactagtaagttaggaaatcttgatggcaataccattggttcgagtgtcgtatca

SEQ ID NO: 2505 - DNA, 565 bp, Staphylococcus aureus
atacctggcttgttgtcacgatcaaatttaataataccatctgaatcagttactgcgcttttaatttttttagctgcaacattcggctcgtctaataatgaaatgaagtttttagcattatcatcactcttactcatttttcttgttgggtcttgtaaactcatgacacgtccaccaactttaggcatacgaatttcaggtttcacaagcacatcattatagcgactattaaatctatctacaaggttacgagtcaattcgatatgctgcttttggtcatctccaactggaacgatattagtattgtaaagaacaatatcagctgccattaaaggtggatatgttaatagaccagcaggtataccttcaactgctttctgagctttatctttgtattgcgtcatacgctctaattctccaacagaagcaatcgtagttaacatccatcctgcttgtacgtgtgcagggacttcagattgtatgaacaatgttgctttgtctggatctataccagaagctaaataaatcgctgctaattgtctggtctgtttacgtaattttaaac

SEQ ID NO: 2506 - DNA, 643 bp, Staphylococcus aureus
tgcgatttcacttaaagaataatcttcaagataaaataattccaaataattacgttgtttattcgtcaataaggattgataaaaatcaaacaaataattcattcgtaacgttttaactaaatcattttgacccatgattatcgtccttttcttctgttacaatttgatcattttcaactgttgttatttcttcattttgttcaatcatatcagcgaataagccgtagacataactttcagggttaaatggttgtaagtcatctaattgctcacctaaacctacatatttaactgggatgtgcaattcattacgaatggctaatacgataccacctttggctgtaccatctaatttcgttaatacaatacctgtaacatttgttacttctttaaagtttctagcttgtgacaacgcattctgaccagttgtagcatctaaacatagtaatgcttcatgaggcgcatctggcactgctcgattaattacacgcttaactttttctaattcttgcattagatttgttttattttgtaaacgtccagcggtatcacagattaaaatatcaacacctttgtttttagcggcattaatcgcatcatacataacagcagctggatcagaaccttcactttggctaattac

SEQ ID NO: 2507 - DNA, 148 bp, Staphylococcus aureus
tcccataattgcagatgataaagttgatttacctgtcccgtttggtcccataatcgcatgtatttcatcagtgttaattgtcaagttaacaccttttaagatttctttatcctcaatagacacatgtaggtctttgatttctaatgtt

SEQ ID NO: 2508 - DNA, 353 bp, Staphylococcus aureus
caacgacagcacctaaagattttaaagtttctacagcgttttgaactgcttcttttacgtcatcagctacaccttcacctaagtattctttaggtaatgcaacttttaatcctttaatatctttaccaatttcagatgtaaagtctacatcatcaactggtgcacttgtagagtcattaacatctgcaccagaaatagcttctaatacgattgcattatcttttacatttcgagtcaatggaccaatttggtctaatgaagatgcaaaagcaactaatccaaatcgagatacacgaccgtatgttggtttcataccgacaacgccacaatatgcagccggttgtctaattgaa

SEQ ID NO: 2509 - DNA, 426 bp, Staphylococcus aureus
ttgattgcatataatagtaaaaacattacatcttgaacagtaatcgttttgttaagcaatgtctctaatgaggccatacaagatggttcaatttcaggatatttaaatttagtcacttcaccttttaaagcatgttcataaaatgtttgcatcatcaatgcacgttctgaaccagagccttcaacacaaagataaatttgtacagcaataccgcctctaactcttcgttgcgatatgcctgcaaatttcttaccatcgatacttaagtcaaattttcctgggcaataagaatgttcaatttccatcgtatcaatatcaacattctcattttcgaacattttgctaattaagaggtacatcacagtaaacgcttcatcaatcgttgtttctgtttgtcctttgaacatcagcgatatatttaataca

SEQ ID NO: 2510 - DNA, 352 bp, Staphylococcus aureus; identical to SEQ ID NO: 1837

SEQ ID NO: 2511 - DNA, 200 bp, Staphylococcus aureus
tactttttctgtccctggtgctaaatcaggattaaatttacgttctttctcgaatggaatctcttctttttctacaatcgagtctccttttacaggtccatattttgttacgctatcgaccggtggtctaactacatctcctgtttctggattcttaattcctggtttacctggaacttcctctttctctcctgttggta

SEQ ID NO: 2512 - DNA, 197 bp, Staphylococcus aureus; identical to SEQ ID NO: 2442

SEQ ID NO: 2513 - DNA, 371 bp, Staphylococcus aureus
tacattgtctactgctgagaattcatgtaaaactccctcaatttcaatatacttaacggctgcacctggtaatgaagatagtaggatacgacgtaaggagtttcctagtgtagtaccgtagccacgttctagtggttcaacaacgaacttaccgaatttagcatcttcactaatttcaattgtctcaattctaggtttttcgatttctatcatttaaatatcctccttatatacgtcgacttaatttaaaatgtttgctcagtgacctgtaacaataccatcataaattatacacgacgacgttttggtggacgacaaccgttatgaggtactggagtaacgtctctgatcgcagttacttctaaacctgc

SEQ ID NO: 2514 - DNA, 99 bp, Staphylococcus aureus; identical to SEQ ID NO: 1817

SEQ ID NO: 2515 - DNA, 136 bp, Staphylococcus aureus
ctgctgaatgatgctattgattttctcatgagacatggcgataacatcgtgttcaatcggtgaatgcaatgtcatagggcttggtccatacacctttccaaaatttaaaatggcttgatttgaaaaacgaccagca

SEQ ID NO: 2516 - DNA, 134 bp, Staphylococcus aureus; identical to SEQ ID NO: 1873

SEQ ID NO: 2517 - DNA, 385 bp, Staphylococcus aureus; identical to SEQ ID NO: 2164

SEQ ID NO: 2518 - DNA, 386 bp, Staphylococcus aureus; identical to SEQ ID NO: 2242

SEQ ID NO: 2519 - DNA, 148 bp, Staphylococcus aureus; identical to SEQ ID NO: 2507

SEQ ID NO: 2520 - DNA, 138 bp, Staphylococcus aureus
atatcgggaagacaggattcgaacctgcgaccccttggtcccaaaccaagtgctctaccaagctgagctacttcccgtataattaacgcgcccgataggagtcgaacccataacctcttgatccgtagtcaaacgctc

SEQ ID NO: 2521 - DNA, 130 bp, Staphylococcus aureus
tcattagaaacgccttgttgaccttctaagattgcatctgccattttagcagttaataatttaaccgcacggatagcatcgtcgtttgctgggataacgtagtcaatttcgtcaggatcacagttagtgt

SEQ ID NO: 2522 - DNA, 270 bp, Staphylococcus aureus
agcaattttgaaggccatttcagatgaatcgacatcatggtatgaaccatcatataatttagctttaacatcaattaaaggataacctgctaaaacaccattttccatagcatctttaagaccagcttctactgatggaatgtattcacgaggaactacaccaccaacgatagcgttttcgaattcgaaacctgcgcctgtttcgtttggtgtgaattcaatgtgaacatcaccgtattgaccacgaccaccagattgacgagagaattt

SEQ ID NO: 2523 - DNA, 85 bp, Staphylococcus aureus
ttttcaatgctaattgtttaatgttcataataattgtagaaacatcttcaactacattgtctactgctgagaattcatgtaaaac

SEQ ID NO: 2524 - DNA, 98 bp, Staphylococcus aureus; identical to SEQ ID NO: 2455

SEQ ID NO: 2525 - DNA, 279 bp, Staphylococcus aureus; identical to SEQ ID NO: 2383

SEQ ID NO: 2526 - DNA, 392 bp, Staphylococcus aureus
taccttcaataacagtaatatacatgtcgtccactttatcaatcatttcttcaaataatgtttgccctccaaatatgaaaacatggcccggtagttggtaaatatcttcaatagagtgaattacatcaacgccctctacgttgaaacttgtatctgaagtaagtacaacatttcgacgattcggtagtggtttaccaatcgattcaaatgtcttacgacccattactaaagtatgacctgttgataattttttaacatgcttcaaatcatttggtaggtgccaaggtaattgattttcaaaaccaattactcgttgcaagtcatgtgcaactagaatggataaagtcataattatcctccttcttctatcatttcattttttattactaagt

SEQ ID NO: 2527 - DNA, 299 bp, Staphylococcus aureus
tgcatcaactgcttctttaattttcttagttaaagaaactgtttctggtgtcgtatttgcaccttttgtctttgtttcattaatttggaaaccattagttcctaaatatgcactatttttttgtaactttctttgaattaaatgaatcatcgtcgcaatagaagttttaccatttgtacccgttacaccaaatgtcactaactgatgactcggataatcatataatgtgtgtgctagaatactagctactcttaatgtgtccggcacaaccacttgtgttacgttagctggaaagcttg

SEQ ID NO: 2528 - DNA, 420 bp, Staphylococcus aureus
tttttttattcacaaaaaaactctcttcatcatgtcaacaaaaactacaacatgattatgaagagagctttaatttatatcatctgtatgagtactttatacaatttcaattatacaagtgattttacaacttgttggcatcgtggacatagatgcgtcaattcatcaacagcaccaagatcctctgaatagttccaacatctttcacatttttcaccatctgcatgttcgatgacaatatcaccatgttcataagctgttgcctgatcgtctaacttatctacaactttaacttgtgacacgataaataattgatgtaatgcatcaaatgaagttaagaattcagatgcattaaatttatcgttactagcaatcgtaactttagcttctaatgatttaccaataactttttcattacga

SEQ ID NO: 2529 - DNA, 229 bp, Staphylococcus aureus; identical to SEQ ID NO: 2214

SEQ ID NO: 2530 - DNA, 85 bp, Staphylococcus aureus; identical to SEQ ID NO: 2523

SEQ ID NO: 2531 - DNA, 413 bp, Staphylococcus aureus
taaataatctgtaggctttacttcttgtgctactttagatgcaacataaccaatattgccggataatcttccagttaagcgactttttttaaacatatctccaattagagaagtaactgtcgttttaccatttgtacccgttacagctatgattggtgcttcagagattagataacttaactcaacttctgttaaaattttcaaacctcgtttcactgcttcatcaataatagatactgtataaggtattccaggatttttaacaattattggattattatcaagcaacgttaatggatgacttccacttacaacagaaatgcccatagattctaaatcttttgcatgagcatcttgtgataagtcttttccatcattgacagttacattcgcacctaatttacttaataatt

SEQ ID NO: 2532 - DNA, 244 bp, Staphylococcus aureus; identical to SEQ ID NO: 2212

SEQ ID NO: 2533 - DNA, 136 bp, Staphylococcus aureus; identical to SEQ ID NO: 2176

SEQ ID NO: 2534 - DNA, 200 bp, Staphylococcus aureus
ttctattcttcttcagtcgtaccttctgctttaccttctttagcaacagtacctttttccaatgctttccaagctaatgtggcacatttaatacgagctgggaattgagatacaccttgcaatgcttcaatatctcccatttcttctgtaatcacatagtcttcaccaagcatcattttcgtaaattcttggctcatttg

SEQ ID NO: 2535 - DNA, 157 bp, Staphylococcus aureus
gcttctttttccatagtttctaaatcgtctgcaaatacttcaaatgaaattgaagcatctggaatttctttcacagcttcttcagcaaaagctttgtaatctgttacgcccgctttagccattaaactaggatttgttgtaaaaccatccacttgtt

SEQ ID NO: 2536 - DNA, 219 bp, Staphylococcus aureus; identical to SEQ ID NO: 2255

SEQ ID NO: 2537 - DNA, 204 bp, Staphylococcus aureus
tgtttaactgattctgctgattctactgactccgaagtgatgtcatgatcttcatcatgattagattcagtttgattacctatgtgatgttgaggttctgttttttcagtaccttcatgaatgcttggttcgtcagccactgtattttcagtatcatttttagcaacaccaaccgttgatgcagtagctacacctgttttttca

SEQ ID NO: 2538 - DNA, 175 bp, Staphylococcus aureus
atctatatcactccataaaagtgacctagatggctttattgtttgagtcgaatttgactcatacatagctttgtttaaatgctgattaacgaatttcttggattctagcagctttaccacgtaaactacgtaagtaatataatttagcacgacgtactttaccacgacgtttaac

SEQ ID NO: 2539 - DNA, 159 bp, Staphylococcus aureus
atttcaccacgagcgatttgcgcttcacgttcagcttctaattcttcttctgtcatatagcatttatatgctttatcttctgctagtaactgatctattaatggttggtagatatgttgacgttcagattgacgatatggtccgtagccattgtcttta

SEQ ID NO: 2540 - DNA, 361 bp, Staphylococcus aureus
ttctttcgtatcttcaattgttgtatgatcgctaacagcaccagttacaataccttttgtagaatcttcgtcaaattcaactaggttagactcagtagtaacctgaccaccacctgggtttgtatcttcttcatattcaacaacatcagcatgatgttttgaattttcatgtgtcgattcttcaaagtctacatgaatagaatcttcttcagtttcaatggtaccttctgcatgaccttctgcaccttcaacagctgtatgatattcaaaatcaattggcttagaatcattactttcttcgattgtaccagtcaattcatgcttctccactggcggctctgatttaaattcaagttcgata

SEQ ID NO: 2541 - DNA, 193 bp, Staphylococcus aureus
aaatcataaggggcatgatgatttgacgtcatccccaccttcctccggtttgtcaccggcagtcaacttagagtgcccaacttaatgatggcaactaagcttaagggttgcgctcgttgcgggacttaacccaacatctcacgacacgagctgacgacaaccatgcaccacctgtcactttgtcccccgaagg

SEQ ID NO: 2542 - DNA, 147 bp, Staphylococcus aureus
tggagttggtccgaatacgataccaccgccacgccattgtggagcacggattgtaccttgacgagcacgacctgttcctttttgcttccatggtttacgtccgccaccgcttactgctgaacgattcttaacagcatgcgtaccttg

SEQ ID NO: 2543 - DNA, 307 bp, Staphylococcus aureus; identical to SEQ ID NO: 2020

SEQ ID NO: 2544 - DNA, 214 bp, Staphylococcus aureus
caagtgttcagtcattatttttgctgctaatgaaactgattcttgtggtgtgattgaaccattagtccaaacatccaatgttaatttatcaaaatcactgctttgacctacacgtgtattttcaacagtatagttcacacgttcaacaggtgaatacaatgaatcaacagggattacaccaattggtaaatcactagtattattttgttctgct

SEQ ID NO: 2545 - DNA, 148 bp, Staphylococcus aureus; identical to SEQ ID NO: 2507

SEQ ID NO: 2546 - DNA, 387 bp, Staphylococcus aureus
tgccaaacctccccgtcgatgtgaactcttgggggagataagcctgttatccccggggtagcttttatccgttgagcgatggcccttccatgcggaaccaccggatcactaagtccgtctttcgaccctgctcgacttgtaggtctcgcagtcaagctcccttatgcctttacactctatgaatgatttccaaccattctgagggaacctttgagcgcctccgttaccttttaggaggcgaccgccccagtcaaactgcccgcctgacactgtctcccaccacgataagtggtgcgggttagaaagccaacacagctagggtagtatcccaccagcgcctccacgtaagctagcgctcacgtttcaaaggctcctacctatcctgta

SEQ ID NO: 2547 - DNA, 137 bp, Staphylococcus aureus
catctgtgtttggcgatgaagcaatttgtgctggttcagctacattcgcaatcacttgtggttgacccttaatctgctcagctaattttactaacaacacttcaaaatgaacgttttgattcacactaaaacgaatc

SEQ ID NO: 2548 - DNA, 312 bp, Staphylococcus aureus
caactttattatttggtaatgcagcattttgtatttcagttgtatcaacttctaattccgtaccatttagtgatgccttaatatttaaatcttctaataaactcactaaagttttaacatcagagatttgcggtaacccttctaatttcacatgtccttgagctaataatgttgcaggaatgatagctacagcactgtttttcgcgccactgatattaacttccccatttagtgtgcgtccacctcttatttttattacctcttgagccatatcatttatctcctttgtccattactttttaattttttgca

SEQ ID NO: 2549 - DNA, 193 bp, Staphylococcus aureus; identical to SEQ ID NO: 2541

SEQ ID NO: 2550 - DNA, 165 bp, Staphylococcus aureus; identical to SEQ ID NO: 2248

SEQ ID NO: 2551 - DNA, 147 bp, Staphylococcus aureus
agtgtgtgagatactaacatgtacgataaacccttcgtaatcaatctttggtttgccaagttcgtcgttgtaacagtctatatcgttaaaagctacatgttttcctaagcctgtgcctaatgctttactgaacgcttcttttgtagc

SEQ ID NO: 2552 - DNA, 134 bp, Staphylococcus aureus; identical to SEQ ID NO: 1873

SEQ ID NO: 2553 - DNA, 401 bp, Staphylococcus aureus
agcgaaggtagcaaatataatacgacctttacaattacggaagatcttatctacgttttgaccaacttcacgttcgcttaaagtaaaatcaggcacaagtgaatttgttgagtctgaaagtaaacatagaacgccttcttcgcctaattgagccattttagcaatgtttgctggtttgcctacaggtgtaaaatcaaatttaaagtcaccggtatgaactacttttccttcaggtgtatctacgatgacgccataagtttcaggaatactatgtgtagttaagtagaaagaaatcgtaaagtgcttagatttaatcacactgtcctcattgatttcatttagtttagcagtacgtaataaatgatgttcttcaagtttattacggattaaacctaatgcta

SEQ ID NO: 2554 - DNA, 140 bp, Staphylococcus aureus; identical to SEQ ID NO: 2161

SEQ ID NO: 2555 - DNA, 157 bp, Staphylococcus aureus; identical to SEQ ID NO: 2535

SEQ ID NO: 2556 - DNA, 149 bp, Staphylococcus aureus
cttgagtgacttccatttgtcgttgctttgtatctacaggatttacactaatgctatttactttgactaagatatcatcgttttctggcgttggctttctttgttcgtatactttaaataaatttccttcttccaatttaaagggcttc

SEQ ID NO: 2557 - DNA, 214 bp, Staphylococcus aureus; identical to SEQ ID NO: 2544

SEQ ID NO: 2558 - DNA, 254 bp, Staphylococcus aureus
tgattattttgttcatataatgagaccgaatagccactttgtgccattcgaattgctgcagaaatcccacctaagccaccaccaataacgatgatatgtttagtcatgacgttcacctcttcgttttaatatgcgtagtaactgcgttaatctcggtcgattatagcgttgcacaataatgattggaacattagctatcattgcatagaaaatatttatatactttactaaacgagggcctttattgaatatga

SEQ ID NO: 2559 - DNA, 172 bp, Staphylococcus aureus; identical to SEQ ID NO: 2352

SEQ ID NO: 2560 - DNA, 401 bp, Staphylococcus aureus; identical to SEQ ID NO: 2553

SEQ ID NO: 2561 - DNA, 140 bp, Staphylococcus aureus; identical to SEQ ID NO: 2161

SEQ ID NO: 2562 - DNA, 193 bp, Staphylococcus aureus; identical to SEQ ID NO: 2541

SEQ ID NO: 2563 - DNA, 565 bp, Staphylococcus aureus; identical to SEQ ID NO: 2505

SEQ ID NO: 2564 - DNA, 307 bp, Staphylococcus aureus; identical to SEQ ID NO: 2020

SEQ ID NO: 2565 - DNA, 308 bp, Staphylococcus aureus
tacctacaccagataacgtaccaccagtaccaacaccagctaggaacgcatcgatagttttcccttcaaattgttgtaataactcaggacctgtagttaactcatgaacttcagggttcgcagggttttcaaattgttgtggctcgaagtaaccatgttcttctttcaattctttagcttttttaattgcacctttcatcgcttctgatccaggcgttaaaactaattccgcaccgtatgcttttaataaattacgacgctcttggctcattgtttcgggcatagtaaatactgctttatatccttta

SEQ ID NO: 2566 - DNA, 227 bp, Staphylococcus aureus
taacgtatgaaccagatgtcattgtacctgaatacacacggaagaatgttaatttaccaacataagggtcagtcataactttgaacgctaatgcagcgaattcagctgaatcgtctgctttcgcgattacttcttcttcagggttgctagcacggtgaccaataattggtttaacgtctagtggtgaaggtaagtaatcaattacagcgtcaagcattaattgaaca

SEQ ID NO: 2567 - DNA, 254 bp, Staphylococcus aureus; identical to SEQ ID NO: 2558

SEQ ID NO: 2568 - DNA, 546 bp, Staphylococcus aureus
tgtacgttcataagcactaattcctgttgttgtatctacatgatcaatactcactgtaaattgcgtaccaaagatgtcggagttatcatcaaccatttgtaccaaatccaaacgttgtgcaatatctttagacactggtgcgcatattaatccccttgcttctttcgccataaaattaatggtattatcgttcatccattcagtaaccgctactaaatcaccttcattttcacgattctcatcatctactacaataattggttctccattttttaaagccattaaagcactgtcaatattatcgaattgcatgctacccctcctaaaaaccaaatgctcttaatttatctacagataattggtctttatctttatttaaaatattttcaacatatttaaacaaaacgtctgtttctaaatgtactttatctcctaattttttggatgataaaatcgttgaacgcctcgtttctggaataagatgaatgtcaaaactgttatcatgcttatcaaataccgttagactaacaccatccacagtaatag

SEQ ID NO: 2569 - DNA, 236 bp, Staphylococcus aureus
tgcttcgcttcaccaaactctgttgttttttcacgttcaatattatcttcaacttgtactacagattttaaaatgaatttacaagtatcttcttcaatattttgcatcatgatatcaaataattcatgaccttcattttgatagtcacgtaatggattttgttgtgcataagaacgtaagtgaataccttgacgtaattgatccattgtgtcgatatgatcagtccaatggctatc

SEQ ID NO: 2570 - DNA, 538 bp, Staphylococcus aureus
ggccttgcctgttcaaataatgatttatccatattattactcgcctttacttttgttatgctcatttagcattttttgataataatactcatattgatctgtaataagttctgatccaaaacgttcagcaatatctgctagcatgtttttctgaagtttgttgtataacaccttatcttcaagtaatcggatagcatagtcactcgctgaatcacaatcacccacatctacgacaaatccagtttcaccatgtttaataacctctttaattccaccggcatttgaaccaattggaacgacgcctgttttcatagcctcaagtaaagttagtccaaagctttctttttcacttaataataatactaagtcagataattggtaaaattcacttacgcaatcttgtttccctaaaaataaaacatcctcttctacgtttaactctttcgtcaattgacgcattggcactaattcaggaccatctccaagtaaaattaatttactaggtatcttttcacgtacttttgcaaatgtttctata

SEQ ID NO: 2571 - DNA, 239 bp, Staphylococcus aureus
atcaatatcgcttaattcttttttactacgtttcaaagccttttctacagcgccaactggtgcaatacccataatagaaggatctacaccatgacttccaaagccatcaagcactgccaatggttcgatatttaattctttagctttgtcttctgacatgactaacatcatcgcagcaccatcattgattcctgatgcattacctgctgtaactgtaccgtcttttttgaaagctggtc

SEQ ID NO: 2572 - DNA, 546 bp, Staphylococcus aureus; identical to SEQ ID NO: 2568

SEQ ID NO: 2573 - DNA, 517 bp, Staphylococcus aureus
tggtggttgtataaaatctggattttggtcatagaactctaataaacggtctgtatatttactaatattaaagaaataactttcttctttaactagttcaacttcgtgtccagaatctggacttttgccaccaataattttaccgttttcgtattgtgggtctactaattgtgactctgtatagtatgtttcatccggaacagaataccaaccttcatattcacctaaatagatatcaccttgctttaataaacgttcaaacacttgctcaacgacatgtttatgacgttcttcagttgttctgataaaatcatcatttgaaatttcaagcttagcccacaattgtttaattccagcaatcatctcatccaaatattcaatttctgtcttaccagctttttgagctttttcttgaattttttgaccgtgttcatccgttccagtcaaatagcgaacatcatatccttgcattctcttatatcttgcaataacatctccagccactgtagaatatgca

SEQ ID NO: 2574 - DNA, 109 bp, Staphylococcus aureus; identical to SEQ ID NO: 1797

SEQ ID NO: 2575 - DNA, 121 bp, Staphylococcus aureus
accatagaatgccgcttcaccaatcgcttcttcgtacgataagccaagctcatccgctgcctctttaagcatattttcagctttattccacatatcatcatcatcaaagtacttttcttta

SEQ ID NO: 2576 - DNA, 311 bp, Staphylococcus aureus
tctttttcttttttacctagatccatatagcgagaatacatgtcttttacagtatttcgaatgcttgttttatctttaatcatcgtgattaaatcaaagtctgacgcacgaattgtaaagtaagatgcatagtaataaagtggatgatgtactttgaaatatgcgatacgtactgccattaaaacgtatgctgctgcatgggctttagggaacatgtacttaattttaagacatgaatctaaataccaatctggcacttcattttctttcatcgtttcaatcatttcttcagttaaacctttacctttacg

SEQ ID NO: 2577 - DNA, 279 bp, Staphylococcus aureus
ggcttgactcgcaggcattctttcactcacagcttgcttactttgtacaggctttaattcaggcacattgacttttgaatgctttttacgatccatcatacgctttttatcagatggcgtcatgacaacattaaatggtcttttacttaaagttgaaaccttttcagtctgtttctttggatttacgttttcaatagttttctcttcgacattttgttcactttcagctgcttcgttttgcacattttctgtaatttctgcgttattcttttctatttc

SEQ ID NO: 2578 - DNA, 206 bp, Staphylococcus aureus
tctcatgatagtttctcaccatcatgagaaattatttatagcgatgcaaaaagaattttacaattcttttataatgcattcaccccaaaaaatcaaactataaagatgatagcttacatttaagctcaccttgtattttaacctaggctagctagtcaaaacaagttatattattcacctttatttttcttgataatatcttcagc

SEQ ID NO: 2579 - DNA, 270 bp, Staphylococcus aureus; identical to SEQ ID NO: 2522

SEQ ID NO: 2580 - DNA, 80 bp, Staphylococcus aureus; identical to SEQ ID NO: 2480

SEQ ID NO: 2581 - DNA, 251 bp, Staphylococcus aureus
gctgtcattgttcttcccattgcagcagatgctgtcggccatgtataatgtctcgtttgtgcttcttgaacagtttcagttgtcaaagcagcataagccctaatctctccatcaaatgctaatgctttaacaatataatcgtgtgtcattatttcaatctcctctattactctatatttaaaaaattactttacttcataaaatgcaacaattgtacttattctacacccatcattctaaataatgaagta

SEQ ID NO: 2582 - DNA, 548 bp, Staphylococcus aureus
taaaaagattacctcaccgtttgaacctgttagtgtagcgatacctaagtcaccatgttgcaataattcatttattgatgcagttccttttaataatcctgccattaatgtgcctaatgtaccatgttggtataaaacattagtcataaaatctcccactcctctttaacatttatctttattttagttaaatacgtcaggtaacatatttgttgaaagtttgatattatctttgtaatttacaggtatatcaattaatactggaccatctgtttcatagccctctttaattgccgcttctaattcttcttgattagtaactcgtaaacctttcgcgccaaatgattctgcatattttacaaaatctacaggaccgaagtctacacctgacgaacgtttatatttcatttcttcttggaattcaaccatgttatattttccatcattccaaataagctggatgatatttaaatttttacgtacggccgtttctaaatcttgtgatgaaaataaaaagccaccatcgccagcaacggacacaacttgcg

SEQ ID NO: 2583 - DNA, 547 bp, Staphylococcus aureus; identical to SEQ ID NO: 2378

SEQ ID NO: 2584 - DNA, 269 bp, Staphylococcus aureus; identical to SEQ ID NO: 1671

SEQ ID NO: 2585 - DNA, 153 bp, Staphylococcus aureus
catcgaaccagatgtactcgcacttgttgagtctgatgttgaatcactaacactatcagataatgacgttgaatcactcatacttgttgatgtacttgtcgaaagcgacatactttgtgaatcactagtacttgtacgcatcgaagtactagt

SEQ ID NO: 2586 - DNA, 251 bp, Staphylococcus aureus; identical to SEQ ID NO: 2581

SEQ ID NO: 2587 - DNA, 124 bp, Staphylococcus aureus
tttagaagttgcattgctagaagtatttacgcttgttccgaatccagtgctaccagatttacgaccatgtgatgttggtttgtcatcaaaaccagttgcaataactgttacaacaatctcatct

SEQ ID NO: 2588 - DNA, 173 bp, Staphylococcus aureus
attctagttttatattggcgatcagttagctgaccactagtaactttatcgaagacaggtaacgttgatggaatatcgtcgtatccatatatacgtgcaacttcttcaattaaatcttctttaattgtaatatctttacgacgtgatggtactagcactgtaataacatcatc

SEQ ID NO: 2589 - DNA, 147 bp, Staphylococcus aureus; identical to SEQ ID NO: 2551

SEQ ID NO: 2590 - DNA, 270 bp, Staphylococcus aureus; identical to SEQ ID NO: 2522

SEQ ID NO: 2591 - DNA, 472 bp, Staphylococcus aureus
  misc_feature (1)...(472): n = A,T,C or G
tanatttaatagcaataatatcttcttcggtaaaataatggcgacagcagtgtttcagtatcgattaatgaaccataaacctttaggcatagacanagctccttaacttacgattcctttggatgttcaccaataangcgaacttcacgatcttaattcaatgccaaatttntctttgacggtcttttgtacataangaataaggtnttcataatcngtagcagttccattgtctacatttaccataaaaccagcgtgtttgggngaaacttcaacgccgccaatacggagaccttgcanattagaatcttgnatcaatttacctgcaaaatgaccaggcggccttttggaatacactaccacatgaaggatactctaaaggttgtttagattctctacgttctgttaaatcatccattttagcttgtatttcagtcattttaccaggagctaaagtaaatgcagcttctaa

SEQ ID NO: 2592 - DNA, 190 bp, Staphylococcus aureus
accgcaataatgcgctgttgtttatccaatacgattggcatttgatcccgaacccactgtggcactttacaatctataaacaggcgattcactttcttataaccatcgcgcccattcagtttaaatgtatcgccactttgtcgtgttctcactgtaagcggaaataaacattttggtaaattagaatgta

SEQ ID NO: 2593 - DNA, 309 bp, Staphylococcus aureus
aattaattcatcttcgtcaaagtcaggccataatttttgattaaagataaattcactatacgaaacttgccaaatcaagaaattacttattctttgttctcctgaagtacgaattaacaactctggatcaggatagtcttttgtcattaaatgattgtttatatatgtttcatctatgatatcactatttaaaccttgttgatgaagctcgtcaaacatatttttaatactatgaacaagttctgctctgccaccataattaattgcaaatattaattttaagccggtattattagctgtcttttcttt

SEQ ID NO: 2594 - DNA, 546 bp, Staphylococcus aureus; identical to SEQ ID NO: 2568

SEQ ID NO: 2595 - DNA, 262 bp, Staphylococcus aureus; identical to SEQ ID NO: 1869

SEQ ID NO: 2596 - DNA, 124 bp, Staphylococcus aureus
aacgctttgcgccaacttcttcagacatgtcttcactcctctaaccaaataataaatttttcaatgctgtaattcctaaatctaaggcatagaaaaagactaagaagaatataacagtagaaac

SEQ ID NO: 2597 - DNA, 124 bp, Staphylococcus aureus; identical to SEQ ID NO: 2596

SEQ ID NO: 2598 - DNA, 136 bp, Staphylococcus aureus
acctgttaagaattcatctaagccttcgataccagctttttcagctgcacgacgtaccatagtgtttttgtatactttatactcaacaccagcttcacgtaattgtgaacgtaagtcagtaacttcagctactgtt

SEQ ID NO: 2599 - DNA, 129 bp, Staphylococcus aureus; identical to SEQ ID NO: 1804

SEQ ID NO: 2600 - DNA, 163 bp, Staphylococcus aureus
gaataccttctgacacaagcgcgcgacatgctgcaaagttttgcgctaaaccaacggcagcaactacatgacctaattcttgtgctgactctacatttagtagctctaatgaagctttagcaattggtaatacttttgtaccaccgccaacgattgccaatgt

SEQ ID NO: 2601 - DNA, 201 bp, Staphylococcus aureus
tggttctcttccttttgatgctaaaacgacagtatccccaggctcagctatgtcaattgcatgttttatcccttctgcacgatcatcaaattcaatatagttttgatgtgttgcacctttggctaattctgccgttaacattttcgggtcatcatttgccggattatccggtgtgaaaatgacataatctgcacgacaggc

SEQ ID NO: 2602 - DNA, 370 bp, Staphylococcus aureus; identical to SEQ ID NO: 2377

SEQ ID NO: 2603 - DNA, 361 bp, Staphylococcus aureus; identical to SEQ ID NO: 2540

SEQ ID NO: 2604 - DNA, 643 bp, Staphylococcus aureus
  misc_feature (1)...(643): n = A,T,C or G
ggactcgaaccaccgacctcacgcttatcaggcgtgcgctctaaccagctgagctataggcccattaatttgaatgaacaaacattcaaaactgaatacaatatgtcacgttattccgcatcttctgaagaagatgttccgaatatatccttagaaaggaggtgatccagccgcaccttccgatacggctaccttgttacgacttcaccccaatcatttgtcccaccttcgacggctagctcctaaaaggttactccaccggcttcgggtgttacaaactctcgtggtgtgacgggcggtgtgtacaagacccgggaacgtattcaccgtagcatgctgatctacgattactagcgattccagcttcatgtagtcgagttgcagactacaatccgaactgagaacaactttatgggatttgcttgacctcacggtttcgctgccctttgtattgtccattgtagcacgtgtgtagcccaaatcataaggggcatgatgatttgacgtcatccccaccttcctccggtttgtcaccggcagtcaacttagagtgcccaacttaatgatggcaactaagcttaagggttgcgctcgttgcgggacttaacccaacatntcacgacacgagctgacgacaaccatg

SEQ ID NO: 2605 - DNA, 309 bp, Staphylococcus aureus; identical to SEQ ID NO: 2593

SEQ ID NO: 2606 - DNA, 380 bp, Staphylococcus aureus; identical to SEQ ID NO: 2465

SEQ ID NO: 2607 - DNA, 206 bp, Staphylococcus aureus
caggatctgcttctaataatgcacgagcgattccgtgacggatagcttgagcttgtccagtgaaaccaccaccatgaacgttaactaaaacatcatagttacctttagtttcagttacatcaaatggttggtttaagtctaaaattaatgattcgaatggtaagtattcgcgtacgtcacggttattaactgtgatgttaccttca

SEQ ID NO: 2608 - DNA, 287 bp, Staphylococcus aureus
gcccaacccttgggaccgactacagccccaggatgcgatgagccgacatcgaggtgccaaacctccccgtcgatgtgaactcttgggggagataagcctgttatccccggggtagcttttatccgttgagcgatggcccttccatgcggaaccaccggatcactaagtccgtctttcgaccctgctcgacttgtaggtctcgcagtcaagctcccttatgcctttacactctatgaatgatttccaaccattctgagggaacctttgagcgcctccgttacctttta

SEQ ID NO: 2609 - DNA, 211 bp, Staphylococcus aureus
ctgtcgcaataacaggtatacccgctgtgtcacctgctgtattaaacgttgataaatttcatgtaatgtttcagtatctctaataagctctctatcaattaaatcttgataaagtgccggtggttgaatttcaataaaatcataatatttggcaattttttcaacttgactctggtccttctgcataactgccgtaaataattcaccttca

SEQ ID NO: 2610 - DNA, 260 bp, Staphylococcus aureus
tgcataccaaactcaacatgcttttcaatccattcacgtctaggttgtactttgtcacccattaatgttgttacacgtttagatgaacgcacttcatcttcaacttgtacacgaattaaagttcgtgtttctgggttcatcgtcgtttcccataattgttcagggttcatttcacccaaacctttgtaacgttgtaacgtgaagcctttaccaagttctttttgcaatttattaagctcttcgtctgtccaagcgtattc

SEQ ID NO: 2611 - DNA, 761 bp, Staphylococcus aureus
  misc_feature (1)...(761): n = A,T,C or G
tattcgcaacagttaatttgggctttacaaattttgctaattcataagcaatacctttacttgcaccacctgcgcccaaaattaaaatgtatgcattttctaaatctggataaacgctgtgcaatcctttaacataaccaataccatctgtattataccctatccacttgccatcttttatcaaaacagtgttaactgcacctgcattaatcgcttgttcatcaacataatctaaatacggtatgatacgttctttatgaggaattgtgatattaaagccttctaattcttttttcgaaataatttctttaattaaatgaaaatcttcaattggaatatttaaagcttcataagtatcatctaatcctaaagaattaaaatttgctctatgcataacgggcgacaaggaatgtgaaataggatttcctataactgcaaatttcatttttttaatcaccttataaaatagaatttcttaatacaacatcaacatttttaggaacacgaacgattactttagcccctggtcctatagttataaagcctagaccagagatcataacatcgcgtttctctttgcctgtttcaagtctaacagcctttacctcattaagatcaaaattttgtggatttccaggtggcgttaataaatcgccaagttgattacgccataaatcattagcnttctccgttttagtacgatgtatattcaagtcattagaaaagaaacaaactaacggacgtttaccacctgatacata

SEQ ID NO: 2612 - DNA, 181 bp, Staphylococcus aureus
tggtaaatagcccaatttcattgcactatttcctaatccttttccaaatacgccaccgttacctatcgcaagcaatgaattggaaatatggtatccagttcctgattcgaattggaatggatctgttagcgtactaaatctggcagttaaataacttggtaaccaaccagccattaatgca

SEQ ID NO: 2613 - DNA, 220 bp, Staphylococcus aureus
tagttagtagcgtgaatttcttcgctttaaccgataattcgccagtatttgttttgaacattacaccttcaacaccaacgatatcgcctaaatcagcatttttccataaatcaaattcgtcatcgccaacttgatctttacgaacgtaaatttgaatttgtccagctaagtcctgaacgtgtgcaaatcctgctttacctttaccacgcttagtcattaa

SEQ ID NO: 2614 - DNA, 272 bp, Staphylococcus aureus
gcagtggtaaaccaattaaatcggcatcattaaatttaacacctgcacgttcctgacgatcatcgtacaacacatcaaatttagtattaaattcagcatatagtgcatctgctagttctcgttgatcatctttcttaggattaatagaaattaaatgtaaatcaaacggagtaactgatttaggccaaacaattccattatcatcgtgattttgttcaacaatcgcacttagcgttctagaaattccaattccgtaacaacccataattaaa

SEQ ID NO: 2615 - DNA, 614 bp, Staphylococcus aureus; identical to SEQ ID NO: 2253

SEQ ID NO: 2616 - DNA, 107 bp, Staphylococcus aureus
taataatcccatacgacttggtatacctttgaaataccaaatgtgagaaactggagcagcaagttcaatgtgacccattctttcacgacgtactttagatttagtta

SEQ ID NO: 2617 - DNA, 329 bp, Staphylococcus aureus
taaaatttttaattagctaaaaatcatcgcattaattttttgagctacatcatcaaaattcggacattttaacgacacatataatttaattttaggttcagtaccagaaggacgtaaagcgataaatccttcgtcaaataagacacgaataacatttgatttaggagaattaatctgcgacgttgtatctttatccaaatgataaacctcgctagttaaataatcttcaattgctttcactttgagtccttgaatctcttgcggtggatttgaacggaatttggtcattattgcattaattttctttttcccttcaaatccttctagcg

SEQ ID NO: 2618 - DNA, 147 bp, Staphylococcus aureus
aatcggcatatcaacaactacaaatgtatttggtgcgcctcttcttactgcacgaccgtgatgaatcatatctgctaacgtcacttgtacggtactttcataacctaatacagtcataccaagtgaatccccaacaagaatcatatc

SEQ ID NO: 2619 - DNA, 214 bp, Staphylococcus aureus
aaacctgtttggaaaatccctgaatcaggaatgtttgtattcacatagcctcttaaaatacctgcaacttttggtaatttaacaactgttctaaaattaaccatttcttttttcaatgtttgcatcacttgttgctgacgtcgcacgcgtccgaagtcaccttcagggtcgtgacggaatcttgcataaccaagtaattctttaccattcaacc

SEQ ID NO: 2620 - DNA, 247 bp, Staphylococcus aureus
cacttcgtaacctttaagtttgtatacacgacctttgttagtaaagaacaatacatggtcatgtgtacttaaagttaccaattgactgacaaaatcttcttccaatgtattcataccttgaacaccacgaccaccacggttttgagcacgatatgtagataccggcaaacgtttaatgtagttattatggcttagtgtaattactatttgttcttctggaattaagtcttcgtcctctaagtcttca

SEQ ID NO: 2621 - DNA, 226 bp, Staphylococcus aureus
taaatattgtgataaaaatgttttaaagtttttttcgccgataaaacaaatgcctgtagaatcttttttcttagcagtaacaagtccttgttcttcagcaattcgacgcacttcactcttttcgatgtcgccaattgggaacatcacttttgaaagttgttgttgagataattgattcaagaagtatgtttgatctttattattatctacaccacgtaacatttca

SEQ ID NO: 2622 - DNA, 166 bp, Staphylococcus aureus
tgaacggtctacttttgtaggatccttaccactgaagcatccgccaccatgacgtgcatagccaccgtacgtatcaacaatgattttacgtcctgttaatcctgcatcaccttgaggtccaccgattacaaagcgtcctgtaggattgatgtagaatttagtttgt

SEQ ID NO: 2623 - DNA, 234 bp, Staphylococcus aureus; identical to SEQ ID NO: 2251

SEQ ID NO: 2624 - DNA, 385 bp, Staphylococcus aureus
gtccattgtagcacgtgtgtagcccaaatcataaggggcatgatgatttgacgtcatccccaccttcctccggtttgtcaccggcagtcaacttagagtgcccaacttaatgatggcaactaagcttaagggttgcgctcgttgcgggacttaacccaacatctcacgacacgagctgacgacaaccatgcaccacctgtcactttgtcccccgaaggggaaggctctatctctagagttgtcaaaggatgtcaagatttggtaaggttcttcgcgttgcttcgaattaaaccacatgctccaccgcttgtgcgggtccccgtcaattcctttgagtttcaaccttgcggtcgtactccccaggcggagtgcttaatgcgttagc

SEQ ID NO: 2625 - DNA, 181 bp, Staphylococcus aureus
aatggttcaatcatttctgtaccttctttaatatcagaaactaataaacctctatcagtaccacagtcttcttcacgaacaataacatcttgtgccacgtcaacaagacgacgagtaagatatcctgagtcagctgttttaagtgctgtatcggcaagacctttacgtgcaccgtgagttg

SEQ ID NO: 2626 - DNA, 299 bp, Staphylococcus aureus
agttgaacgtttatgaagttcagatgcaagtttcacacgttgagcctcaccacctgataacgttgtagcttgttgacctaatgtgacgtatccaagaccaacatcaactagtgtttgtaacttgcgcttaatcttaggaatattttcaaaaaattgtgttgcttcttcaacagtcatttctaaaatgtcagcaatatttttacctttgtaagtaacctctagtgtctcacgattatatcgtttaccatcacacacttcacaaggaacataaacatcaggtaaaaaatgcatttcaattt

SEQ ID NO: 2627 - DNA, 185 bp, Staphylococcus aureus
aatgtttagcattgcttaatgacagaagtcatctcgtactaaatattggctagtatttttttaattaaattgtcttcttatatcaactttttgttgttgtttctttcgttgctggtctactttgatttgtttacctacaatcagaagtaaacccatagcaatacttaaactaatcattgatgatc

SEQ ID NO: 2628 - DNA, 273 bp, Staphylococcus aureus
gcaacatattttttttggttgtataacttatgtgcaatcaaatgactccaaactgcatgtaaacctgcatacgttgtaatgacttctaatgttgaacgtgccgctggatcctgctcaaataccatttttatatcgtctctcattctttttaacaagatcatttcctcctcaatgattgaactacgtaaatacataattgaagtacctgcgaaattaaatatcaaaaaagcaccactaacatacaaattgtattgttagaggcgcttccgcacg

SEQ ID NO: 2629 - DNA, 115 bp, Staphylococcus aureus
catatctcctggttcgtcagcacaggcaaagtgtgtaaacacgccttcaaatacaagttgctcatattgttgaatgatttcaatcacttcttgatacgttttagtatctttaata

SEQ ID NO: 2630 - DNA, 267 bp, Staphylococcus aureus; identical to SEQ ID NO: 2153

SEQ ID NO: 2631 - DNA, 109 bp, Staphylococcus aureus; identical to SEQ ID NO: 1797

SEQ ID NO: 2632 - DNA, 185 bp, Staphylococcus aureus; identical to SEQ ID NO: 2627

SEQ ID NO: 2633 - DNA, 166 bp, Staphylococcus aureus; identical to SEQ ID NO: 2622

SEQ ID NO: 2634 - DNA, 813 bp, Staphylococcus aureus
  misc_feature (1)...(813): n = A,T,C or G
gctatagttgaaacatattgtgataattgtaatggtgtataggtatcatattgaccaattgataaatctagataattacctggattatttgttaatggttcgatttgacctcttgtttcatttggtaaatctatccctgttttcacacctaagcctacttgatttaatcctcttcttagcttttgggcaggtgaacttatgtctgaaggtaaagccataccagaataataagggtctcccgctaattttaatgctgttttaaacatatatacgtttgatgaatgcatcaaagcttgcttatcattaatagttacatgcccgtttttattgaagtatgatcgttttgtcaaaccaccttggaaatgtaatggttcatcgaccattgtttctccaactttgatagctttattctgataaccggctaataatgttccaccttttacagaagatccaaccgcaaattgagaagtaaacgtaccaatgtcataatcagtcattttaccactcttattaatctgctttccggcaagcgcaagaatgtctccatttttaggattttgtacaaccatcattgcattatccatatctttggcaccttgactgcgaagcttcttaatttgtttatctaataatgcttctacttctttttgaagatctatatcgatcgttaatttcaaatcttgaccgcgagcgccaggatttaacacttctgaagatgtaactttaccagatttgtccgttgtgtatttcatttctttcttcttaccacgcaatacatcttcatattgatattntaggtaagattttccaaca

SEQ ID NO: 2635 - DNA, 267 bp, Staphylococcus aureus; identical to SEQ ID NO: 2153

SEQ ID NO: 2636 - DNA, 126 bp, Staphylococcus aureus; identical to SEQ ID NO: 1983

SEQ ID NO: 2637 - DNA, 952 bp, Staphylococcus aureus
caccaataaaaccaacaactttattctctaataagatttcagcagtacgacctggatgtaatccatcaatatcagcacaggcgataacctaaattcaagatttaacttttcagatactcgatccacgacaccttttgctaaatagaaatcaaccgtttctttcttaccttgccattgattgactacataatctccagttaaaataccacttaaatattcaacttgatctggtagttcaccttctccattagcaaagaagacattgccgatttcaaataattttacatctttatttttgcgtgccacattatatgatgccgcttcgattaaatgtggtaataaactttgacgtaatgacgcatgcgcttcactcattggcatcaataaatcaattgtttgacgctgttgcatcgaaaatgcagtagcatcttctttagaaactaacgaatacgtaatagcttggtctaatccagcaccttctaacacttctttaaccattctagttttatattggcgatcagttagctgaccactagtaactttatcgaagacaggtaacgttgatggaatatcgtcgtatccatatatacgtgcaacttcttcaattaaatcttctttaattgtaatatctttacgacgtgatggtactagcactgtaataacatcatcatttatttctgtatcaaaccctagttgattaaaaatagtaacaatatcattttgtgacaaatcaaatccaatagtgcgattaattttatcagcagtgatgtcgattggtgtaataaatgcaccaagttctcctgaagacactctatcttttagcacttttccgtttgcataagtttgtaataaataacatgcacggtcgactgcttcatctacaaattcagtagctattcctttttcaaaacgactagatgattcactgcgtaaatttaaacgtcttgatgta

SEQ ID NO: 2638 - DNA, 950 bp, Staphylococcus aureus
caccaataaaaccaacaactttattctctaataagatttcagcagtacgacctggatgtaatccatcaatatcagcacggcgataactaaattcaagatttaacttttcagatactcgatccacgacaccttttgctaaatagaaatcaaccgtttctttcttaccttgccattgattgactacataatctccagttaaaataccacttaaatattcaacttgatctggtagttcaccttctccattagcaaagaagacattgccgatttcaaataattttacatctttatttttgcgtgccacattatatgatgccgcttcgattaaatgtggtaataaactttgacgtaatgacgcatgcgcttcactcattggcatcaataaatcaattgtttgacgctgttgcatcgaaaatgcagtagcatcttctttagaaactaacgaatacgtaatagcttggtctaatccagcaccttctaacacttctttaaccattctagttttatattggcgatcagttagctgaccactagtaactttatcgaagacaggtaacgttgatggaatatcgtcgtatccatatatacgtgcaacttcttcaattaaatcttctttaattgtaatatctttacgacgtgatggtactagcactgtaataacatcatcatttatttctgtatcaaaccctagttgattaaaaatagtaacaatatcattttgtgacaaatcaaatccaatagtgcgattaattttatcagcagtgatgtcgattggtgtaataaatgcaccaagttctcctgaagacactctatcttttagcacttttccgtttgcataagtttgtaataaataacatgcacggtcgactgcttcatctacaaattcagtagctattcctttttcaaaacgactagatgattcactgcgtaaatttaaacgtcttgatgta

SEQ ID NO: 2639 - DNA, 297 bp, Staphylococcus aureus
taatgactttacatttttcgcaaataggttttactgatggtcttactttcatttttatacctccctatattatggagtgacgattatttataacgataagtaattcttccgcgtgttaaatcgtacggagacatctcaacagttactttgtcgccaggtagaatacgaatgtaattcattctgattttaccacttacgtgagctaaaatctcatgaccattttctaattctactttaaacattgcgttcggtaaagtatctaatacagtaccttctaattcaattacatcttgttta

SEQ ID NO: 2640 - DNA, 234 bp, Staphylococcus aureus; identical to SEQ ID NO: 2251

SEQ ID NO: 2641 - DNA, 302 bp, Staphylococcus aureus; identical to SEQ ID NO: 2163

SEQ ID NO: 2642 - DNA, 284 bp, Staphylococcus aureus
tattttcttttggatccaactttactaaaaatagttcagcatctccatcttcatgcaacgcatcataaatattttcaaagtaactaatatcacgcgttaagaagccatcgcgttccccagtgattttcattaactcagcaaatgtttttaaaccttctctatcagatcgttctactgtcgtacctcgctttaaagccaagcgcacttttgaacgatttcggcgttcaaaactatttaataactcatcatcatttttatcaattggtgtaatcatagtcatacgt

SEQ ID NO: 2643 - DNA, 112 bp, Staphylococcus aureus
tgtaataactaaagccaatataatcaaccgtgccctgctgtaaaatactgtcgtccccttcttgccatccaacatcatatccttttcgtgccaacatttttttagcatagct

SEQ ID NO: 2644 - DNA, 140 bp, Staphylococcus aureus
tattgagcttataacataaatttctatttattcttaatttaaacgaaaaaaaagatcactgatgagtcagtgatcttatgcagataaaactttacggcctttacgacgacggcgcgctaaaactttacggccattttttg

SEQ ID NO: 2645 - DNA, 310 bp, Staphylococcus aureus
ttttaaataatacaaccgcgttatttttttcgcaatatcttgctaaacgttcaaaatcaattttgaaaaatgggtaatgtgctgtaccatgaccactacctctaaatgttggtgcgaaaagaatgactttcttacctttaataattggtaattcatcttccatctcttgtttgatctgtgtcgcataagcttcatcaaatagtacatcagtacgtggaacacctgtaggcactacatttttctctttaataccaaatgcttcagcgtagaatggaatatcggtttcagatgatacataagcttttgtata

SEQ ID NO: 2646 - DNA, 193 bp, Staphylococcus aureus
tgcaacgtgttccatacctgtaccaacaaatggtgcttctggattcatcaaaggcactgcttgacgttgcatgttcgcacccatcaatgcacggtttgagtcatcattttctaagaatggaatacatgctgtcgctgctgaaacaacttgcttcggcgatacatccatataatccattttttctttagccata

SEQ ID NO: 2647 - DNA, 992 bp, Staphylococcus aureus
  misc_feature (1)...(992): n = A,T,C or G
tatgtaagccattttataaaatacaaacaacacctcaaaaccaaaaaacacgagattttcactatctttcatgaaaacctcgtgtttgattataatgatagtgttcagagcactaccttctttatctatatagtcagttgatatttttaaaatttaataaccattctaccagttatagtaccattttccatttcttcaaaaatatcattgatttcttctaattttcttaattgaactttaggtgttactttattttcagcagcaaattcaaacgcttcacgtaagtcttgtcttgtaccaacaagtgaacctactacttcaataccatcaagcactaatcttgggatatctaagttcattttatcaacaggtaaaccaacggcaacaactcttgcaccagcttttacaacatcaaccgcttggttaaatggcgtcttagcaactgaagttaccactgttgcatctaatcctttgttatcagttaatttcataacttctgcaactggatcaacatctttagaattaataatagcatcagcacctaattctttcgcgaatgctaatttatcatcattgatgtcgaaggcaacaattttagcccccataacgtttttagcatattgtaaagctaggttacctaaaccacctataccaaaaacacctaaccattgtccaggttttacattacttacttttacagctttataagttgtcacacctgcgcatgtaatagaagacgctgctgctggatntaatttttcaggtactttcacagcatagtctgcagtaacaataacttgttcagccattgcaccatctactgtataaccagcatttttcacactacggcaaagtgtttcacgacctgttgtacaatattcacatcttccacagctttcgaacatccaagcgatagacacacggtctccaatttttaatgattctacatcttccgcaacttcgatgactttaccaatacnttcatgacntaa

SEQ ID NO: 2648 - DNA, 263 bp, Staphylococcus aureus; identical to SEQ ID NO: 1866

SEQ ID NO: 2649 - DNA, 266 bp, Staphylococcus aureus
catggcgtttcaatgcacgtcctgcgcttaatgcgtagttgcctcctgatccaatagcgataaggtcatcatctggagcaataacttcgccagttccactgacaactaaaatagcatctttatccattacaattagcatagcttctaattgacgtaattgtttatcgcctcgccattcttgtgccaattcaacagcagctctttctaagttaccactaaactgttgtaattttgtttcgaatttttcaaataacgtaaacgcatct

SEQ ID NO: 2650 - DNA, 152 bp, Staphylococcus aureus; identical to SEQ ID NO: 2131

SEQ ID NO: 2651 - DNA, 98 bp, Staphylococcus aureus
accgccaccttgagccatatctggacgaccgccacctttaccaccaacgattggtgccatttgtttgataagatcaccggctttaacgttatttgtta

SEQ ID NO: 2652 - DNA, 119 bp, Staphylococcus aureus
aatccttcgatttgtgtaaattgatgactatgtgtcgcatcatcagagtcacgacgatacactttaccagggcaaataattttaactggaccttgaccatgacgtgattccatcgtacg

SEQ ID NO: 2653 - DNA, 404 bp, Staphylococcus aureus
tacgtatcgtcattttcatctatcagccaactaccttgtttaacagtcaaaaatagcaccactatcgttaactattactatcaaaaacattcaaacacgaactaattaccataattaagaaagccctcgcatacacatgttgtatacacgagagctcttactaacaatcaacgtcatttatttttgtctcatataagggaataataatacgtctctgattgatggagagtcagttaataacataaccaatctgtcaataccgataccaagaccacctgtcggaggcataccatattctaacgcttcaatgtaatcttcatccatttcatgcgcttcatcattaccttgcgctttttcaacaagttgcgcttcaaaacgacctttttgatcaataggatcattta

SEQ ID NO: 2654 - DNA, 214 bp, Staphylococcus aureus
aaatttttaaattcttctcttagaggttcatgatatgctgattgaatatattgaataagtgatgaaacatttaaaaatttaggatttaacgaacctggtgtattcgtttgttcaacgtcgttgagacgctgtaataattcgttcaaatctacatttttcttttctaaggctgctgcttctatacttacttgtccgccacaacaaaaatctattc

SEQ ID NO: 2655 - DNA, 186 bp, Staphylococcus aureus
tgttaaaccttcacggaatgaagatgtgattggtaattcgataatcttaccagatggtgcggccatcaatccacgcatacctgctaactgtgtaaagttagatgcgttaccacgggcacctgaatcactcatcatgaagattgggttagttttatcaagtgattgcatcaattcaccttgaatttg

SEQ ID NO: 2656 - DNA, 126 bp, Staphylococcus aureus
gctggaatattttgatctacttctaatgcaatgtcacgagacatgcctgggaatctcggaattggctggtaattaatgtaacctaccgacacagccattaatgcatcaaaattcaactcaaaaaca

SEQ ID NO: 2657 - DNA, 289 bp, Staphylococcus aureus
ctgtacctgactcacttactattttgaataagccaatttcagaagtattgcggacatgaataccaccacataattcaattgaaaatggtgccatatttactacacgcacaacatcaccatatttttcaccgaataatgccattgcgcccatttctttagctgaagcaatatccatttcttgaatgttaacgtcaatacctttccaaatttcttcatttactaagcgttcaacttgatcaatttcatcattagtcattggaccaaaatgagagaaatcaaaacgtaaacg

SEQ ID NO: 2658 - DNA, 951 bp, Staphylococcus aureus
caccaataaaaccaacaactttattctctaataagatttcagcagtacgacctggatgtaatccatcaatatcagcacggcgataactaaattcaagatttaacttttcagatactcgatccacgacaccttttgctaaatagaaatcaaccgtttctttcttaccttgccattgattgactacataatctccagttaaaataccacttaaatattcaacttgatctggtagttcaccttctccattagcaaagaagacattgccgatttcaaataattttacatctttatttttgcgtgccacattatatgatgccgcttcgattaaatgtggtaataaactttgacgtaatgacgcatgcgcttcactcattggcatcaataaatcaattgtttgacgctgttgcatcgaaaatgcagtagcatcttctttagaaactaacgaatacgtaatagcttggtctaatccagcaccttctaacacttctttaaccattctagttttatattggcgatcagttagctgaccactagtaactttatcgaagacaggtaacgttgatggaatatcgtcgtatccatatatacgtgcaacttcttcaattaaatcttctttaattgtaatatctttacgacgtgatggtactagcactgtaataacatcatcatttatttctgtatcaaaccctagttgattaaaaatagtaacaatatcattttgtgacaaatcaaatccaatagtgcgattaattttatcagcagtgatgtcgattggtgtaataaatgcaccaagttctcctgaagacactctatcttttagcacttttcctgtttgcataagtttgtaataaataacatgcacggtcgactgcttcatctacaaattcagtagctattcctttttcaaaacgactagatgattcactgcgtaaatttaaacgtcttgatgta

SEQ ID NO: 2659 - DNA, 174 bp, Staphylococcus aureus
caggattttcaacgctattcacaaaccatggttttaacatattaccatcattaaagaacgctgattgcgcttgtaacatttgaacaggtgttactgttgtcgattgaccaaatgatgacgttttttgttgcaactcattactccatccaatttgaccaggtgcttctccatcaa

SEQ ID NO: 2660 - DNA, 163 bp, Staphylococcus aureus; identical to SEQ ID NO: 2476

SEQ ID NO: 2661 - DNA, 436 bp, Staphylococcus aureus; identical to SEQ ID NO: 1967

SEQ ID NO: 2662 - DNA, 324 bp, Staphylococcus aureus
tcatttaaactttctaacttaatttgttcttctgatttttctaagcgtctaattttagaagatattctctcagccattatttatccacctgatttcccgggaaaacataatctgaacgttcccattttttctgtacttgaacactgtactgcggttgacgttttttattgacacggaaattattagggttcaacggtgacttaccacgtttcgtaattacctccaaacgacagctagtacgtttataagatggtgtatccgtgtattgatcaacatcactattagttaataagttaattgcacctagatctccattttccatcg

SEQ ID NO: 2663 - DNA, 209 bp, Staphylococcus aureus
ccttcaacaccaacgatatcgcctaaatcagcatttttccataaatcaaattcgtcatcgccaacttgatctttacgaacgtaaatttgaatttgtccagctaagtcctgaacgtgtgcaaatcctgctttacctttaccacgcttagtcattaatcgtccagctatagcgacatgactatccgcttctttttctaccaattcttcttt

SEQ ID NO: 2664 - DNA, 254 bp, Staphylococcus aureus
catgctctgaagcgagtttaaatacaacaggtgaaaagcgaccattattacgtggttgattttgtttagcagtagatgtctgttccactgttgcactagcttttttagtagatttctgagtatgctcatccacttttgcttgtatctcttcagttgtttcatttgtcttttcatcagcagtttcaattttacagataattgtatcaatagctactgtctgccccgcttcaactaaaatttctgtaattgttcct

SEQ ID NO: 2665 - DNA, 101 bp, Staphylococcus aureus
ccttctaagattgcatctgccattttagcagttaataatttaaccgcacggatagcatcgtcgtttgctgggataacgtagtcaatttcgtcaggatcaca

SEQ ID NO: 2666 - DNA, 181 bp, Staphylococcus aureus
tattaacatcctcgcctgtatgtccatcggaagtccaccctgtataagatttatcatttactggcttctgaatagcagtgttgtagggcttttgtttgcgtttctacttctgcggatttttcgtctttttcttttttaagtagtctttttagctttttattctcttttttaacctttttca

SEQ ID NO: 2667 - DNA, 316 bp, Staphylococcus aureus
tactgagcgatgttgacgtacttgctgatcctgagttacttgtacttgttgagtcactgagtgatgttgacgcactttctgatgttgactcacttgcacttgttgagatactttgtgaatcagattcactctctgaaccacttaatgacgctgatgtgcttaccgaacctgattgactcgtacttttagatatacttgttgaatcgcttagtgacgttgatgtcgatgtggattcactttggcttgttgactgacttgtatatgatgatgtgctttgtgaatcggattcgctcgtgcttgtacttgttgagtttga

SEQ ID NO: 2668 - DNA, 99 bp, Staphylococcus aureus
acactgccggaatgagtcgtttcaatcgtcgcttccaaaactctagcaaatcgattttttgcgtccgataatactcacttatcaacaaacttgttatta

SEQ ID NO: 2669 - DNA, 283 bp, Staphylococcus aureus
catcaccataaataaaaccttccatatctgttcctgtgccaataaagccatattgcgtttggcctgtcgtgccagtgcaagatttccaacgataatttctaggcgtcactgctggcgaaccatctaatggataatcataatccatcgtgcgtccaagaagtacttgattatttaaagtttgtattgtgaatcctgtgcacattgttctcactcctctgtaccttcatttactttaatcactttcaaataaagctgtttcacttaaacatactataaaaaatca

SEQ ID NO: 2670 - DNA, 178 bp, Staphylococcus aureus
tgtttaggattggctgctttttcaacaatttcctccatttgattccaagcgccacaattaggacatttccccatccatttaggagattgataaccacaagccatacattcaaaaatcacttttttcttggccaaaattgcacctccactttcctttgaacaaatctattttaaacgca

SEQ ID NO: 2671 - DNA, 178 bp, Staphylococcus aureus; identical to SEQ ID NO: 2670

SEQ ID NO: 2672 - DNA, 154 bp, Staphylococcus aureus
actgacacaacataacacaacccatacactaactatcgtgtcatgtaatcttgcatccgatcttgcaacgctgtaaatgtttcgaagccatcctcttctaagaagtgccctccatcttccacgatttgcaagttcccctctaatgcattcatta

SEQ ID NO: 2673 - DNA, 145 bp, Staphylococcus aureus
gccatacctaagtgtagctctaatacttgtccgatgttcatacgagatggtacaccaagaggatttaacatgatatcgatcggacgtccatctggtaagtaaggcatatcttcttcaggaacaatcttagaaatgacacctttgt

SEQ ID NO: 2674 - DNA, 209 bp, Staphylococcus aureus
tgattatcatttttagtattgtcttcttgatttagttgctgcatatcaactttatcactcgattgattatcacttgctgaagttgtcgcttcgttcaattctttattagtactttctgcagcctttgcttcttggttccccagaccaaaaattaatgttgtacctactaaaattgatgcttttcccactgtgtactttctaatcgaaaa

SEQ ID NO: 2675 - DNA, 373 bp, Staphylococcus aureus
caacgcttcttatatgaaaatgaccaccattgtcgtcataattgatatctggtctctcagatgtcaatcctataatcgcattaacactaccaaacaatacagctgaagctccagcacaaacgatatcatgaccatattcaccatggtcagcatggccatccataataacgtctgttactttgccttcatcattaactgtaatatcaacagtaatcataataattacgcgttgattttatcgattgttaatttagtgtatggttgacgatggccttttttacgttttgaatttttacgacgtttgtatgtgaatacagtgatttttttaccgcgaccttgtttattaacagtagcagtaactgttgcaccttca

SEQ ID NO: 2676 - DNA, 152 bp, Staphylococcus aureus
aaagctgataaatggcaatggcacaccagttaatggaattgttgccgaaataccgccaatgtttacaaacgtttgacttccaaagtatgtggcaatcccaacacacacaagtttataaaaatatgatgatgttttatttgcaaactggaagg

SEQ ID NO: 2677 - DNA, 254 bp, Staphylococcus aureus; identical to SEQ ID NO: 2664

SEQ ID NO: 2678 - DNA, 173 bp, Staphylococcus aureus
taagtattaaaagcaaaataaaaagcccttattcagggctttttaagtaaaattattttacagcatcttttaatgctttaccagctttgaatgctggaactttacttgctgggatatcaatttctttaccagtttgagggttacgacctttacgtgcagcacgttcacgtacc

SEQ ID NO: 2679 - DNA, 424 bp, Staphylococcus aureus
gtctacttatattaggaactacaccctcgaaaaccattgttcgttttctagtaccaccttgacgttgtgtaaatgtaaattcaatttctttgtcaccagaaccatacaataaaatatcacgttgacgttctgttaactttttaaaaggtttatccatattgattttataaacttcacaaacacgttttaacaatgttggataaaaatcagaactcgtcggtatccaaggttctattgcaccttcgtttagcgtcttatctttgtcgggaacaaccaagtctacatcgactgttaacttttggcctaagccatcacatgtcggacaagcaccaaaaggactgttaaagctaaacattcttggttctaactctccgattgaaaatccacatataggacaagcatggctttctgaaaacttaaggtc

SEQ ID NO: 2680 - DNA, 164 bp, Staphylococcus aureus
ccttgcatagctgtaccgatagctaataacagaccagctgctggtaaaatcgcaacaggtaacattagcgctttaccaatacgttgcaattgaccgaaaagtttcttcctcacttgtccaacctccaaagttgtatttattatttaagattcaataaaaaaaga

SEQ ID NO: 2681 - DNA, 164 bp, Staphylococcus aureus; identical to SEQ ID NO: 2680

SEQ ID NO: 2682 - DNA, 225 bp, Staphylococcus aureus; identical to SEQ ID NO: 1724

SEQ ID NO: 2683 - DNA, 485 bp, Staphylococcus aureus
tattagactattcagcttctctaatttcttctgccacatctttatagtctattttcgctttaacaaacgtctcgttatttaccgggaaatgttgttggaatgtttcaaagttttgtatctcaacgacaacgtcatccacttcaaagtcaagaacatgtccaccataagctctttcatcatccgcaaaatgtatatgaaaaccagcagaccctacgccatgaaataattctggtgtaaaaaatccaacaatggcaccacgaatatcttgtcttttttcctcaggttgtctgcgtgctgaatcaatcaaacgtgtatatggcggttgctgagcaggcatcattcgtacatgcatatgtttaaatgtgccataaattttaacagccgaaaataaattctcacttaacatttcatttttaatttgtgcaaatacatcatcttgtgataattgttgcaatggaaatgtcttactcgctttaaaattagta

SEQ ID NO: 2684 - DNA, 209 bp, Staphylococcus aureus; identical to SEQ ID NO: 2663

SEQ ID NO: 2685 - DNA, 173 bp, Staphylococcus aureus; identical to SEQ ID NO: 2678

SEQ ID NO: 2686 - DNA, 161 bp, Staphylococcus aureus
gcttttttagctgctttagcaatacctttttcacgtaggtagtcaatcgctttatcgatgtcaccatcagtttcagttagcgcttttttacaatccatcatacccgcgccagttttttcactaattctttaacaagttttgctgaaatagttgccattcat

SEQ ID NO: 2687 - DNA, 495 bp, Staphylococcus aureus
cgaacccccgcgagccgttaagcccctgtcggttttcaagaccgatcccttcagccggacttgggtattcctccaaaattatatggaccttgcaggactcgaacctgcgaccgaacggttatgagccgttagctctaaccaactgagctaaaggtcctaaatataattttacaactaataaatagtggcggtggaggggatcgaacccccgacctcacgggtatgaaccgtacgctctagccagctgagctacaccgccttatatagtttgtaaataatatggtggagactagcgggatcgaaccgctgacctcctgcgtgcaaagcaggcgctctcccagctgagctaagcccccataataattacagtatatcgggaagacaggattcgaacctgcgaccccttggtcccaaaccaagtgctctaccaagctgagctacttcccgtataattaacgcgcccgataggagtcgaacccataacctcttgatccg

SEQ ID NO: 2688 - DNA, 171 bp, Staphylococcus aureus
ttcaacaatctctactaaacgaaaacgttttgttgctgataaaggacgagtttcttgaattttaacaatgtctcctaatttagctgaattgttttcatcatgagttttgtattttttagagtattttactcgtttaccgtataatttgtgtgttttgtaagtttcaacaag

SEQ ID NO: 2689 - DNA, 260 bp, Staphylococcus aureus; identical to SEQ ID NO: 1815

SEQ ID NO: 2690 - DNA, 173 bp, Staphylococcus aureus; identical to SEQ ID NO: 2678

SEQ ID NO: 2691 - DNA, 495 bp, Staphylococcus aureus; identical to SEQ ID NO: 2687

SEQ ID NO: 2692 - DNA, 349 bp, Staphylococcus aureus; identical to SEQ ID NO: 1962

SEQ ID NO: 2693 - DNA, 437 bp, Staphylococcus aureus
catgtccacaacttggacaatgggttggcatatgatatgtgacagcatcctcaggtctacgttctggaatactacgtacaacttcaggtatgatgtcacctgcttttttcactacaacactatcaccaattcgaatatctctgtcatgaattaaatcctcattgtgcaaagatgctcttgatacagttgtaccagctacttttactggttctaaaatagcagtaggtgtgactacacctgttcgtccaatacttaattcaatatctaataatttagttactacttcctcagctggaaatttataagcaatggcccatctaggagatttttgtgtgaatcccatctcatcctgttgatctaaatcattaaccttaataacaatcccatcaatatcataaggtaatgactctctttggcttgtccatttttcaatatac

SEQ ID NO: 2694 - DNA, 234 bp, Staphylococcus aureus
taaagatagatgtaccttgaccttctacactgtttgcccaaatacgaccattgtgcgcttccacaatctctttcgaaatggctagtcctaatccagtaccacccattttacgcgtacgtgccttatctacacgatagaatcggtcgaatatcttatcgactttattgataggaataccaatgccattatctttaatacgaatcgtcattcgattataaagtggattttgtttca

SEQ ID NO: 2695 - DNA, 150 bp, Staphylococcus aureus
ggctcgtctataacgctaccatgcaattcaaacacttcgctgtttgcatttgattcaagtacatccatgatttcgtcgattttacgacgatcaagcactgtaccttcttcaactacaatttcaccagtttcagtatttacaattggctca

SEQ ID NO: 2696 - DNA, 708 bp, Staphylococcus aureus
tgaagtgttttgattcgttaaattaagtaatgctttggcagtcgcattatccaacgaaacaaagtaatgaataatcaataatattgagaatacgattgatgcagttgcaataaagcgtcctgttttaatttctttattcgttctatcagccatttgtttactcctcatatatttaaatacgttctataaaacctttatttaattttaccttttaataaaagtgaataccctgtcatacaatattcatttcaacataaatttattataccagtttaagaatacaagttaaatatgtgttattagttacctcatgattattagtctgttatgattaatacttcaaaataaaaaacctaccacagtctcaactctgtggcaggctataaatttaagcgtgaacttatttaagcgtgaactcaaaatctttatttaatttataccgtcataataatcctcaactaaaattatgtcagcatttgattataaagaaaattatttatctaagttatagaatgatttgataccgtcatatttagcagtttcaaataattcatcttcgatacgtaataattgattgtatttagcaatacggtcagtacgtgataatgaaccagttttaatttgaccagcgtttgtagcaacagcaatatcagcaattgttgtatcttctgtttcacctgaacggtgagaaactactgctgtgtaacc

SEQ ID NO: 2697 - DNA, 197 bp, Staphylococcus aureus
ctttccatcttgaacgtccggctttaccaacgttaactaattcgtgttgtaggttaccaacttgaccgattgtagcacggcaagtagataagatcatacgaacttcaccagatcttaatctgattaatacgtatttaccttctttaccaagtacttgagcacttgcaccagctgaacgagcgatttgtccaccttta

SEQ ID NO: 2698 - DNA, 218 bp, Staphylococcus aureus
accttttttaattgaagttctgatttctactaaaccttttttaggtccaggtacgttaccttttactaagataactttgttttctgtgtcaacttgaactacttctaagttttgaacagttacagtgtttccacccatacgtcctggcattttttggcctttaaatactctagaagcatctgaagccatacctacagaacctggtgctctgtggaaat

SEQ ID NO: 2699 - DNA, 145 bp, Staphylococcus aureus; identical to SEQ ID NO: 2673

SEQ ID NO: 2700 - DNA, 234 bp, Staphylococcus aureus; identical to SEQ ID NO: 2694

SEQ ID NO: 2701 - DNA, 203 bp, Staphylococcus aureus
tcattagaagtcgtttcattacttgtttgattcactaattcctccgcatttgtattgcttgattgagttgttgccggtgtattagcttgattcgttgtcgtagtagtagcttcaccagttaccggcgtttcttccgtagttgcatttgttgatgatgattgtgtcgtttcctgttgtgctggattttgcgccacactcgtttc

SEQ ID NO: 2702 - DNA, 98 bp, Staphylococcus aureus
cggataccttttccgccaccgccagcagtagctttaatgatgaccggatagccaatttttttggcgattttcttagcttctgagacgtctttcattaa

SEQ ID NO: 2703 - DNA, 186 bp, Staphylococcus aureus
gcaaatcgtccaccatctaattgaaccattggacgaatttctggtgggatgattggaagtacatctaaaatcatccatgaaggtttgttacctgaattacggaatgattcaacaacttctaaacgtttaattgcacgagtaagtctttgaccagtagctgattccaactcatcgcgtaacaattta

SEQ ID NO: 2704 - DNA, 223 bp, Staphylococcus aureus
tatagcgccaacctactaaatcgccgataaccgttccaattggtacaccaaaaacattagcaccactaaaccctgtatagacaagtccaatcattttaccacgatttttaggtgctgataacatcgctgtaatagctaatacttttacgataattagtgctgctgctgcagatgagataattctaccaactactaatattgaaaaatttggcgctacagcaat

SEQ ID NO: 2705 - DNA, 256 bp, Staphylococcus aureus; identical to SEQ ID NO: 2206

SEQ ID NO: 2706 - DNA, 208 bp, Staphylococcus aureus
catcatgtgattgatctaagtcatttactaaacattcgaatgggtattcttgatgctcgtatgcctccaaactcatttccttaacctcttgtaaaaactgtgtccacattttatcaggtgacggttgccctctatataccaacgtattagcaaacatgcctagcatttgctccgtgcctttatgcatacgcgcactcatcacactacc

SEQ ID NO: 2707 - DNA, 340 bp, Staphylococcus aureus
aatacattgtaattcaccacgtgctaatgccggcttcaaaatattcgaagcatcgatagcaccttcagcaccaccagcaccaactaaagtatgcaactcatcaataaataggatgacattacctgcttgttggatttcttccataacctttttcagacgctcttcaaattcaccacgatatttagtacctgcaactactgttcccatatctaaagacataacacgcttatcttttaatgtctctggtacctcattattcactatggcttgcgctaaaccttcagcaatagcagttttaccaacacctggctctccaataagcacaggattgtttttcgta

SEQ ID NO: 2708 - DNA, 203 bp, Staphylococcus aureus; identical to SEQ ID NO: 1892

SEQ ID NO: 2709 - DNA, 219 bp, Staphylococcus aureus
accttttttaattgaagttctgatttctactaaaccttttttaggtccaggtacagttaccttttactaagataactttgttttctgtgtcaacttgaactacttctaagttttgaacagttacagtgtttccacccatacgtcctggcattttttggcctttaaatactctagaagcatctgaagccatacctacagaacctggtgctctgtggaaat

SEQ ID NO: 2710 - DNA, 129 bp, Staphylococcus aureus
ctcatttatcttaattgctttactacaatcaactgtgccatccttaccttcttttgtatagttcaactcgcaaagtgctgaatgccctgtaccggcattattccatacatttgaactctcttcgccagg

SEQ ID NO: 2711 - DNA, 259 bp, Staphylococcus aureus
acctgaaacaactgtttcagaaccgtctaactcttggtggttagtgttgaatacgattgtttttaagtcaccagtagctggtgctgagattaatacttttttagcgcctgcttcaatatgagcttgtgctttatctttatcagtgtagaaaccagtacattctaatactacatcgatatttaagtctttccaaggtaatttgcttgcatctggttcactgaatgatttaacttctttaccatttacgcggaaaccacca

SEQ ID NO: 2712 - DNA, 138 bp, Staphylococcus aureus; identical to SEQ ID NO: 2421

SEQ ID NO: 2713 - DNA, 155 bp, Staphylococcus aureus
acgtttgaaatcgataacacggtattgacgtttgtgtccaccaccatggtgtcttacagtcaatttaccttggttgttacgtcccgcttttttcggtagcggttttaataatgacttttcaggtgtagttttcgtgatttctgcgaaatctaacg

SEQ ID NO: 2714 - DNA, 255 bp, Staphylococcus aureus
caaacttcatcatccatacgttcgattttactcttcgcatttttaatgttagttgcaatttcacgttgaactaattctttcattacgaatggtttaaatagttcaagtgccatttcttttggtaaaccacattggtacattttcaagcttggacctactgcaataactgaacgtcctgaatagtcaacacgtttaccaagtaagttttgacggaaacgaccttgtttaccttttaacatatgagataaagatttt

SEQ ID NO: 2715 - DNA, 165 bp, Staphylococcus aureus
tatttcaggaggaatgttagcaaaagtacctactgcaccactcattttccctacttcaatttcttctcttacttgtttgaaacgttgtaagttacgttgcatttccgtgtaccacaatgccattttgacaccaaatgtagttggttctgcatgcactccatgtgt

SEQ ID NO: 2716 - DNA, 320 bp, Staphylococcus aureus
tatcacccggttgtgcaggtaaatattgtgataaaaatgttttaaagtttttttcgccgataaaacaaatgcctgtagaatcttttttcttagcagtaacaagtccttgttcttcagcaattcgacgcacttcactcttttcgatgtcgccaattgggaacatcacttttgaaagttgttgttgagataattgattcaagaagtatgtttgatctttattattatctacaccacgtaacatttcaacatgaccatcttcatgacgatgtatgcgtgcgtaatgtcctgttgctacataatctgcacctaaattcatcgca

SEQ ID NO: 2717 - DNA, 468 bp, Staphylococcus aureus
taaatttaatagcaataatatcttcttcggtaaaataatggcgacagcgtgtttcagtatcgattaatgaaccataaactttaggcatagacaaagctccttaacttacgattcctttggatgttcaccaataatgcgaacttcacgatttaattcaatgccaaatttttctttgacggtcttttgtacataatgaataaggttttcataatctgtagcagttccattgtctacatttaccataaaaccagcgtgtttggttgaaacttcaacgccgccaatacggtgaccttgcaaattagaatcttgtatcaatttacctgcaaaatgaccaggcggtctttggaatacactaccacatgaaggatactctaaaggttgtttagattctctacgttctgttaaatcatccattttagcttgtatttcagtcattttaccaggagctaaagtaaatgcagcttctaa

SEQ ID NO: 2718 - DNA, 363 bp, Staphylococcus aureus
tattctggatctgttgtattaacttcacgatcccaatcataactgaaccctaattctttaatttgtcgtttaaaagtttggatatttttctttgtaaattcacgtgggtcgttgccagtgtctaaagcatattgctctgctggtaatccgaatgcatcccaccccatcggatgtaatacattatatccttgcattcttttatatcttgaaatgatatctgttgctgtatagccctcaggatgtccaacatgtaaaccagcacctgatggatatggaaacatgtctaaagcataaaatttcttttgacctaagttatcatttgttttaaatgttttattttcgtcccaatagtcttgccatttc

SEQ ID NO: 2719 - DNA, 381 bp, Staphylococcus aureus
caattggtaaaccatgtgtatcccaacctggtacgtatggtgcatagaacccttgcatagttttataacgtacaataaagtcttttaaaattttgttcaaggcatgtcccatatgtaagttaccattcgcgtatggtgggccatcatgtaaaatgaatgtttcgttacctttatttttttctaacgctttatggtattgatcttctgcatcccatttttcttgaatttgcggttccttgtttggtaaaccacctcgcattgggaaatctgttttaggcattaataacgtttctttgtaatccatttttttcactccttaaaaatttaaaaaactctaagttaaattaaaagggacgattgctcgcggtaccacccttatta

SEQ ID NO: 2720 - DNA, 124 bp, Staphylococcus aureus
taatttctccatctacttctccaattgttccatttgaactaatgatgccattaaccgcaaaatcttgaggtacaagttgatgtatttcagaatgcgaacgtcctgttgccaaaaatactttata

SEQ ID NO: 2721 - DNA, 244 bp, Staphylococcus aureus
cccaacaatttggatttcaatatggcggaagttttcgatgaatttctccatataaagtccaccattaccaaatgcagtttgagcttcttgttctgtcattcggaagccagtttcaagttctttttcatcacgagcaacacggataccttttccgccaccgccagcagtagctttaatgatgaccggatagccaatttttttggcgattttcttagcttctgagacgtctttcattaaaccgtca

SEQ ID NO: 2722 - DNA, 378 bp, Staphylococcus aureus; identical to SEQ ID NO: 2431

SEQ ID NO: 2723 - DNA, 190 bp, Staphylococcus aureus
tcttaggtcaaagtgttttctaactgcttcgacaagttgcccttcagaaactttacctgttccaaatgtatcaattgcaattgacactggttctgcaacaccaatcgcatatgccaattgtacttcacattgatctgctaaacctgctgcaacaatatttttagccacataacgtgcagcgtatgcagct

SEQ ID NO: 2724 - DNA, 208 bp, Staphylococcus aureus; identical to SEQ ID NO: 1897

SEQ ID NO: 2725 - DNA, 267 bp, Staphylococcus aureus
ctttcaatttatacactgaagtagtctagctgaatgtggtttaatgttattaattctaactcatatttaatttaagtcacacgttagaagaaaaaattaaattaggattttggccacgtgtatcttgtatatgcaagttcacgtttgtgtgcatttcgtatataatgattttcaattactttttgttcttctggcgtaactggcttaccttctaaataattatcaatcgcctcataagttacacctaatgcatcttcatctggaagc

SEQ ID NO: 2726 - DNA, 695 bp, Staphylococcus aureus
gctcaaaatctaaatttaaataatcgtgatttgtcttaccttgtagtactggataatttaatgatgttcctgataattttatccatccaacaatgtctttatttattttttcaagtgattcaaattgtggtctcacatgttcttgatgtttgctcatcagcatttgaaatttttgttgtaatttctcataatttgcgcgttcttgcttgtcttcaatatatgtttgaacaattttgtaaccaaaaatgataataattacaaccaataaaatttgtacaatagttaaaaatcgcttcattctcataaaaatcctcttttattaacgacgtttcttcagtcatcactaaaccagttgttgtaccgttttagattcgatttcgttgactttgacaaattaagtaaattagcattggaccaccgacaatcattaaaatagcattggctggaatttctaaaggaggctgtatcactcgtcctaataaatcagccactaacaatagccatgcaccaataactgtagaaaacggaataagtactctgtaattgcccccaactagctttctaaccacatgtgcacaataatacctaaaaaggctagttgtccaacaatcgcaacagttgcacttgctaaaaatactgctaataaacctgttaaccatctgtaacgatcaatattaaaaccgatacttcgcgct

SEQ ID NO: 2727 - DNA, 119 bp, Staphylococcus aureus
tcaggtgtttcaattggacacatacggccatagtgagagtagtgaacgtcacgtacttccatttgagcacgttcacgtgttaaaccaccaggtcctaatgctgatagacgacgtttatg

SEQ ID NO: 2728 - DNA, 123 bp, Staphylococcus aureus
taagacgtctcgaatgtctttaaagccatcgctttcacgagaagatgatagctctaaaattcgacgttctgcatcacttaaaatcgcatctagttcaagttcatcattatatccatcattggc

SEQ ID NO: 2729 - DNA, 185 bp, Staphylococcus aureus; identical to SEQ ID NO: 2370

SEQ ID NO: 2730 - DNA, 189 bp, Staphylococcus aureus
gctggtgcttcggccacagctaaactcgctgcatgtggaaagcggttaccgggtccgattacaaaagtgtcaaatgtgttatgggcattgaattgctctctaccaagcacatgattatcctcagttgtttcagtagaaggttttgttgtttcttttggagtagcagtttcattattactataatttgct

SEQ ID NO: 2731 - DNA, 299 bp, Staphylococcus aureus
tacaggaataaagtattcaggtttcataatattaatcatcatttttaattcttccatgcaaccatgacttgaagcatgaatctttttgttatttggaataatatgtgcgccagcacgtacaagctcatttaatgtattcgcaatgataacttccatattagcagaagccgtaattgctaaaaatacagaatcgccttcttcgatattcataattttatgcttatgttgcgccatttgacttaaggcttctacaggttctccttgcataccagtagctataattatcacttcatttttag

SEQ ID NO: 2732 - DNA, 349 bp, Staphylococcus aureus; identical to SEQ ID NO: 1962

SEQ ID NO: 2733 - DNA, 138 bp, Staphylococcus aureus; identical to SEQ ID NO: 2421

SEQ ID NO: 2734 - DNA, 183 bp, Staphylococcus aureus
cgcctctaaataagataatttagccattagttaagactcccttcttcgtacacaaatgcataggcttcttcgacacttggatatggcgcgtcttcagcagcctttgtcgctttattgatgatgtctttatgctccgcttctatttctgccaaccaagcatcatcgataatgccagctgaaagc

SEQ ID NO: 2735 - DNA, 215 bp, Staphylococcus aureus
gtgagcgtagtgacgtttgtcagtttggtactcaatgtgagaagtattgattgtgataccacgttctttttcttctggagcgttgtcaatcatgtcatatgattgtgcaactgagtcaccattttttgctaatacagtagcgattgctgctgttaatgttgttttaccatggtcaacgtgaccgatagtaccgatattggcatgttctttagaac

SEQ ID NO: 2736 - DNA, 441 bp, Staphylococcus aureus
aatttcttcgttagcaccttccatacgcggtgtgtataattcatctttaataggaacaacacgttcaattcgatctgctaattcgtttgtatttttcacaacaatttcatgcgctttttcttcacctaaaaaatgaaactcgtttaacatttcatctgtagttctaaaatgtgcttccggtaaagttgagcgattaagtggattgccgggttgtgatgctattaaaattttacgtgcgataccatcatgttcaaacaaatagtgtgcatttcctgtcgcaataacaggtatacccgctgtgtcacctgcatgtattaaacgttgataaatttcatgtaatgtttcagtatctctaataagctctctatcaattaaatcttgataaagtgccggtggttgaatttcaataaaatcataatatttggcaattttttcaacttg

SEQ ID NO: 2737 - DNA, 278 bp, Staphylococcus aureus
tcataatctaatgtgtaattttcaaatgttctaagtgaaatcgcatctaagaaaataatttctggaaataagtttcgcaactcgtataacatcatttgtgatactgacgtgccttgtgtacacacgataatagcttttatcttgccatcgaagttttcatcttgacgtctcaaactacctccgaacaacatggttaaatatgctatttcattatcaggcaacgattttccgaaatattcagttaacgattgacatgattgtttcaccatatgaaataa

SEQ ID NO: 2738 - DNA, 348 bp, Staphylococcus aureus
tgctcatatggaattggattagcaacaacaatgccaccttcaagatttaactgctgttttgttaaatgaatgtcagcaagtcgttctggcgtttcaaccgaacttgttaacttaacaccgctttcgcgagtgaagaatgctggcaattcattcgtttgatatccaataactggaacgccttttgtttctaaatactccatcgtcttaggtaagtctaaaattgatttggcacctgcacagataacagtgacatttgttttagacagttcttctaagtctgctgaaatgtccatcgtatgttctgcacctttatggacgcccccaatacctcctgtaacaaaaaattga

SEQ ID NO: 2739 - DNA, 278 bp, Staphylococcus aureus; identical to SEQ ID NO: 2737

SEQ ID NO: 2740 - DNA, 170 bp, Staphylococcus aureus
tgataagttagtacgaacacgagcatgtctttttaaacgcactttatttttatcaattttactgatcatttcaatactcctttctttagagtttatctattatttaccagttttaccttctttacggcgaacgtattcaccttggtaacgaatacctttacctttgtaag

SEQ ID NO: 2741 - DNA, 292 bp, Staphylococcus aureus
aattcaacgacaacttgaattgttttagatttcatacgtttaccagtacgaatatagaatggtacaccagcccatctaaagttatcaattgttaatttacctgaaacaaaggtaggtgtgttagagtcatctgcaacgcgatcttcatcacggtatgctttaacttgtttaccatcgatatagccttcgccatattgaccacgaacaaagttctttttaacatcttcagattggaaatgacgcagtgatttaagtacttttactttctcagcacggatatcttcactattta

SEQ ID NO: 2742 - DNA, 319 bp, Staphylococcus aureus
accagctaaggtcccaaaatatatgttaagtggaaaaggatgtggcgttgcccagacaactaggatgttggcttagaagcagccatcatttaaagagtgcgtaatagctcactagtcgagtgacactgcgccgaaaatgtaccggggctaaacatattaccgaagctgtggattgtcctttggacaatggtaggagagcgttctaagggcgttgaagcatgatcgtaaggacatgtggagcgcttagaagtgagaatgccggtgtgagtagcgaaagacgggtgagaatcccgtccaccgattgactaaggtttccaga

SEQ ID NO: 2743 - DNA, 215 bp, Staphylococcus aureus; identical to SEQ ID NO: 2735

SEQ ID NO: 2744 - DNA, 247 bp, Staphylococcus aureus; identical to SEQ ID NO: 2620

SEQ ID NO: 2745 - DNA, 319 bp, Staphylococcus aureus
tacgataaacgtttcataaccttcgtttgtagccaactgttttaaagcacctttttctttatccgttgttgcaaatatacgtttttgtgcttcttctttaccgtatctttcttcaactaattgtttgaacaatctaaatgcaactgctggttctgtagttgtaccagatttagaaataacgtttacagagaaatctttgtctgctaaataatcaactaactctttcgtatatgttgatgataagtgattaccaacaaatacaatttcagggtattcattgctgtttctaaatgatgacgttaacatttcgattgctgca

SEQ ID NO: 2746 - DNA, 287 bp, Staphylococcus aureus
agtttctttttcactcaaagtttgtcgacttttgtcactcgtataaccatcatttttttcaaattcgaattcttcatgatcattttttatttgtgtttcttgtgtagttaatctatcgagctccatttcaaaatgatgcacttgctctttaagtgtattatgcttttgacttttttcaaaatacagttcacttaattgatcactttttatcttcaactctttaaattgttgttcaaatgattctgtttgacgcaagtaatcttctaattggtgtctcattgttgtca

SEQ ID NO: 2747 - DNA, 94 bp, Staphylococcus aureus
gatccatcactttgtcgtcaccaattggttgtgtatctttaccagacttactacctttgctaccttgttgtcctttagctggttgttcacttac

SEQ ID NO: 2748 - DNA, 312 bp, Staphylococcus aureus
tcatttgattttgaatataatgtatattgactatgttcacctgtcactacatgtgcagctacaatacgatgtggatttttctttaattcttttaataaagttattccacgttgtgctcttttagcaacttgtaagattttaaaactaatacgttttaacgagccgcgttgtgtggccatcaatatagtatcattttcagaaacaccttctgtcataacaacgaaatcttcagctttaagatttattgatttaacaccagctgcccttaatccggtatctgatagttcacttgtattatacgttaatgacata

SEQ ID NO: 2749 - DNA, 301 bp, Staphylococcus aureus
ggatttgcttgacctcgcggtttcgctgccctttgtattgtccattgtagcacgtgtgtagcccaaatcataaggggcatgatgatttgacgtcatccccaccttcctccggtttgtcaccggcagtcaacttagagtgcccaacttaatgatggcaactaagcttaagggttgcgctcgttgcgggacttaacccaacatctcacgacacgagctgacgacaaccatgcaccacctgtcactttgtcccccgaaggggaaggctctatctctagagttgtcaaaggatgtcaagatttgg

SEQ ID NO: 2750 - DNA, 327 bp, Staphylococcus aureus
cctttttataattgagacactaatgcttcaacagtttgacttgatgatacagctgctttttctaaaaatgcttcgaagctcatttccgcttctccatttgctaagtctgaaactgcacgaactacaacaaatggtacattaaattgataacatgtttgtgcaattgcagttgcttccatttcaaccgccatcgcatttggaaatgcttttttaattttttggcgttgttcaacactaccgataaagctatcaccacttacaattaagcctactttagctgttaattgttgttgttgtacaacttgagatactttttctattaaaggt

SEQ ID NO: 2751 - DNA, 319 bp, Staphylococcus aureus; identical to SEQ ID NO: 2745

SEQ ID NO: 2752 - DNA, 276 bp, Staphylococcus aureus; identical to SEQ ID NO: 2225

SEQ ID NO: 2753 - DNA, 296 bp, Staphylococcus aureus
gacttgtccaccatcttctgaaacttgtttcaagaagttgtatgcctcgtctacttttttcactgttttttgtaagtcgatgatataaataccatttctctcagtgaagatatattttttcatttttgggttccaacgacgtgtttggtgaccgaagtgaacacccgcttctagtaattgtttcattgaaattactgccattataaattcctcctattggttaattacctccatagcaaactattgtaaagacaatatataaatattgcaccctttacacaatcacgtttgatatg

SEQ ID NO: 2754 - DNA, 203 bp, Staphylococcus aureus
cagctgcacttttatctgtttctgcttgtgcttcttttttagcttcttgaatctcttgtgcctcttgtgatgtatcactcaaattatttgcacttgcttcttcttttatcgctgcttgttgtgctttcaatgccactgcttttgattctttatttgatacagccacacttttatccgcttctgcttgtgcttctcttttagct

SEQ ID NO: 2755 - DNA, 198 bp, Staphylococcus aureus
tcatcatctacaagtagtgcttcgtcataagttggccaaggttggtacgtaatagactcttcatgtcctaattttgaccataattcttcaccgatatgtggtgcaataggtgctaacattttaacgaagccttcaatgtaaggtttataaacttcatcaactttataacactcattaataaataccattaattgacta

SEQ ID NO: 2756 - DNA, 286 bp, Staphylococcus aureus
gtgcaataccaccaacacctatcacaccaacttttaattttgtcatgatgtgcctccttaccgtatgatgttattcaaagtaaattgctttgcctgattttgcagactgataaatcgcttcaagaatttttgtaactaccattgcttgttccggtttcacaactggttcagtatcatttacaactgcatcaatccaagcttttgcttcttcttcagcttcatccacttcattaccttcataaaagtcgacgcctttgttttccaattcaacgtgtttggtataaag

SEQ ID NO: 2757 - DNA, 284 bp, Staphylococcus aureus
gatttaatctgatgccattgaatatctttattttgatttaacttactaataacatcagttttgattttgcgttgtgcatcataaattaattgacctgattccctcatatatacaaatcctcgagaaataatgtctggaccagaaagtaatttatttgtattaaaatcaatactaacaacaacgataactaaaccttcttcagataatagcttacggtctcttattacaacattaccgatatcaccgataccactaccatcaacaagtacattaccagatggaat

SEQ ID NO: 2758 - DNA, 165 bp, Staphylococcus aureus; identical to SEQ ID NO: 2162

SEQ ID NO: 2759 - DNA, 263 bp, Staphylococcus aureus
cataactacttttgtacctttattaaacacacctttactgtcaaatacgacctcaccaacaccttcatgaattaaagacattggcaatttctgagataagacattctcatcacggctaccagtataatatctttgatcggcagcacaaattgacatatataaaggacgtacaatgacatagtcactgtaaatatctacgttgttatacgtaacttcaaattgtctaggtgcaactaattgatatacttgattaatcatcggca

SEQ ID NO: 2760 - DNA, 148 bp, Staphylococcus aureus
agcttttatcttaccaacggtagtgagcaaatgctttgtttgcttcagccattttgtgagtgtcctcacgtttcttaacggcaccacctgtattatttgctgcatctaaaatttcgttagctaaacgatcttccatcgttttttcacc

SEQ ID NO: 2761 - DNA, 217 bp, Staphylococcus aureus
tacacctaaactatctgcatattcaattttttcaataatgtcgtcttttgctttttcaccttgaaccaaagtactaatttgtatttgttcagctaatggaaaacgactatttatcgttgaatggatatctcgaattgcggcacctgtactcgctgttaaaactgcaatttttttaggaaacttaggtattgatttcttattcgctttatcaaaacaa

SEQ ID NO: 2762 - DNA, 186 bp, Staphylococcus aureus
tacattttctttcaaagatacgatcacatcatacaatttttctaacgtaccacttggtgcatctacttttttattatgatgtgcctcagtcaattcgatgtcgaaatcatcaagtaggggaacagcagctgctaaaattttagtcaatgcatgaacgccataactcatgttcgcgctgaaaaacac

SEQ ID NO: 2763 - DNA, 147 bp, Staphylococcus aureus; identical to SEQ ID NO: 1791

SEQ ID NO: 2764 - DNA, 305 bp, Staphylococcus aureus
gaaaaaatgaaaactttgaagggagcattttacaatgtccaagactcaacaattttatttaaacagtattatcagttataagttttattagtcagtctttcatcaattattgttcttctaaaatcgaatagccattacaaaatttacacattaaaaaaagacccctcgattgagggatcttctttttatataaaatctaagaaattagaaattatttaatgatttcagtaacaacgcctgatcctacagtacgtccaccttcacggattgagaaacgagtaccgtcttcaatcgcgattggagcg

SEQ ID NO: 2765 - DNA, 196 bp, Staphylococcus aureus
tccaattgttttaaccttatggacaatttgaccttgtgtatcaaaataataaccaaatgcctctccgacagcttgatgatgttgaagttgttcaatgaccttttcaggtgattgacgtcgatgcgccatcttcagcgcatcaccaatgccgtgtaatataacgtttgcttgtttaattttgtctaaagtgtttatg

SEQ ID NO: 2766 - DNA, 196 bp, Staphylococcus aureus; identical to SEQ ID NO: 2765

SEQ ID NO: 2767 - DNA, 343 bp, Staphylococcus aureus
cctgctgcttcgatatgtctacgaaatggttctgaacgaacatctatacaaaatgcaatttgcgctttcgttgatgtgcccatctgatttagctcgctattattttcatcaactgcttgtgtgtcatttaacaatactgaatgtggctgattagcgttatcattttctgagacatttacttggtttacatctaatgcgcccgccacactttcatgacctgctttaattttttgttttaactgagattcgtatgtcatttcccaggcaattagccataaatttttaaatacatttttattcatagttgctgcaaaatgaataaacgtttgaatttcattgacgt

SEQ ID NO: 2768 - DNA, 162 bp, Staphylococcus aureus
actggcatcatgaatggtttgtcagaatcacgttctggagttggaatgtaagtatctacagcttccattaattctaagattttttcttcgtattgagcatcgccttctaaagcttttaatgctgaaccagcgattacaggtacatcgtcacctgggaagtca

SEQ ID NO: 2769 - DNA, 185 bp, Staphylococcus aureus
ctatatagttattgccatcaaattttgagtttgtaatatacgccaagcgatgaatcttaacattcgattctttagaggactggtttttcagcaaaccaattatcttttcaatcgctatcctcatcgtcatttcctccaagtatttcgattgataatatctttatagctttgaataattttaacta

SEQ ID NO: 2770 - DNA, 166 bp, Staphylococcus aureus
tgttcaatatctgatctatttaaatacaacatctctctattcattctgatttaactccttgtcttgatttcattttttctaaccatgtatctgaataaactaaatctaagtaacgatcgcctcgatctggtaaaatcgtgacaattgttgcaccttcttcaattgt

SEQ ID NO: 2771 - DNA, 166 bp, Staphylococcus aureus; identical to SEQ ID NO: 2770

SEQ ID NO: 2772 - DNA, 478 bp, Staphylococcus aureus
aattttccaattgttgttgttttaccaacaccattcacaccaaccattaaaatgacatttaaacgaccatcttctaagttcatagcttctgaattatcatcttcttgatggtaaatctctacgatcttttcaacaatgacttcacgcaaatcttcagtatcttgaatattacgtcgttgtgcttccatacgtaattcttcagttaacgtcatcactgtattaaaaccgacgtctgcagtgattaacatttcttctaaagcttcaaaaaagtcttcatctactttacgatatctcgctatcaaattatttaattgttcttggaaattttgacgagatttttcgagtcctgctttaaatttagcacccattttttgagcttcaatttcttcaaaatcttcaattgatattaagccatcgtcatcaaaatccgcttcactcaacttgcgtggcttctttttcacttcagcattttctgcta

SEQ ID NO: 2773 - DNA, 140 bp, Staphylococcus aureus
tgcaactgctgctgcagatccacctgatgaaccacctggcactgctttatggtcaaatgggttaactgtttttttgaaataagatgtttctgttgaaccacccattgcaaactcatccatatttaatttaccgattaaaa

SEQ ID NO: 2774 - DNA, 241 bp, Staphylococcus aureus
ttcatcatagcataactttctgcaattaattgcatgtcagcatattcgataccattgtgtaccattttcacatagtgtccagcaccattaggtccaatataagtaacacatgaagcaccgtcttttgcctttgcagcaattgcatcaagaatatctgcaactttgttataagcttcttcttgtccacccggcattaatgacggaccagttaacgctccaatttcaccaccagaaacgccca

SEQ ID NO: 2775 - DNA, 505 bp, Staphylococcus aureus; identical to SEQ ID NO: 1899

SEQ ID NO: 2776 - DNA, 505 bp, Staphylococcus aureus; identical to SEQ ID NO: 1899

SEQ ID NO: 2777 - DNA, 249 bp, Staphylococcus aureus
aaagttagcaaatgctgtacctaattctgatccaatgtatcctccaccaactacaactaatttacctggtacttcttgtaagtttaaagcacctgttgagtcgataacacgtttaccgaatttgaaattaggaatttcaattggtcttgaacctgttgcaatgattgcatttttaaagttgtatgtttgtgcgctcttttcgtccataacacgtaagctattgttatctacgaaatatgcttcaccttt

SEQ ID NO: 2778 - DNA, 180 bp, Staphylococcus aureus
tccttatttgtattggttgttattaattaaagtacttctggtgctaatgatacgattttcatgaagttaccttcacgtaattcacgagcaacaggtccgaagatacgagtaccacgtgggcctttgtcatcacggatgataacacatgcattttcatcaaatttgatgtatgaaccgtca

SEQ ID NO: 2779 - DNA, 75 bp, Staphylococcus aureus
cgcattttcataatttacagctttcgctgcacgaactgcggcatttcccatttcacgacgtgtttcatcatctaa

SEQ ID NO: 2780 - DNA, 86 bp, Staphylococcus aureus
atacaataactttaggatttttcttcggcgcgtcacccataaaacttacaaaatatgggtttggacctttaacgtatccaccacca

SEQ ID NO: 2781 - DNA, 231 bp, Staphylococcus aureus
tgcaaatctttcagcatcttcatcagttgctgcttcaaccatgacacgaactaatggttctgttccagaaggtcttactaaaattcgaccttctccattcatttctacttctactttagtcataacttctttaacgtcaacattttcttcaacacgatatttatctgttacgcgtacgttaattaatgattgtggatattttttcatttgtccagctaattcacttagtga

SEQ ID NO: 2782 - DNA, 298 bp, Staphylococcus aureus
aaacttgatttacctacgtttggtcgtccaataatggatagtcgaattgtatcttcatcataaggatcttcttcctcttcaccaaaatgagaaacaactgcatctaacaagtcaccaagacctaaaccatgtgaccctgatatcggatacggttcaccaaatcctaatgaatagaaatcatacacgtctgtacgcatttccatattatctactttgttaaccgctaatacgaccggttttttagatttgtataaaatttgagcgaccatttcatcgctttgtgtcaatccttcacgca

SEQ ID NO: 2783 - DNA, 221 bp, Staphylococcus aureus
tatcatcgtgattttgttcaacaatcgcacttagcgttctagaaattccaattccgtaacaacccataattaaagattgagcttttccttggttatctaagaatgtagcattcattgattctgaatacttagtacccaatttgaatacttgaccaacttcaataccttcagcaaaatgtgcaacgcctgaaccatcacttaacttttcgccttctaaaata

SEQ ID NO: 2784 - DNA, 160 bp, Staphylococcus aureus
gatcatacgtacggtagtctcccataacacctactgattgaatgtttggtaacactgtgaagtattgccaaatttctctttcaagaccttcttctctaatcacttggcgtaaaatcgcgtctgattctctaacgatttctagtttatcttcagtaatttc

SEQ ID NO: 2785 - DNA, 288 bp, Staphylococcus aureus
tgtccatccgcctatattatttttaggaataattacacgtttgaaacctagttttgcagcctcttgcacgcgttgttctatccgagatacacgacgtacctcacccgttaaaccaacttctccaatatagcaatctaatccgtcgacagctttatctttaaagctagatgcagttgctacaattacacttaaatcaactgctggctccgttaactttacaccgccagctactttgatataagcatcttgttgttgtaatagataattttctttcttttccaaaacagc

SEQ ID NO: 2786 - DNA, 306 bp, Staphylococcus aureus; identical to SEQ ID NO: 2484

SEQ ID NO: 2787 - DNA, 175 bp, Staphylococcus aureus
cattagcaaagaagacattgccgatttcaaataattttacatctttatttttgcgtgccacattatatgatgccgcttcgattaaatgtggtaataaactttgacgtaatgacgcatgcgcttcactcattggcatcaataaatcaattgtttgacgctgttgcatcgaaaatgc

SEQ ID NO: 2788 - DNA, 415 bp, Staphylococcus aureus
catttctggaattgttgacatcattagtgcaggtaaaattgcaaagtattttgctacgtcattagccaaactaaatgtcgttaatgcacctctcgtcattaataattgtttgcctatttttacaacctctattaactttgtaggattcgaatctaaatcaattagattagctgcctctttagcactaattgtccctgagttcatagctaatcctatattcgcttgtgctagcgcaggtgcatcatttgtaccatctcctgtcatcgcaacaatatggcctttcgcttgttcatctttgatgactttaattttatcttcgggtttacactctgcaacaaatctatcaaccccggcttcttttgcaattgtagctgctgttaaagcattatcacctgtacacataactgtttcaatc

SEQ ID NO: 2789 - DNA, 435 bp, Staphylococcus aureus
taagaagaacggcgtatgtttaactttatcgagtgactcgccattatttagcgaatctttttcttcaacagtaacatcttcttcatcttcttttctgcgacgtttcgcaaataaaagtggtaaatgttttgtatcgtctaaagtctcttttattgaatctttattattatctcttatttctaattcttcctcttcatcttctttacgacgacgtttggcaatgaagaaccagaaactagctagtaaaccagagatacccaccacaccaatagcgtttttaataacattaccgaaattattactaaagtgacgcatatgaagtggatcaatgtcatcatcttcatcaagtttctttttatgtccaatagtcgaactgttaaatggatgatttgcagttccataaccaattgttaaatggctattagattcatttcc

SEQ ID NO: 2790 - DNA, 176 bp, Staphylococcus aureus; identical to SEQ ID NO: 2304

SEQ ID NO: 2791 - DNA, 171 bp, Staphylococcus aureus
aaattctccgccaagaattctaacgatatcaccatttttacaaccacgttctctaagcgcatcatcaatacccatcgaacgcatttgacgagcaaatcgacgtactgctggatcactgttaaagtcagtcattttaaacattctttcaatagcattaccacttaccacata

SEQ ID NO: 2792 - DNA, 347 bp, Staphylococcus aureus
tgcatatctcttttaaattttttcacacttcttctattagctattgcttgttgtaattccatctaaaatcgctcctccacgaacaatgataatacttctcaattataagacagcacttacacaaaagcaacctaattcattttattagtataaagtcacttgtgcttttaaatcagtaacatcaatctgtcctggagcttgtggtactccgatacaaccataagtcaacgcaccaccaaaaacgccttgagccgttctacttattagtccaagtttagacattgaaataccaacaactttgcagtccatagtatctgaaaatgtagacattgcctgcaataaattta

SEQ ID NO: 2793 - DNA, 330 bp, Staphylococcus aureus
cgtacaccagcatttcgcgtaattttaccttcagtaacataacatccagcaatagtaccaactttagaaactttgaatgtttgacgaacttcagcttgtccgataacttgttcttcaaattctggatcaagtaaacctttcatcgctgattcaatttcttcgataacattataaataactctgtgtaaacgcatatcaacattttcagcttctgcagcacgttttgcaccactgtctggacgaacattgaaaccaatgataataccatttgaggcattagcaagtgtcacgtctgactcattaattgcaccaaccgctgtatgaatgata

SEQ ID NO: 2794 - DNA, 218 bp, Staphylococcus aureus
tgtttggcaaatgctaatttttgttcttcaaaagtggctaatgtctgaatctcatttataattagttgacgttgttgctttctatggtcaaatttcccgctaactataaacaagtcattatgtgataacaactcttcgtactttttaaactgattagggaaaatcacaccatctaaagtttcaatgccatcatttaatgtgacgaatgccatattttg

SEQ ID NO: 2795 - DNA, 164 bp, Staphylococcus aureus
tacctgtgcggtcatccgtaccatccacataattaaaggctctacgtaaaattgacgtatttgcttctttcgctagcctcgtatgggcatctttatcaataatatactcgccatgactatctttcgcttttaagtcaatttcatcaaactctttcccacctgtt

SEQ ID NO: 2796 - DNA, 374 bp, Staphylococcus aureus
caccttcatgctcaacgccgttctcttcaactagacgacgaacaagaatttcattagattcaacatgttcaacacgacctctgtgcttagctgtaatagccgcaccagaatcacgtgctgcaacgtgttccatacctgtaccaacaaatggtgcttctggattcatcaaaggcactgcttgacgttgcatgttcgcacccatcaatgcacggtttgagtcatcattttctaagaatggaatacatgctgtcgctgctgaaacaacttgcttcggcgatacatccatataatccattttttctttagccataactgtattgttaccacggaaacgacatacaacttcatcatccatgaaacgaccattttcatct

SEQ ID NO: 2797 - DNA, 212 bp, Staphylococcus aureus
tcctcaactggcatcatgaatggtttgtcagaatcacgttctggagttggaatgtaagtatctacagcttccattaattctaagattttttcttcgtattgagcatcgccttctaaagcttttaatgctgaaccagcgattacaggtacatcgtcacctgggaagtcatattcgcttaataagtcacgaacttccatttctactaattctaa

SEQ ID NO: 2798 - DNA, 79 bp, Staphylococcus aureus
caacgcattcaacctcaataccgtgagcccgtaacgtctcatcaccatgtgtgtctaacgaattgtcttttgttgcgta

SEQ ID NO: 2799 - DNA, 374 bp, Staphylococcus aureus
tattttggtttgatttcaaaggtacttaatactgaatcaagcatttctctatgctgtgctgtaacaacaacaattggctcgagcattttttcttgttccaaagctttaactaaaggagccatctttatggcttcgggtcttgttccaaatatggtcataatctttttcatcaaactacttatctccgattcttctatttagtaccaaacaatctatctccagcgtcgcctaaccctggtgtgatatatgctttgtcatttagcttttcatcaagtgcagcaatataaatatctacatctggatgtgcttcatgcatcttttctacgccttctggtgctgcaattaaacacatgaagcgaatatttttagcgcca

SEQ ID NO: 2800 - DNA, 135 bp, Staphylococcus aureus
catatcttgatacgtttgatctaatgatgcctcgtcagcatggaatgaatatgcatctttcataataaattcacgcccacgaagtaaaccaaaacgtggtctcttttcatcacggaatttagattgaatttggaa

SEQ ID NO: 2801 - DNA, 238 bp, Staphylococcus aureus
tctggtacctcttgagctttaccagtaccgaaacctacacgaccatttttgtctccaactacaactaatgcagtgaaacggaaacgacgaccaccttttacaacttttgctacacggttgattgtaacaacgcgttcttcaaattctttcgtctcttcttctctacgagccatgtatttgtccctcctttaaattaaaattctaatccgctttctcttgctgcttcagctaatgcttt

SEQ ID NO: 2802 - DNA, 149 bp, Staphylococcus aureus
agtacgtccaccttcacggattgagaaacgagtaccgtcttcaatcgcgattggagcgattaattctactgtcatttcaacgttatcaccaggcattaccatttcagtaccttctggtaagtgaacaacaccagttacgtcagtagtac

SEQ ID NO: 2803 - DNA, 214 bp, Staphylococcus aureus
actaataatttctccagttaatggattttttagtgttggcgtcgttattgtcttctcacctttttgtccttctcttgttactttttctgtccctggtgctaaatcaggattaaatttacgttctttctcgaatggaatttcttctttttctacaatcgagtctccttttacaggtccatattttgttacgctatcgaccggtggtctaactaca

SEQ ID NO: 2804 - DNA, 997 bp, Staphylococcus aureus
taacagattcaacaccagctaagtttgtagcttgtgaaatttgatttgttaaatcattacgttgagctgtagtgatatgcgttaaagtacctaaatgttgtttcgctgcgttttgagctgcaattaattttgcatcaccattcaatgcatctttcgcattattaacacgttgtaatgctgcttcaactgcattttgcgcagtgtttggacctgtcgatttatttaaaatcgctttcgctgcagtaatagcattatcatactcttgttgtttatttgtatcagcatcacgatatttctcagatgatttcacttgagattcgttgttaataccattctgtaagctagccatagcttggtctagatgttgcgcattttgttttacagtatcaacaccactcactcttgtcgcactagtaatttgactaatcaaattgttcttttgagcatctgtaatacttgtcaatgtgtttaagtacgttttcgcattttgttttgcagcagctaagttttcatcaccgttaagtgccgttttagaactattcacttgctctgctttttgtgtaatcgtacttggattcatttctggattactattagcattaataatcgtttcagcagcagctactgcgttgttatatgctgtttgcttatcattattagcatctacgtaatcttcacttgctttagtcgcatctttgttggcaatactttgtcttaacgtattcatggcttgatctaatgtattggcatttgattgaaccgtttgaacaccagcgacagtagtaccactattaatttggtttgttaaattcgttttttgtgcagttgttaaatgcgtcatattatttaactgctgttttgctgtttgcttctgcttgatctaataaactgcgtaccatctaagttatttttagcagaattcacttgattcatcgcttcagtaacttgatctttcgttttattttgaccatttgatttatttaaaatatctttcgca

SEQ ID NO: 2805 - DNA, 114 bp, Staphylococcus aureus
tttgctgatttcacacgctcatcatgacgaacgattgctttttcaattgaaactttttctacaaagcggttgtttttatcacgtaaatctttaggtaattttgagttagcttca

SEQ ID NO: 2806 - DNA, 168 bp, Staphylococcus aureus
tgtttgattttagtcgtcgaaatgccttctgtacgttttaaataaatgacttcacatttatcctttaagaagtcgaattcaccttcccagtcatgtcccataacaaaaacatctacatcaaatttttcgacatcgtcttctttttgtccccagcccttttctggaatg

SEQ ID NO: 2807 - DNA, 276 bp, Staphylococcus aureus; identical to SEQ ID NO: 2225

SEQ ID NO: 2808 - DNA, 259 bp, Staphylococcus aureus
ttatataaaagtagttagtgtatttatataaattcttatactaattcgataattactgattcagcaccgtcaccgcgacgagggccttgtttaaggatacgagtgtaaccaccttgacgttctgtgtaacgctctgcgatttcaccaaataatttttgaagtgcagtttgtgtagtttcatcttcgtttaagatttcaacattacgtaaagttttagctgcattacgacgagaagctaaatctccttttttacctaaag

SEQ ID NO: 2809 - DNA, 207 bp, Staphylococcus aureus
gattctaagtccgctagtactaattccatattaataacttcaatatcatcaatagggtctactcgaccagcaacatgagttacgttatcatcatcaaatgcacgaacgacctgacaaatcgcatctacttctctaatatgtgataagaatttattacctaacccttctccctttgaagcacctttcacaataccagcgatatctgta

SEQ ID NO: 2810 - DNA, 267 bp, Staphylococcus aureus
gtcagcatggaatgaatatgcatctttcataataaattcacgcccacgaagtaaaccaaaacgtggtctcttttcatcacggaatttagattgaatttggaataatgtcatcggtaattgtttgtatgatttcaattcatttcttactattgatgtaactaattcttcatgtgttggacctaatgcaaattgtcttccatgtctatcttgtaaacgcattaattctgggccatatgcaccccaacgtcctgattcttcccataattc

SEQ ID NO: 2811 - DNA, 211 bp, Staphylococcus aureus
gaagttcattcaattcttgatttactttcgctatattttcttttggatccaactttactaaaaatagttcagcatctccatcttcatgcaacgcatcataaatattttcaaagtaactaatatcacgcgttaagaagccatcgcgttccccagtgattttcattaactcagcaaatgtttttaaaccttctctatcagatcgttctactgt

SEQ ID NO: 2812 - DNA, 539 bp, Staphylococcus aureus
caattgctctatcacttttaaataaggaactaaatgtgaagattgaaaaataaaaccaatatcttccaatcgtaaatcactaggacgatgctgtttatcaaacaatggcgcatcattgtaaagcactgtaccactcgtttgacttaacaatccgcctaatatcgttagcaatgttgttttcccagaaccagaggcaccatttaaaatgacaaattccccttgttccacttcaaaattaataccttttaaaacttttgtttcagacaaaccttctccgaaatttttgacgatatcttcaacgactaatgccattattctgcacctccaattgcttcgataggatccactttaaataatttgataaatgatagtgaggcacctaaaatcgctactaatataaatatccccaccattaataaaatattttgcgttgttaagtaaaaaggcatcgttaccggcatcataaatgatagtcctactatgatgatcacagcaatacctaccccaattattgttagtgttaaaatttgtaaaactaa

SEQ ID NO: 2813 - DNA, 215 bp, Staphylococcus aureus
aaactacctttagataaatagttatttacattatctgcttgtcttctaaaaacaacacagttaataaaatctgcttcgcgctccccttgagcattcgtgaacgtacgatttactgcaagagtgaatgtcgctacactcacacctgagggagtggttctgtattccggatctttcgttaaacgacctactaatacaactctatttagcatttaaac

SEQ ID NO: 2814 - DNA, 217 bp, Staphylococcus aureus
  misc_feature (1)...(217): n = A,T,C or G
tgtctcagcagtttcttgcgaccattcaccagactcaaacgcacgtcttgcanctaagattgcacgttctgcatcctcttttgtcccttcagaaaccgcaaatatcacttcttgattgnaaggattgataatatctcttggctttttattcgcgctttcaacccactcaccatcaatatattgacgctganataaatgttttaaaagttccattcaa

SEQ ID NO: 2815 - DNA, 177 bp, Staphylococcus aureus
ttgcatgttcgcacccatcaatgcacggtttgagtcatcattttctaagaatggaatacatgctgtcgctgctgaaacaacttgcttcggcgatacatccatataatccattttttctttagccataactgtattgttaccacggaaacgacatacaacttcatcatccatgaaacg

SEQ ID NO: 2816 - DNA, 106 bp, Staphylococcus aureus
tattttatttaattatttcccatgttctgctaaatgacgcatcacttttacttcatgaggcgtcaatacacgtccttcaccagcattcaaaccgacaacatttaaa

SEQ ID NO: 2817 - DNA, 118 bp, Staphylococcus aureus
aatacgaacttgctcgccaacttcgagttcaacatcgatagtcttttctttaagacccatttgttttaagatgaagcgaacttcttctggtaacaatggatttggcttagaccctgca

SEQ ID NO: 2818 - DNA, 383 bp, Staphylococcus aureus
cgttgtaaattgacaagtgtcgcacggcggtttttaagctcatcagcaatatcttgtgtatctgaaaaaacacgtggttcgaataaacacatttttgaactttcttgtgatgcattgtttggtgtagcattgttcatagttacaacattacgtgaattattttttgaataattagacatacggttattcctttcttctgacgttgttgtatatcttgatgcagatttttgagggactgatttgattgcgttttgttttgttgtttgttgtgactgctcttttgctggcgcttcatttacctgttgttgtttgtcaggtacttctacttcctcttcatcatctattacaaaaaatccactaaataaatcttttaaagccaagtg

SEQ ID NO: 2819 - DNA, 247 bp, Staphylococcus aureus
caccaatacgacgagcttgtttttcatcactaaatacaacaaagcgatccccagcttgtggcacatcattaatacctgtaatttcaacaggcgttgatggaccagccgttttgattctttgacctaagtcattaaccattgcacggatacggccgtaagtattaccaactacaatcgcatcaccaacatttaatgtaccgttttgtactaataatgatgcagaaggaccacgtgatttatctaattc

SEQ ID NO: 2820 - DNA, 341 bp, Staphylococcus aureus
tattgtgtaatacatcaaaccactatgtttacccattttcttaccatcaagtgttatcatatcacccggttgtgcaggtaaatattgtgataaaaatgttttaaagtttttttcgccgataaaacaaatgcctgtagaatcttttttcttagcagtaacaagtccttgttcttcagcaattcgacgcacttcactcttttcgatgtcgccaattgggaacatcacttttgaaagttgttgttgagataattgattcaagaagtatgtttgatctttattattatctacaccacgtaacatttcaacatgaccatcttcatgacgatgtatgcgtgcgtaat

SEQ ID NO: 2821 - DNA, 223 bp, Staphylococcus aureus
ccaatattcaccttttgtttcaggatctttaccatatgtagcaataccgccatgaagttgagctacatcttcgaaaccttcttttaaaagccatccagaaaatttttcgcatcgaatgccaccagtacagtacgtaaccacttttttatctgcaaataacgctttattctctttaatccagtcaggcaaatctctaaaacgtgtgatatttggacgaattgca

SEQ ID NO: 2822 - DNA, 413 bp, Staphylococcus aureus
tctgctgcactcataaccgcaaaagttaataatgctcctgtttttgttttgtgtatcatttccaaagtttcaagatcaattggttggccttcgctttgcatatctaacatttgaccgccgaccattccaacatgaccacttgctattgacagccgttgtagaacttttatttttacttcatcagttaatctatcatcacttgaaataagttcaaatgctttagttaataaagcatcacctgctaatatcgcagtccactcaccatatactttatgatttgttaattttcctcgtcgataatcatcattatccatcgctggtaggtcatcatgaataagtgaatatgtatgaatcatttctagtgcaattgcgctcttcatacctaactcatactcggtatttagtgaatctaa

SEQ ID NO: 2823 - DNA, 412 bp, Staphylococcus aureus
tccaatacgattggcatttgatcccgaacccactgtggcactttacaatctataaacaggcgattcactttcttataaccatcgcgcccattcagtttaaatgtatcgccactttgtcgtgttctcactgtaagcggaaataaacattttggtaaattagaatgtatctctaatcgatatttgttaaaaatataattacctggctttttaattgtttgaactctaaaatatgtatcgccattatttttagccattattattaatttaccatatgcgatttgaattatccatttatccgtgagattaatactgaattgtgctttcttactactaaattgtttaaaccactcttcgtatgttttagcactaatattaaacaactcataatactttgataataggcagtccaaca

SEQ ID NO: 2824 - DNA, 250 bp, Staphylococcus aureus
tgcatacgttgctctaatacagcacttttttctttctcttttcgtggcaaaaatcctaaaaatgtatatacatatgaaggtaatccactagccatcaaagccgtcagcccagcattaggtccaggcacagtctctactttaatattagcttctctggctgccactactaattcgtatccaggatcactaattaagggcaatccagcatcagatacgagcgcaacgtcaagacctaattctaactgttcaa

SEQ ID NO: 2825 - DNA, 188 bp, Staphylococcus aureus
ctaatacataatcagcttcgattgttttctcttcgcctttagcttcataagtaactttaactccgttatctgtttcttcagctgatttagccatagcttcagtaacgatttcaacacctttttctttcataccttttttaacaggttgtgtcatttgtttttcgaagccacctaagatatctttagca

SEQ ID NO: 2826 - DNA, 239 bp, Staphylococcus aureus
caacgatatcggcatcttgctcaatcgaaccagattcacgaatatcactcatcattggacgtttatcttgtcgttgttcaacaccacgagataactgacttaatgcgataactggacattttaattcacgggctaatgcttttaatgtacgagagatttcagaaacttcctgttgtctgttatcggacgcacgtgaaccactaccttgaatcaactgtaagtagtcaatcacaatcatg

SEQ ID NO: 2827 - DNA, 207 bp, Staphylococcus aureus; identical to SEQ ID NO: 2809

SEQ ID NO: 2828 - DNA, 192 bp, Staphylococcus aureus
ggtaatggtcgcaatgatttagttagtagcgtgaatttcttcgctttaaccgataattcgccagtatttgttttgaacattacaccttcaacaccaacgatatcgcctaaatcagcatttttccataaatcaaattcgtcatcgccaacttgatctttacgaacgtaaatttgaatttgtccagctaagtcc

SEQ ID NO: 2829 - DNA, 290 bp, Staphylococcus aureus
agttaaactcaacttcttaccgacttcttcatcttcaaatttaggccaaagtatccctggtgtgtctaatagttgtaatgcattaccaactttaatccattgttgttgtttggtcacacctggtttattaccagtctgcgcaatactacgctttgccagtttatttattaatgtggatttaccaacatttggaattccaacgatcattgctcttatcgctctaggtttaagtcctttcgctttttcgcgttcaaatttttcagcagtcgccttaattgctgcagcttcca

SEQ ID NO: 2830 - DNA, 218 bp, Staphylococcus aureus; identical to SEQ ID NO: 2794

SEQ ID NO: 2831 - DNA, 181 bp, Staphylococcus aureus
ccatcaacgccattattttagcgcctttaattaatgcttcatcaccatgtacactcgcagccgcttctctaaatctatgcgtatgtcctactaaattacgtgatcctattttaatatgaggatgtattgttggcacaacatgacttacgttccctgtatccgtagagccataaccaaaatc

SEQ ID NO: 2832 - DNA, 149 bp, Staphylococcus aureus
tcactctaatttgacttggcttttccaaattaaaaggtgctacaaattggcgcatgatttcttgttcatccgtaaaatgcgtgttaacttcttcaaagtcaactgcaacatctgccacaatacgttgtcgaacctcatcatctacaaca

SEQ ID NO: 2833 - DNA, 211 bp, Staphylococcus aureus; identical to SEQ ID NO: 2811

SEQ ID NO: 2834 - DNA, 145 bp, Staphylococcus aureus
cagtcataatacgcaccgcttcgtgatccccaactaatttatcagaaactgaacctgcaccaatatgatcaatcactttaaactcaatgcgattctgaccacttgccccttgtgaatcaacactgcgaattgcaaaaccatcata

SEQ ID NO: 2835 - DNA, 260 bp, Staphylococcus aureus; identical to SEQ ID NO: 1815

SEQ ID NO: 2836 - DNA, 703 bp, Staphylococcus aureus
tacaccatctttttcagcagataatatcataccttcagatttttgtcccattaatttagctggtttcaggttagtaacaactgctacttttttaccaataatatcatctggtgtatagaatttggcaattcctgatacaatttgtctttgttcagaatctaagtctacttgaatttttaaaagcttatctgacttcttaacatgttcagcatcaataatcgttgctgccttaatttcaactttatcaaagtctttaatatcaatttgaggtttgctaggaatctcttctttttcctctttagtagcaggcggttgcattgattctttgatatatgcaatttccgcttcgctatccaatcttgggaaaataggtttaggttgcccagtaaccataattgactcattaagcacaccatattgctctaaactactaaattccataaattgaggattgttaatgttcaattgttcaaaaatctctttcggcgcatgtgttaagaatggacgtaataatacagctgcataacgaatattttcaactaagtgagccattacattgcctaacatatctttttggctatcgtccttagctaatacccaaggcgttgtttctgtcaatatacttattcgttctacataataaacttccataccgtagataatgccacagaaaattgcaaactttccatgctttcagtgtagc

SEQ ID NO: 2837 - DNA, 149 bp, Staphylococcus aureus; identical to SEQ ID NO: 2802

SEQ ID NO: 2838 - DNA, 234 bp, Staphylococcus aureus
cctttttcatgagcgtattcaacaacttttttagttgttgctacgttttcttcgaatgggctgtgtgaagcatcgatcattactgatgtgaaaccagcatcgatagcttctttacatttttcaaagcttgaaccatggtctaaatggattgctacaggaatagtgatgtttaagtcatgcattaacccttcaaccattttaacaattgtgtagaaaccgctcatgtaacgagca

SEQ ID NO: 2839 - DNA, 266 bp, Staphylococcus aureus
tatatgctttatcttctgctagtaactgatctattaatggttggtagatatgttgacgttcagattgacgatatggtccgtagccattgtctttatctacagactcatcccaatctaatcctaaccatttaagattatcaaattgtgatgtttctccatcttctaaattacgttttttatcagtatcttcaattcgaatcacaaaatctccgttgtaatgtttagcatacaagtaattgaataatgctgttcttgcattaccaata

SEQ ID NO: 2840 - DNA, 87 bp, Staphylococcus aureus
tgcatccgatcttgcaacgctgtaaatgtttcgaagccatcctcttctaagaagtgccctccatcttccacgatttgcaagttcccc

SEQ ID NO: 2841 - DNA, 275 bp, Staphylococcus aureus
tgtctttcggaacatgcacaactctccatggttccctcattccgtgatttggagcatcagcagctttctcaattgcttgatatagcaatgcgtcatctatgtgcatatctcttttaaattttttcacacttcttctattagctattgcttgttgtaattccatctaaaatcgctcctccacgaacaatgataatacttctcaattataagacagcacttacacaaaagcaacctaattcattttattagtataaagtcacttgtgcttttaaatc

SEQ ID NO: 2842 - DNA, 201 bp, Staphylococcus aureus
gcccaaatcataaggggcatgatgatttgacgtcatccccaccttcctccggtttgtcaccggcagtcaacttagagtgcccaacttaatgatggcaactaagcttaagggttgcgctcgttgcgggacttaacccaacatctcacgacacgagctgacgacaaccatgcaccacctgtcactttgtcccccgaaggggaa

SEQ ID NO: 2843 - DNA, 156 bp, Staphylococcus aureus
caatgacttcacatggaagtgtgataaagatagatgtaccttgaccttctacactgtttgcccaaatacgaccattgtgcgcttccacaatctctttcgaaatggctagtcctaatccagtaccacccattttacgcgtacgtgccttatctacac

SEQ ID NO: 2844 - DNA, 183 bp, Staphylococcus aureus
actaatttagcacctgtctgtgctgtaatttgtgcaatttgcgcatacgcatcgcttggaatactacttggtacacttccagcaacaataactatatcttcgcttgttgtatttttaatttgttgtaacagttgttcaaattgtgttgacgttatatgaggacccggtgcattgatttctgtt

SEQ ID NO: 2845 - DNA, 403 bp, Staphylococcus aureus
caaaccaagtgctctaccaagctgagctacttcccgtataattaacgcgcccgataggagtcgaacccataacctcttgatccagtagtcaaacgctctatccaattgagctacgggcgcatatgtttttattgaaaatggtgccgaggaccggaatcgaaccggtacggtgatcactcaccgcaggattttaagtcctgtgcgtctgccagttccgccaccccggcactataaaaatggagcagaagacgggattcgaacccgcgaccccaaccttggcaaggttgtattctaccgctgaactacttctgcatatgcgggtgaagggagtcgaacccccacgccgtaaggcgctagatcctaagtctagtgcgtctgccaattccgccacacccgcaaatgg

SEQ ID NO: 2846 - DNA, 166 bp, Staphylococcus aureus
tgtctttgtagtcgatatgtgtaataccatttgctgtgaaatagcatacttttttacgacgacgtccgcctcttcttggtccacctgccatgattgtgtgcctcctttgataattttttcgctttaatttcgttaatttttattagaatggtaagtcatcatcact

SEQ ID NO: 2847 - DNA, 298 bp, Staphylococcus aureus; identical to SEQ ID NO: 2173

SEQ ID NO: 2848 - DNA, 177 bp, Staphylococcus aureus
gccccatttgcaaccaattcatataactatttccggatttttggcgatacttctatttctttcaggatgtgcaatgattggtatgtaacctctcgattgtatttcaaaaaacaattgttttgtataatgtggtacttcgcccgttggaaattcaattaataaatatttcgaacgatt

SEQ ID NO: 2849 - DNA, 177 bp, Staphylococcus aureus
actatattagttgtttgatttaagaccaaactttttgttgaaacgttccacacgtccatccgcagcagcgaatttttgacgtccagtgtagaatggatgtgaatcagatgaaatatctaaacgaataactgggtattcttttccatcttcccactccatcatttctgaagatgtttt

SEQ ID NO: 2850 - DNA, 685 bp, Staphylococcus aureus
caaatataaatttaataatataaagataaggttgtgtttgtattaatgtgatttgtaaaatgaaagtactaatattttttgtggataatcattgatatgtatgtatacgattgcagtttaatgtagtatgaataaaaaatgccacaagcatatgtttaacatatgactgtggcatagtattatgcttgtggaattttacgatgcttaattttataaataatgaagccgataatgaaaccaatcaaactgagaacaacccagcccataccaatgtctgataatggtaaatatttttggctgaaattaatcaaagtttgtgagaatgatgtgcttgaaatgaactctggactagcttttaatccatctactaatgcagcaatcattgtaaagaaaatggtacattgataaataagttttgaatgatggaatttgctactaaataatgttagtacaatcaaggcaattgctaatggatataagaacattaacactgggactgagtacataataatcttagttaaaccaacattcgcgaataagaacgaaataaagcttacaactgttgcaatcgctaggtaattcattttagggaaaaggtgttcgaatgtttctgaaaatgccgtaatcaaaccgatggctgtttttaaacaagcacaccataacgataagtgacaacaggacgata

SEQ ID NO: 2851 - DNA, 349 bp, Staphylococcus aureus
gtcgataaacattcatatcgtagcggtctgcaaattctttaatgcgatatgccggcggtaccatgacaggtaatgaatcatgtttgaattgttcgtctacggcatctttttgaataggtaatccaaagaagcctgcaataccaatcgtttcaaagggccctgctgcttcgatatgtctacgaaatggttctgaacgaacatctatacaaaatgcaatttgcgctttcgttgatgtgcccatctgatttagctcgctattattttcatcaactgcttgtgtgtcatttaacaatactgaatgtggctgattagcgttatcattttctgagacatttacttggtttacatc

SEQ ID NO: 2852 - DNA, 215 bp, Staphylococcus aureus; identical to SEQ ID NO: 2735

SEQ ID NO: 2853 - DNA, 330 bp, Staphylococcus aureus
tgaataatcgctgctgaatatacacccaatgcacattgaactaacataaagcccatttgactcatcgtagagcccactaattggcgtttatagtcaacttgaactaagctaatacccgatcctaacaatacagaaatactagaaaggataagtaataatgataacgcaaatccattatcaaatatcggcgcaaaacgagttagaataacaccacctgcattcacaattcctgcatgcataattgccgatactggcgttggtgccgttacagattcaatcaaccatcgatgaaaaggaaattgtgctgccggtatcatgacagctaataca

SEQ ID NO: 2854 - DNA, 400 bp, Staphylococcus aureus
tccatttcaaacgcttggacgatatcttgcatcgtacatacattaatttcatgtccttttaataatgctaacttttcaactatgtctgggtacttacgatataaatcaacaacttgctcaaaatctttagagccgcttcgactactaccaatcaacgttaatcctttttcaagtactaatcgtgtattcacttccacgggtaattcacttacgcctaacaaagcaatactgccttctggtgaaatatgttcaactatttgttgaagtgcaacttgacttcctttacctccaacacattcaaatgcatgatcaattttaagatcatctggtatttgatttactgtaaagatgtcatctacaaatgaaaaatgacttaatttatagtctgtcttaccaaata

SEQ ID NO: 2855 - DNA, 1000 bp, Staphylococcus aureus
tcaaaaccaggtttacctaataatgcgaacatgttttgtttatatgcttctacaccaggttggttaaatggatttacgcctaattggtatccactcattgcacaagcaagttcgaagaagtatacgacgtaaccgaaagtttcttcatctaattgtggaatgttcactaccatgttaggaacaccaccatcagtatgcgctaataatgtaccttcgaatgcttttgtgttaacttcgtcgattgttttaccagctaaataatttaatccgtctagatcatcactatctttttcaatagtaatatcatatttaggatgatttacttttacaactgtttcgaataagaagcgacggccttcttgtacatattgacctaaagaatgtaaatcagttgtgtagttggcacttgaaggatagatacctttgaagtctttaccttctgattcaccaaataattgtttccaccattcattaaagtattgcatagatggttcatagttaatcaacatttctgttgtataaccttttgcatataaaatgtttcgaattgtcgcatattggtatgcaatgttttcttctaatttatctgaagataattcttcacgtgcttttgcagcaccaatcatcatagcttcgatgttaattccagctgttgcaattggtaataatcctactgctgttaaaacagaatatcttccacctacatcatcaggtacgataaacgtttcataaccttcgtttgtagccaactgttttaaagcacctttttctttatccgttgttgcaaatatacgtttttgtgcttcttctttaccgtatctttcttcaactaattgtttgaacaatctaaatgcaactgctggttctgtagttgtaccagatttagaaataactgtttacagagaaatctttgtctgctaaataatcaactaactctttcgtatatgttgatgataagtgattaccaacaaatacaatttcagggtattcattgctgttt

SEQ ID NO: 2856 - DNA, 230 bp, Staphylococcus aureus
tattgtctgttcaataactcgacgacctgcaaaacctatcaacgcttttggctcacttaaatttatatcaccaactgatgcaaaacttgcagatacaccaccagtagttggatgtgttaaatatgatatatataatagtccagcgtcagaatgacgttttaaagatacactggttttacccatttgcatcaaggaaataataccttcttgcatacgtgcaccaccacttg

SEQ ID NO: 2857 - DNA, 605 bp, Staphylococcus aureus
tctaacatgtcttttgtatgtgcagctgtaggcatatttcttacacgtcctgtacctcttggtactgttgggaaaacgatagatttcacatagacaccttcgtcttttaaacgcttactaaattcttgagttgttttttcatcaccaataattactggtgtaattggagtttctgactcacctgtatcatatcctaattttgacaatccattttttaaatattgtgcattgttccataatttatcatgtaattcagttgaatccattaactttttaactgcttcagttattgctttggtatccccaggtgctaatgatgtagagaataagaatggtcgtgattgtgcttttaaccaatctattaactcttttgtacctgctacataaccgccaacgacaccaattgctttagaaagcgtacctatttggaaatcgattttatcttgtaaaccaaaatgtttaaccgtaccagcgcctttacccataacacctgaaccatgagcgtcgtcaacataagttaataaaccaaattcttctgcaatttctacaatttcaggtaatttagccacatcaccatccatactaaaaacgccatcagtgatata

SEQ ID NO: 2858 - DNA, 1033 bp, Staphylococcus aureus
tatcaccagcaccaatgataatgacattcttatcttttgcagttattgttatatcatcaatttctccatttaacaactgcgtttgttcagttaaataatccatagcgaaatgtataccatcacccatgcgtccttctaaaggtaaatctctacctttttgtgcaccagtacataatataatggcatcatactcagattctaacgttgctttatcaatatcaacaccgacttcaacaccattaatgaaagtaatgcccgcttcttccattaacttaatacgacgtcgaaccacatctttatcaagtttcatattcggaataccatacattaataaaccgcctgattctctagcacgttcataaatagttacttgatatcctagtagattaagttcttcagcagcagctaatcctgctggaccgcttccaacgattgccactttttcatctctacggcgactcggaactttcggcgctacccaaccattttcaaaagcttcatcaataattgtgcgttcaatacctttaatcgcaatcgattctctattaatcttcatcacacaagcactttcgcatggtgcaggacatacacgccctgtaaagtcaggaaagttatttgtttcgcttaagcgttcataagcagttttaaaatcttgatgatacactaagtcgttccattcaggaatgtagtttccaattggacaacctattgtttccctaccatactgttgtccggtttgacaaaacggcgttccacaatccatacatcgtgcaccttggatagaggcatcttctttagtaaatcgttgttgatatgctttatgatgcttcaaacggtctaccagtgataattcacctaagtactgtttgtcatacttcataaatcctttaaattcacccatcgtatctccccctttccttaatacacaacggctggtttatgtttagcatcgattgttttactgtcatcgtaaaatgcagctaacatcgcttcatcttcattgtcatgtaatgatttgtgcaaatgaattttt

SEQ ID NO: 2859 - DNA, 174 bp, Staphylococcus aureus
tcagcttcagcaattttgtcacctttagcgaatactaatacactttgtgatttaccagttccgtttggtaatacaactgcaccacggatttgttggtcatttttacgtgtatcaattcctaaacggaatgcaacttcaacagaagcgtcaaagttagcaatgcttgtttcttta

SEQ ID NO: 2860 - DNA, 193 bp, Staphylococcus aureus
taacatcgcgtttctctttgcctgtttcaagtctaacagcctttacctcattaagatcaaaattttgtggatttccaggtggcgttaataaatcgccaagttgattacgccataaatcattagccttctccgttttagtacgatgtatattcaagtcattagaaaagaaacaaactaacggacgtttaccacc

SEQ ID NO: 2861 - DNA, 131 bp, Staphylococcus aureus
caccagccgcttttgttaattcactcgcttttacaatttcgtcatggtccaacaataccgtctcaataatcacttttactgtgtgacctttcgcagctttcaccactgcttcaatgtcttgttgtacatca

SEQ ID NO: 2862 - DNA, 105 bp, Staphylococcus aureus
acggcccattgcttcaatgataaatgttcgtgcgtgacttgacgcagtatctctaattttgtcgactaagccaataatcgtatttaatgctgtgtcaaatccaat

SEQ ID NO: 2863 - DNA, 693 bp, Staphylococcus aureus
tttttcagctaatttttcaggatgtgtagagccacatttctcattgatattatatccatcaggactacatccaattgtttcagtatctgcttctaagtcaccaaataagaatggcgctagtgatgatgttgaaccatttgcaccatctaaagcaattttcaaaccttcaaagttaacatctactgttgattttaaatagctcaaatatttttgtgccccttcaaagtaatctgaataatgtacaatatcattgccaactggtcttggtaattctgggttttcttgatccaataatgcttcaatttcattttcttgttcatctgatagtttaaaaccatctgatccaaagaatttaataccattatctgcaactggattatgagaggctgaaatcattacacctaactctgcacccatatcgcgtgttaaatatgcaacacctggtgttgaaataatacctaatcgcatcacttctgcaccaattgaaatcaaaccagctattaatgctgattctaacatttcacctgaaactctagtatcgcgacctacaagtacacgtgggtgtttttcacctttattatgtgctagaacatagccaccgtatcttcctaatttaaatgccaattcaggtgttagttcttggtttgcgacacctcttactccgtctgtaccaaaatattttcccattgttta

SEQ ID NO: 2864 - DNA, 115 bp, Staphylococcus aureus; identical to SEQ ID NO: 2629

SEQ ID NO: 2865 - DNA, 225 bp, Staphylococcus aureus
tcttcgctttaaccgataattcgccagtatttgttttgaacattacaccttcaacaccaacgatatcgcctaaatcagcatttttccataaatcaaattcgtcatcgccaacttgatctttacgaacgtaaatttgaatttgtccagctaagtcctgaacgtgtgcaaatcctgctttacctttaccacgcttagtcattaatcgtccagctatagcgacatgac

SEQ ID NO: 2866 - DNA, 114 bp, Staphylococcus aureus
gattgtgcaactgagtcaccattttttgctaatacagtagcgattgctgctgttaatgttgttttaccatggtcaacgtgaccgatagtaccgatattggcatgttctttagaa

SEQ ID NO: 2867 - DNA, 131 bp, Staphylococcus aureus; identical to SEQ ID NO: 2861

SEQ ID NO: 2868 - DNA, 186 bp, Staphylococcus aureus
tgatgaccaaaatgttcgaacattcttctgacttggcgattacgaccttctgtaattgtaatttcaaccaatgttgtgtttttatctttatcttgtttcttaactttcacttcagccggttgcgtcataccatcttctaattcaatacctttttctagcgctttcacttcttctctcattaaataa

SEQ ID NO: 2869 - DNA, 305 bp, Staphylococcus aureus
tgctttttagtatctaattctgtatatgcagcttgtttttcttctgtagttgaagcattgctattttgaatttcttgtttacgtgtattatatgcgttttctacttccgtatcagctgcaggtttaacttttgcttgtgtttgaattgcattgattttatctaatacttttgattttgtatcagcaacttcctgttttgatttaacaacttggatgtcatgtaaaccttgcttttgagctgcatctactgctgcatcagcttctgctacttcttcatttgttgcatttgaaactgtagcattttg

SEQ ID NO: 2870 - DNA, 332 bp, Staphylococcus aureus
tgtcgacttgattgaagtttgtcgataaaggtttggataatgtcgttatcaataaattcaccagtttgttgaatgatttgttgatgatatttatgaattctttgaataattgggctattttcaataactgtctctgtcatttcttgttgaatattaaattttaaatcttggaaattctcataatccagcttatgactaaagcgtgtcatcgttgctggtgatgtaccaatcgcatgggctaaggagttaatcgttgaaaaggcatcgctataaccattttgtcttatataattgacgatgcgtttatcagtttttgtaaataaatgttgata

SEQ ID NO: 2871 - DNA, 292 bp, Staphylococcus aureus
aataactttaacgacgacatcttcaatgcgatcaaaatgttttaacacatgaatcgctctcgtactattcgtgtgtgacacatgttcttccagcatttgcttaatgaatgctttttcttcttggtgtttaatctttgtaaacgaaagcgtatctagttgattattttcaacaaaagcttctacatcagacgggataacgtaagcaataccaccactcataccttgaccgaagttcttacctacatcacctaaattaatgacatgtccaccagtcatatactctaatccatgg

SEQ ID NO: 2872 - DNA, 89 bp, Staphylococcus aureus
gatcactcgcattaccttgcatgacaccaacacctgacgtgacggtttgtgtcgctttattcccacttccgtaaaaatgcggcgcaaca

SEQ ID NO: 2873 - DNA, 181 bp, Staphylococcus aureus
tatcaacaattagcccccattcaaagcgtgaacgtaatcggtcttctaattgtgcaatttcctttggtggtcgatcactcgaaataactatttgcttgttattctgatgcaattcattaaaagtatagaaaaattcttcttgtgtttgtaccttgttttgtatgaactgaatatcatcgat

SEQ ID NO: 2874 - DNA, 193 bp, Staphylococcus aureus; identical to SEQ ID NO: 2860

SEQ ID NO: 2875 - DNA, 257 bp, Staphylococcus aureus
cgtttgaaatcgataacacggtattgacgtttgtgtccaccaccatggtgtcttacagtcaatttaccttggttgttacgtcccgcttttttcggtagcggttttaataatgacttttcaggtgtagttttcgtgatttctgcgaaatctaacgaagtcatattacgacgaccatttgttattggcttatactttttaatagccattgtcgcttacctccttaatggtaattgttttattagttaaataagtcgatt

SEQ ID NO: 2876 - DNA, 261 bp, Staphylococcus aureus
actagtggttgatgttcgacttctatgataccttctaaacctgcattttcaaaagcttggtttacttcttctgcagttacttctttttctaaatcaacaactaaatcaacgagcgatacattctttgttggtacacgtaatgccatgccgtgtaatttaccttctaattctggtaatacttcttttaaagctttcgccgcaccagtagaagtaggaataatgctttcattacatgaacgtgcacgtcttaaatctttatgt

SEQ ID NO: 2877 - DNA, 624 bp, Staphylococcus aureus
tgccattctgttgacaatatctgttattttacctagttcagtgtataaacttttaatatattttaaacgtgctggtgtattataaaataatgattctacaagtatatctgttccttttttcgcttttgcaggcttatgatttaatatttcaccattttctacatatatttcatttccattagcattatccgtgcaagtcttcaatgttactttagcaactgatgaaatactggctagtgcttcaccacggaatcctaatgtcctaatatgaaataaatcttcatcttgatctaatttactagtcgcatgtctatgaaatactaatcctaagtcttccgcttcaattccgcttccattatcgactacgcgaatagattggacgccagattcctctacttcaatgcttatttctgtagcgcctgcatctatagcattttccaacagttctttcacaacagaactcggtctttcaactacttcacctgctgcgattttatttgctaatgaggtttggagttctttaattttccccattttgcaacacctctattttaattgattttgtaattcacttaacttcaccaatgcctcaattggtgtcatattagataaattcaaattttt

SEQ ID NO: 2878 - DNA, 117 bp, Staphylococcus aureus
cttgaattcttgctgtttccattttagggtgtaagttcgacatatccatacgacgaatatatttaattacaccagcaccttgtctcatatctacgacacgcccttcgtcatcataga

SEQ ID NO: 2879 - DNA, 299 bp, Staphylococcus aureus
cattatgtcggatatgtgttgaaaccagtcttgccattatatttctcagttgatgtatattctttgttgtggtcgcatctgttaagtgaaaatatagacaatgcacatcatcaaacttgtctgctaaatatttcatttggaattggatataacatatgatgccatcttgttgaagttgaaatcgatacaagtcgcggtggttaatgatgaaaatgtcgccactgttgcattgcgtcatattattttcatcataaatgtgtgcctcacctttaataacaaaaccaatcattaaactattg

SEQ ID NO: 2880 - DNA, 292 bp, Staphylococcus aureus; identical to SEQ ID NO: 2871

SEQ ID NO: 2881 - DNA, 149 bp, Staphylococcus aureus
ggtttaaactgatgttgtgtcacgtcaatccattgatactctaaatcttgcaaagcgaattttgttaattgtgcagtattaccgtttggtctactcccaccaaacaaaacagtaatcattttagcctaacctcacttttgattaataaa

SEQ ID NO: 2882 - DNA, 257 bp, Staphylococcus aureus
ttcattttcttgttgattcaaactaatgaaggcgtcaatatcagattgtttaactggctctaattgagtcgcttcttctttaagttgagctaaacgctcatttcttaaaccaatatctctttctaacgattgcttatgcgctcgtgctttttcgtaacgatccacacctttttctgggaatgtgattggctcaatatttaactgttgttctagagacttccattcttgtgaatgatcatgtaaagcaacctcttttt

SEQ ID NO: 2883 - DNA, 491 bp, Staphylococcus aureus
tgcaccagcttgttctacatttttcgcgtctaaaataagttgctccgctgcttctttcgttgcaccttgtaatttataccccataacgccaacactttgaggtgttaatcctaaatgtgcaacaacaggaataccaattgccgttgctttttcaataaatggtgtaatatgcgctccttctgctttaattgcatttgcattcgtctcctgataaagctttagagcatgatttaagtcttgtgtcatagagatgcctactgcaccaatcggcatatcaacaactacaaatgtatttggtgcgcctcttcttactgcacgaccgtgatgaatcatatctgctaacgtcacttgtacggtactttcataacctaatacagtcataccaagtgaatccccaacaagaatcatatcaatacccgctgcttccacttgtttagcacttggaaaatcataagctgttaccatagaaattttagtttgcttttgtttca

SEQ ID NO: 2884 - DNA, 374 bp, Staphylococcus aureus
tgttttactattttgtgttgattgatgcttcgatgattgaagcgtatctttaccttctgtcactgttccacttttaccattctctttatgcatatcgtctaattgctttcctgactgcatttgatgtgacgttatcgcattcccttgttctcccggttgatttagtgtttctttttgtgccgctgcattagttgatgttttttccgaggcttgtgcttcatgtgatgacacaacaaacattgtagccgctaacactgacaccacgcctattgaatactttctaatactatactttctttcttcttgtcctcttaacatataatcacctcaaaagtatttttttgaccccctcttgagaatgaaaaacaactgca

SEQ ID NO: 2885 - DNA, 450 bp, Staphylococcus aureus
tgtaggatcaataaatagatttaaagataattcagcagttaaatctttcttttcttgtacatattctttaaacgtatatctaacttttctttctccaattatttctcctgtcgccataacttgaccatctgtactttttatctccggaactttacgcagtgttgagataccatgagtttcaacattatcgcttaatgtgaaatcaaaataatctcccgccttaattccttctccaaatttccatttatatttcaaggttactctttctgcgttatgaggatttacaacattcgtatcttgtttatgtcctacaatttcactaccttcttctacttccactttatttgttacatctgtacctgtcgctttagtttcttccactacttctttctctgcaactgctgtaacgtcagttgatcttttcattcttggtttaatttctgagacgtt

SEQ ID NO: 2886 - DNA, 330 bp, Staphylococcus aureus; identical to SEQ ID NO: 2853

SEQ ID NO: 2887 - DNA, 87 bp, Staphylococcus aureus; identical to SEQ ID NO: 2840

SEQ ID NO: 2888 - DNA, 268 bp, Staphylococcus aureus
ctaaagccgttgtcggctcatcagcaatgattaactttggtttcaaagctaacgctaaagcaatcatcaatcgctgtaacattcctcctgataacatgtaagggtatgattttaatatacgtttaggatctttcaaacttaaataatccatatattcaatcaatgtcttttcaatttcttgtgtagacattgacgtatgtactttcatagtctcaaacatttgtttaccgacagtagttgatgggtcaaaggcacgactaccttgttg

SEQ ID NO: 2889 - DNA, 244 bp, Staphylococcus aureus
gaaccatcattgaaaaattcactcgttttacagttcggacaaatatagtgtggcggtaacgggtttacttcagtaatctcagtcattgtcgctacaaaactagaacctactgaaccacgggaaccaactaagtatccatcatctaatgattttttaactaaacgttgcgaaattaagtaaattaccgcaaatccattaccgataatactttttaattctttttctaatcgatcaattacgattt

SEQ ID NO: 2890 - DNA, 289 bp, Staphylococcus aureus
tgtgcttttcgcttttctaatttttctttaagctttctatcttgttcttctttacgacgtttacgttcttcatgtcgttttcttaaacgctcttcttcttcaggatcacgtggtttctttaattgttgagaaactttttcgattaattcttcttcagtaagcgcagccagtgggcggttattaacaaaagtgaatgtttttcggcgtccaggtccacaataagattgacaacctatcacgatttcagcatcgggatctaatttttccaacttcttttgtaacgttctta

SEQ ID NO: 2891 - DNA, 102 bp, Staphylococcus aureus
atgaacaacaacttgcttgtcttcaacttgttgtacctcgccagtgactttgtcaccttctttaatatcgttaatcattgattcattgaattcttcagtcat

SEQ ID NO: 2892 - DNA, 86 bp, Staphylococcus aureus; identical to SEQ ID NO: 2780

SEQ ID NO: 2893 - DNA, 135 bp, Staphylococcus aureus
agttaaatggtttttaatgccgcttgaaccattcgtttctactttaattttaatacccattttatccgcttgctttttcaatgcatcacgtgccatatatgtgtgtgcaatacctgttggacaagcagttactgc

SEQ ID NO: 2894 - DNA, 236 bp, Staphylococcus aureus
gtccgcatagtttaaaaaattagtttttgatttatcaatattttctccaaccatttgtgaattaccagaactgtcatttttcacaaaagctccgtatcctctataaccttgtccagcttgcttttcagttttgtccatggaacttgtataaatgtatccagtatcaattttaaatccgcctgaatttaccagacctttatccccaaggattccaccattagttaaatattcttctg

SEQ ID NO: 2895 - DNA, 108 bp, Staphylococcus aureus
tccttaacctcttgtaaaaactgtgtccacattttatcaggtgacggttgccctctatataccaacgtattagcaaacatgcctagcatttgctccgtgcctttatgc

SEQ ID NO: 2896 - DNA, 159 bp, Staphylococcus aureus
tatctccagagtatacagtatcgatttcttgacgtgagttagcgtgcatttgtaataaacgacctacacgttcacgtttacctttagtagagttcttaacgtatgaaccagatgtcattgtacctgaatacacacggaagaatgttaatttaccaacat

SEQ ID NO: 2897 - DNA, 405 bp, Staphylococcus aureus
catagcaccatctaattgttgcgctttggctttaactgtattaacaccttcaacatttgttgcttgtgtaatttcattgtctaacgctgtacgttgtgcattattaatgtgtgttaatgtacctaacgtttgtttcgcagctgctttagcttcatttaatttcgcatcaccgttcaacgccgtcttcgtactgttcacattttgcaatgcttgttcaactgctgctttgtctacattttgaccactagcttttgttaaaattgctttcgctgcatttactgcttgatcataagctgatttcttacttggctctgcatctaggtatttctgagtttgttttgtttgtgtctcatcattgataccattttgtaaactatgcattgcgttatttaattctgttgcttt

SEQ ID NO: 2898 - DNA, 385 bp, Staphylococcus aureus
ccataaatatggtataactgaggattttatgttgagtggattagttgaatatacctgttaatccaccgctgtttctagattgttgagatctagtattgttatttgattgtgcagtaccactgctgtttgctgatgtgtcactaccaccgtgtgtactacgatttgtagtgttgttatcttgactaccagaaacattgattgatgggatactaccacttactgagctaggacgtttaaagtcttcgccatctctagatgaaatttttgacatcacattttcatataagaactgtggatattcttgttggctatgtcccacaaatgagttttcaccatattgtttaactttactgaagcccatccacactgacatagtgtattgagg

SEQ ID NO: 2899 - DNA, 342 bp, Staphylococcus aureus
tattcaagtcattagaaaagaaacaaactaacggacgtttaccacctgatacataatctatgcgcgctagaccgccgaagaataatgtctgcgcctcatttaattgatatacgcgttgttttatttctttcttaggcataataattttcaattctttttcactaactaaatgcgtcatttggtgatcttgaataatacctggtgtatcatacataaatgatgtttcatctaaaggaatatctatcatatctaaagttgttccagggaatcttgaagttgttactacatctttttcaccaacactagcttcaatcagtttattaatcaatgtagatttcccaa

SEQ ID NO: 2900 - DNA, 168 bp, Staphylococcus aureus; identical to SEQ ID NO: 1735

SEQ ID NO: 2901 - DNA, 471 bp, Staphylococcus aureus
tccatttcatgcgcttcatcattaccttgcgctttttcaacaagttgcgcttcaaaacgacctttttgatcaataggatcatttaattcagtaaatgcatttgcatgctctctacctacaatgaacaattcgaaacgatcagtaaatctaggatcttcaggatttttcttcgctaaaggtgaaatttcagtcggatgaccatagataaacgttggctgaataagtgtttcttcaactttttgctcaaagaattcatttaaaatatgaccatatttcattgtatctttaatttcaataccatgttctttagctaaagctttagcttcttcatcacttttaacttcataaaaatctacaccagtagcttcttttacagcatcaacaatatgcaaacgagtccaagcagattctaaatcaatcgtttccccattgtattgtacttttgcagaacctaacacttcattggcaata

SEQ ID NO: 2902 - DNA, 238 bp, Staphylococcus aureus
taagataatttagccattagttaagactcccttcttcgtacacaaatgcataggcttcttcgacacttggatatggcgcgtcttcagcagcctttgtcgctttattgatgatgtctttatgctccgcttctatttctgccaaccaagcatcatcgataatgccagctgaaagcaactcttttttgaacttttcattgcagtctgcttttttaagcgtttcacgctcttctttcgtacg

SEQ ID NO: 2903 - DNA, 253 bp, Staphylococcus aureus
tgaataaatacacttaggcatcatgttatagtttactgggattgggttcccctcaaacatatgatcaacagccacaacaccttcttttgatccaacatgtgccaattgtaattttcctatacaatcaccagctgcataaatatgtttatcttcagtttgttgaaattcgttcgttaaaatatgtcctgatgttgaaagttttattttagtgttgtttaaaccaatatctgatgtgttaggttttctaccaatc

SEQ ID NO: 2904 - DNA, 178 bp, Staphylococcus aureus
cattgcacaagcaagttcgaagaagtatacgacgtaaccgaaagtttcttcatctaattgtggaatgttcactaccatgttaggaacaccaccatcagtatgcgctaataatgtaccttcgaatgcttttgtgttaacttcgtcgattgttttaccagctaaataatttaatccgtct

SEQ ID NO: 2905 - DNA, 544 bp, Staphylococcus aureus
aacatctctacaaagtctgaaccactaatagagaagaatggtgcagccagcttcacctgcaaccgctctagcaagtaatgttttaccagtacctggaggtccaacaagtaagacacctttaggaatcctagatcccatttctttgaattttttattatctttcaagaaatcaacaatttcaattaattcttgtttttcttcatctgcccctgctacatcagagaaacgaacacgacgtttattattatcgtacatttttgctttagatttaccaaagttcatcatacgaccgccactaccgccaccttgtgcttggcttaggaagaaaataaataataacgctatgactacaactggaattaatgttgaaagtatactcacaaagacactttgtttttcttcttctttaatcgttaattttacaccgttttgctttttagcagcatcagtaattttttgtaattctttttcgttgttatataaaatagttgatgaatagtcttcatcatttttcgttttaccacttaccatatagacattttgt

SEQ ID NO: 2906 - DNA, 214 bp, Staphylococcus aureus
gtcatcacggatgataacacatgcattttcatcaaatttgatgtatgaaccgtcattacgacgaacacctgacttagtacgtacgattacagctttgacaacgtcaccttttttaacaacgccacctggtgttgcatttttaacagtacatacgataacatcgccgatgtttgctgttttacgaccagatccacctaatactttgattgtaaga

SEQ ID NO: 2907 - DNA, 101 bp, Staphylococcus aureus
gactgcgataaatctgcggcaccttcgactatcatgtctaaaccttcgacttgtgctatatcgtcaatggccataaccccttcaacatcttctatcatggc

SEQ ID NO: 2908 - DNA, 158 bp, Staphylococcus aureus
tcattttcaacgttgaaacttcaaataagtaatttattgttgccattgtttatacaacataatttaattgaccttcatttttgaacacatcgtcaattgttgcaccaccaagacacacatcaccttgataaaaaacaactgcttgtccaggtgtgatt

SEQ ID NO: 2909 - DNA, 553 bp, Staphylococcus aureus; identical to SEQ ID NO: 1957

SEQ ID NO: 2910 - DNA, 919 bp, Staphylococcus aureus
tttaattccataatttcttcagcactatcgatacagctttttcactttcatttcttgtacaataacagtcttgtaatttactcattatcttcttccatctccttaacgtgttccgcaaccttcaaaaatacgtttatgtttattatcccaacatgccttgcttaaatcgactggatattcttgtggattcaggaaacgcttattttcatcccaaatagattgtaatcctagtgctaaatattcacgtgattcatcttctgttggcatttgatatactaatttaccattttcataaatattatgatgcaaatcaatggcttcgaaagattttataaatttcattttataagtatgcactggatggaataattttaaaggttgttcatcgtatggattttcattttccaaagtaatataatcgccttctgccttacctgttttcttgtttataatgcgatatacatttttcttacctggcgtcgtaaccttttcagcgttatttgataatttaatacgatcactatatgaaccatcttcattttcaatagctacaagtttatatactgcacctaatgctggttgatcgtatcctgtaatcagctttgtaccaacgccccaagaatctacttttgcaccttgtgctttcaaactcgtaatcgtttcttcatccaaatcattagacgcgataattttagtttcagtaaatcctgcttcatcaagcatacgtcttgcctctttagataaataagcgatatctccagaatctaatcgaatacctacaaagttaattttgtcacctaattcttttgcaacttttattgcatttggcactgccagattttaaagtatggaatgtatctactaggaacacacaatttttatgtctttcagcatattttttgaaggcaacatattcgtc

SEQ ID NO: 2911 - DNA, 80 bp, Staphylococcus aureus; identical to SEQ ID NO: 2480

SEQ ID NO: 2912 - DNA, 192 bp, Staphylococcus aureus
cttccttatattaaatattttaagtttaagatttaattaaaaactaaattcttagtttttaggtttcttagttccgtataatgaacgaccttgtctacgtccgtcaacacctgaagtatcaagtgctccacgtacaatatggtaacgcacacctggtaagtcttttacacgtccaccacgtacaagtacaac

SEQ ID NO: 2913 - DNA, 586 bp, Staphylococcus aureus
tttgtcttcttctgtgtcttcctcgaatgactggttaccgctattttggccaccttcataacctaattcactcttaatatcaacgtggctattttcttcgatttcttcaatcacgtcataattcccgtgaccattttcagttcctaaaccagaatgagaaatatgatgattgtttttagtaatttcctcgactggtccttgtgcttgaccatgctcttcaggtaattcatccactaattcaatcagattactttcagttgtatattctttcgtatcttcaactgttgtatgatcgctcactgcgccagttacaataccttttgtagactcttcgtcaaattcaactaagttagactcagtagtaacctgaccaccacctgggtttgtatcttcttcatattcaacaacatcagcgtgatgttttgaattttcatgtgtagattcttcaaagtcaattggatttgattcctcagaggactcagtgtatcctccaacgtgacctgcttcgctatccacagcagtatggtaatcgatatcaatagctgatgaatccgtttcttctattgtttcaatgtatccatcaaca

SEQ ID NO: 2914 - DNA, 492 bp, Staphylococcus aureus
tacataacgtttcatcaataattgttaagcttaattgctcgttaacaaaatctaaatgtgaataactatactccaatatatctttgatattttgaccactaattgtcatatccattggcttatctggatatgggtatgcatgatacaaatcttcatttcgaatctgtccactcaaccccttctctccgttcataggcacgtggacacatgttatatcattatcaaatgcaaggtgaattgcatcatgtaataattgcgaaaatggatgtgtttgacagactaaatcttgtaacccatttactgataacatcaaacctttatcacttatgatttcctgtgaccaataagccactgcttttctatcatagaatgttaaatctaataattcttgatcctcttcatactcatttaagtcaatcactttagaatcaatgctttcaacatcataagttgttgttctctttttaaaattaatcgaaagatgtacaagct

SEQ ID NO: 2915 - DNA, 138 bp, Staphylococcus aureus
actaattgttctaagtagtcaacttgttctgcagctgtacgttttgcaccgtgttcgccttcgaacttactgtagtcatatacaccattttcatagaattctgatgatgcacagtcaaatcctaagaatacttcttca

SEQ ID NO: 2916 - DNA, 291 bp, Staphylococcus aureus
gatacgttctgtaagttgtttccaaccatcccagtcgttttcgtccataccgtcttcaattgtaatgataggatatttgtctactaattgttctaagtagtcaacttgttctgcagctgtacgttttgcaccgtgttcgccttcgaacttactgtagtcatatacaccattttcatagaattctgatgatgcacagtcaaatcctaagaatacttcttcacctggtttgtaaccagctgcttcgattgcttggataattgtttcaacagcatcttcagtaccttcaaattt

SEQ ID NO: 2917 - DNA, 335 bp, Staphylococcus aureus
taccagcaggttttgcggcaacaaagtcatctcctaaggtgtgctgcaatatttgagcaatttgcggtttacatttaccacatgaattccccgcttttgttttagccgttacttcttcaactgttgtaaagccattttccgtaatcgcatttactatagtacctttatcaacaccattacaaccacaaattgtttcatcatcagccatatcagcaattgatagcgatgcctcttctccacctttagtaagcaatgatacaagtgtgtaatcttcagtggattcaccttttttcatcatgttataaaagcgtgaaccatcatcgatatcaccatat

SEQ ID NO: 2918 - DNA, 192 bp, Staphylococcus aureus; identical to SEQ ID NO: 2912

SEQ ID NO: 2919 - DNA, 88 bp, Staphylococcus aureus
gcttgtgcctcttttgataaaggaacgtgaaccgccatttggtcaccgtcaaagtcagcgttataagctgttgttacaagtggatgta

SEQ ID NO: 2920 - DNA, 155 bp, Staphylococcus aureus
tgttggacttaactcgacattagcctgctgttcaaagtatttcttttcttcatctgtaatcaagcttgacgcagttactggttgtggcatcgttccatcattcatacctactaagtaaacatgttgcttattatcgactttagccaaatccatcg

SEQ ID NO: 2921 - DNA, 102 bp, Staphylococcus aureus
atgagtaagaactaatgtcttgagctaacaagaagccttcacagtgaagtttcagaaaagcgtccgcgtaagtcttccatattagcaaatgcgattgaatga

SEQ ID NO: 2922 - DNA, 439 bp, Staphylococcus aureus
agtaattagcaacggctgattagctttcacagtttcacctacactaaccttgacttcagttactgaacctggcatttgagcaccgatatgacttggattactcttatctgcttttggcttaacgttcgcatttgtatgcacattttcatctttaatgtaaatacgtctcgcttgaccattcatcgcatagtaaatcgttctattaccattttcatctggttcactaatcgtttctagtttaataattaatcgtttacctttatcgatttcgatttctactgtttcaccattacgcattccaaagaagaatgtaggcgtatcaagtaacgataagtttccgtattgatttctagtttgaatatattgttcatatacttttggatatagtacataactaataatatcttgctccgtaacaggaccttgttgctcttcttca

SEQ ID NO: 2923 - DNA, 145 bp, Staphylococcus aureus; identical to SEQ ID NO: 2673

SEQ ID NO: 2924 - DNA, 151 bp, Staphylococcus aureus
gaaacgatcagtaaatctaggatcttcaggatttttcttcgctaaaggtgaaatttcagtcggatgaccatagataaacgttggctgaataagtgtttcttcaactttttgctcaaagaattcatttaaaatatgaccatatttcattgta

SEQ ID NO: 2925 - DNA, 94 bp, Staphylococcus aureus
attgtaccaactgcttcaccaacttcaactttttcaccagtagcaaggtttttaccgtaacatttttcacaaacaccatgtcgtgcgttacaag

SEQ ID NO: 2926 - DNA, 186 bp, Staphylococcus aureus
catcaacagcaccaagatcctctgaatagttccaacatctttcacatttttcaccatctgcatgttcgatgacaatatcaccatgttcataagctgttgcctgatcgtctaacttatctacaactttaacttgtgacacgataaataattgatgtaatgcatcaaatgaagttaagaattcagatg

SEQ ID NO: 2927 - DNA, 179 bp, Staphylococcus aureus
ttttgcacctaagtcaattgatacttgcccagttgccatatcaggaattaacattggtacgaaaaatggactcacacgtcttgggcctttatccattaattgtttatgtgcaatttcaaatgtttccataccaccgataccagaaccaatccatacaccgattcgatctgcagtatttt

SEQ ID NO: 2928 - DNA, 257 bp, Staphylococcus aureus
tgccatcaccaattaaaaatgaagtctttttatcaccattcataacatgtgataataaacctgttgtagaagttttaccatgtgcaccagttacagctactgaagtatattgatcaataatctgtcctaaaaaatcattataacttacaacatctaatttcaattgatgtgcacgtactatttcttcatggctactcgcgaatgcattaccttgtataactaccatatcttcttttatgttattagcatcaaatggt

SEQ ID NO: 2929 - DNA, 128 bp, Staphylococcus aureus
acggcctttacgacgacggcgcgctaaaactttacggccattttttgtgctcatgcgttttctgaaaccatgaactttactatgtttacgtttatttggttgataagtacgttttaccatgcaaaaca

SEQ ID NO: 2930 - DNA, 273 bp, Staphylococcus aureus
tgtaattgtgctatcgcctcttcgactgtcacacctttaagttgtgttgccgcattggttaaatgtccaccgccaccaagtgcttccattgttaactggacatttactgaaccgagtgaacgcgcagatataccaatcagattatcttcacgtctcgcaacaacatatgatgcttcaataccttctaaacttaacagttcatctgctgcttgtgcaactgttactggatgataaattttatcgtctgaaccatgcgcaatggctatgccatta

SEQ ID NO: 2931 - DNA, 162 bp, Staphylococcus aureus
gtaaagcttgatttttatttccattaaacggataaatttgacgtgcaaccggcgcggcattttgtccataatatggtgcaacgtaacttgatttttgattattattcgcttggttattacttgattggttattatttgtttggttttggtcattgtttgttg

SEQ ID NO: 2932 - DNA, 159 bp, Staphylococcus aureus
accttcgacggctagctcctaaaaggttactccaccggcttcgggtgttacaaactctcgtggtgtgacgggcggtgtgtacaagacccgggaacgtattcaccgtagcatgctgatctacgattactagcgattccagcttcatgtagtcgagttgca

SEQ ID NO: 2933 - DNA, 265 bp, Staphylococcus aureus
ggatgatatggtaaaacgctttcagccaattctttttcagcgtcgactactaatttagcacctgtctgtgctgtaatttgtgcaatttgcgcatacgcatcgcttggaatactacttggtacacttccagcaacaataactatatcttcgcttgttgtatttttaatttgttgtaacagttgttcaaattgtgttgacgttatatgaggacccggtgcattgatttctgtttcttgtcctgtttttaatttcacattaatacgtg

SEQ ID NO: 2934 - DNA, 171 bp, Staphylococcus aureus
acttacccaaagtctcgcaatatcagcacctttttgtttaaccacttggtcaggtacaatcacattacctaaagatttactcattttcttaccttcaccgtccataacaaaaccatgagaaagtaagaatttataaggtgatactcctcttgtagcaactgaagttgtgat

SEQ ID NO: 2935 - DNA, 319 bp, Staphylococcus aureus
gcaattgcctctgtaacttcatttaaactttctaacttaatttgttcttctgatttttctaagcgtctaattttagaagatattctctcagccattatttatccacctgatttcccgggaaaacataatctgaacgttcccattttttctgtacttgaacactgtactgcggttgacgttttttattgacacggaaattattagggttcaacggtgacttaccacgtttcgtaattacctccaaacgacagctagtacgtttataagatggtgtatccgtgtattgatcaacatcactattagttaataagttaattgc

SEQ ID NO: 2936 - DNA, 193 bp, Staphylococcus aureus
cgataacacgtttaccgaatttgaaattaggaatttcaattggtcttgaacctgttgcaatgattgcatttttaaagttgtatgtttgtgcgctcttttcgtccataacacgtaagctattgttatctacgaaatatgcttcacctttaacgatgttaactttgttacctttaagtaagctttcaacaccacc

SEQ ID NO: 2937 - DNA, 80 bp, Staphylococcus aureus; identical to SEQ ID NO: 2480

SEQ ID NO: 2938 - DNA, 876 bp, Staphylococcus aureus
caatatcgaatacctcgtcaataaacttaatatatgcttcttctacagatagttcaggatacacctctcttcgcccaagctttagatggaaaagcagctacgacccatggaaattgatttttttgtacactttccatatatcctttaaatgcgcgtgcgttttgttgttgaaatgcttgtaatttttggctatcgataccatccattaaatcaggatcttcactaataagtgctaaattagcagcgccacgtttaacgtaatccattctcgcttcaacatcatatgattttatctcatgattagcaaaatgttccacagattcattttcaaattttaagcgttttaaggttggatcgctatatacaacacgtacatctgaagcgccacaatgatatgcttcttctacaattaaatgcgttaattctaatgtttctactgatgatctaataaatactggctgttttggttgaacattcataccaaccttaactaatagttcagcgtattgttgtaacttttctttgtaattagtcaaaattcccactcctattcgtgtcgcaattgtcctaaagcgtcagcaatagctgtcacttcactcatttaacgcactacgaacatcaccttggctttgtgtagaaaagtaggtcatggcatcttcatcaattttgggttgatatgttttcaaaccattctcatcatcttctattgcacgagttaacgcttggcgcacatcttcgtcatttaaaggatataactcgaaaatttgcgctcttgaacgaatcgctggattgatagcatgataaggatttgaagttgtagcaccgatcaagacgattttgccattttctaaatgaggtaataaaaagtcttgttta

SEQ ID NO: 2939 - DNA, 117 bp, Staphylococcus aureus
cccagtactgatttcaacgctgcatgtaataaatgtgttgcactatggttcttttgaatgtcacgtcgatcattttggttcacttcagcagacactgtagcgccaacatttacttgg

SEQ ID NO: 2940 - DNA, 79 bp, Staphylococcus aureus
gtacctttgaccggccattgtttctacagcaatctttttgtttctagctaaacttgctacgacagattctttatccata

SEQ ID NO: 2941 - DNA, 257 bp, Staphylococcus aureus
gacacttcaagaatttccgcaatattatcaataccttcttggttttcaattttagggaatactgaaatgttagctttttgttcttctaaaatttcacgaatttctaaaacatcactaggacgacgtacgaaacttgctgcaatgaagtcaacattttctttaataccgaaacggatatcttcagcatctttttctgtaataccaggtaaacttactcttacgccaggtaagttaacaccttttttgtttttaagctc

SEQ ID NO: 2942 - DNA, 215 bp, Staphylococcus aureus; identical to SEQ ID NO: 2461

SEQ ID NO: 2943 - DNA, 108 bp, Staphylococcus aureus
tctttagcttcttctttaccgtcacttacgacgattgtaatgtggcttgtacgtttgttaatcgcacttgcacgaccttgcgcacgtggacggaaacgttttaatgtt

SEQ ID NO: 2944 - DNA, 548 bp, Staphylococcus aureus; identical to SEQ ID NO: 2582

SEQ ID NO: 2945 - DNA, 325 bp, Staphylococcus aureus
cacgtaataatgcacgtagctgtggtctgaaaatatcttgttgcgcaaggcataaacgaatcgcacggtaacctaagaatggattcatttcttcaggcaagtttaagtatgataattctttatctccacctatatctaaagtacgtacaacaacacgtttaccgcccattgcttctaatacttctttataagcttcaaattgttcttcttctgtaggcatttggtcacgacccatatataaaaactcagttctatataagccgataccttgtgcaccattttcaataacacctggcaaatcattaggtgtaccaatatttgcagc

SEQ ID NO: 2946 - DNA, 288 bp, Staphylococcus aureus; identical to SEQ ID NO: 2235

SEQ ID NO: 2947 - DNA, 192 bp, Staphylococcus aureus; identical to SEQ ID NO: 2912

SEQ ID NO: 2948 - DNA, 257 bp, Staphylococcus aureus; identical to SEQ ID NO: 2941

SEQ ID NO: 2949 - DNA, 204 bp, Staphylococcus aureus; identical to SEQ ID NO: 2088

SEQ ID NO: 2950 - DNA, 229 bp, Staphylococcus aureus
aaacgacttgctaataagatcatgaagttttcaccgtgtacaccgaattttttaccagcgatgtcaaatgtgttacggaattgtctttcagtcattccatataagtaacgtaatttttgtttttcacgtaattgtaaaccatattctgataattttttacgttggtttggaccatgttgtcctggtgcgtaaggacgtttttctaattctttaccagtaccgcttaaag

SEQ ID NO: 2951 - DNA, 401 bp, Staphylococcus aureus
tacgtactgaaggcattgctttaacagttctgttttcatctacttcttcagtttgagtagctacaggtgcttgctctgctggcgcttcctctttcgcaggttcttctttagatgatgaatcatcatcatgacctttaaattgcatatcttctgcatcaggtgcatcgattttaacaataacgtcaccaactacagctactgtaccttcttctaccataacttcttctacagtaccagatgctggtgatgggatttctactactgatttatcgttttgtacctcagctaaaacatcgtcttcttcaatagtatctccagctttaacaaaccattttacaatttcaccttcgtggataccttccccgatatcgggtaatctaaattcaaatgccacgtttttg

SEQ ID NO: 2952 - DNA, 280 bp, Staphylococcus aureus
caacgttgatttaccactacccgtttgtccaacgatggcgtaatatttaccttgttcaaattctgtattaacatcatgaatagcttgatgctgatatggtgtccctttttgataggtataacttacattgtcaaaccgtatagtcatagttgatccaccagcccttcataagttaagaatgatgtttggtgtcccagcatttgatttattttgattgggaatggcaaatctagacctattcttgttaactcttctgcattgtcgaaaatttcagtcgctg

SEQ ID NO: 2953 - DNA, 377 bp, Staphylococcus aureus
tctgtgatagttgctacaatatcttttctttcacggttaaaatgttcaacttgttctgctaaaaatgcagcttcttcttcgacgtcagtcatcaacaattcgcaagctaatgatgcgtcatctaaacgacctacagcattaagtctaggtccaataataaaaccaattgtttcttcatcaatattgtcattgtatcccgcttcttttagcaatgctttaacagaggtcggacattgatcatttaagacttttaatccttgtttcactaatgatcgattttcatcagttaaggatactaaatccgcaatggtacctatcgcaactaatgctttaaaataatcaggtacattttcaatcaatgcttgtgctaatttgta

SEQ ID NO: 2954 - DNA, 401 bp, Staphylococcus aureus
catgtgtatcccaacctggtacgtatggtgcatagaacccttgcatagttttataacgtacaataaagtcttttaaaattttgttcaaggcatgtcccatatgtaagttaccattcgcgtatggtgggccatcatgtaaaatgaatgtttcgttacctttatttttttctaacgctttatggtattgatcttctgcatcccatttttcttgaatttgcggttccttgtttggtaaaccacctcgcattgggaaatctgttttaggcattaataacgtttctttgtaatccatttttttcactccttaaaaatttaaaaaactctaagttaaattaaaagggacgattgctcgcggtaccacccttattaactcaacttagagttctctcattacattattt

SEQ ID NO: 2955 - DNA, 152 bp, Staphylococcus aureus
taaataactctgtgtaaacgcatatcaacattttcagcttctgcagcacgttttgcaccactgtctggacgaacattgaaaccaatgataataccatttgaggcattagcaagtgtcacgtctgactcattaattgcaccaaccgctgtatg

SEQ ID NO: 2956 - DNA, 723 bp, Staphylococcus aureus
  misc_feature (1)...(723): n = A,T,C or G
taagtaacgaaagctagatctctataataaggcgctgtaatatcaccttcttctaatgcgtatgccatcccaatctgagttgcttcttgtccttgaccacttacaacaaatggaattttacctgcacggttcaataaccacagtctttcatctatttttctacctaaatccatccatttatatattacttttaggtcttcttcgctaaggcctaatgatttataatcaatcatgttaaatcctcctatttatacgtgaatagctctactttctgctttcaatcctaattccatcaacacttcagagatggaaggatgtgcgtgtgttgttagtcctaattctaatgccgagccattcatgaactgtaacagtgatgcctcattaatcaattctgttacatgtggaccaatcatattaatacccacaatttcttcagttgattgatcaatcaccatttcgctatacccttcgtttgtgtcatggctatcaatcactgctttaccaattgctttaaatggtactttaaaacttttaactttcattccctctgcctttgcttgttcaatgtttaaaccgatagaagcaatttcaggttgtgaataaatacacttaggcatcatgttatagtttactgggattgggttcccntcaaacatatgatcaacagcctcancnccttcttttgatccaacatgtgccgattgtaattttcntatacaatca

SEQ ID NO: 2957 - DNA, 153 bp, Staphylococcus aureus
tatgcaggtaaacctaattcatttacatacttagctttacgttcatctggtaattcaggaattgtctgacgaacacgctctttccaagcatcatcaatatataaaggtacaatgtcaggctctgggaagtaacggtaatcatcagaaccttct

SEQ ID NO: 2958 - DNA, 379 bp, Staphylococcus aureus
tgcctttacctttttccaatttataaagtggaggtaaagcaataaatacacgacctgcttgaacaagcggtttcatatatttgaagaagaatgttaacaatagcacttgaatatgcgcaccatcagtatcagcatcagtcataataattacacgattataattactatcttcaattttaaagtcagtaccaacgcctgccccgattgtgtggataattgtattaatttcttcatttttaaaaatatcttctagacgtgctttctctgtattaattaccttaccacgtaatggtaatatcgcttggaatttgcggtctcgtccaagttttgctgaacctcccgcagaatcaccttcgactaaatacaattcatttttttc

SEQ ID NO: 2959 - DNA, 328 bp, Staphylococcus aureus
aattttactgctcattgttccgtcttcgataagtttaatcatacctgctaaattttctggtgttaatttagtatctaataattctacttgatttttatttaaatattcgtttacgccacccattaaccagttagatgttaatttaacatctgcaccgtgttcaattgttgattcaaagaaatctgacatttctttagtcaatgttaatacgtgtgcatcgtatgcaggtaaacctaattcatttacatacttagctttacgttcatctggtaattcaggaattgtctgacgaacacgctctttccaagcatcatcaatatataaaggt

SEQ ID NO: 2960 - DNA, 363 bp, Staphylococcus aureus; identical to SEQ ID NO: 2718

SEQ ID NO: 2961 - DNA, 138 bp, Staphylococcus aureus; identical to SEQ ID NO: 2421

SEQ ID NO: 2962 - DNA, 155 bp, Staphylococcus aureus
ttttccaggaggtgctgtttgtccaccgataaagcctacaactggttttgtcatattcgctttaatccattcagctgcttcttcttcagccgtaccaccgatttcaccaatcataacaactgctttcgtttcgtcatcttcattgaatgctttta

SEQ ID NO: 2963 - DNA, 319 bp, Staphylococcus aureus; identical to SEQ ID NO: 2210

SEQ ID NO: 2964 - DNA, 111 bp, Staphylococcus aureus
aataatggattgtacgctttggctggtgcttcggccacagctaaactcgctgcatgtggaaagcggttaccgggtccgattacaaaagtgtcaaatgtgttatgggcattg

SEQ ID NO: 2965 - DNA, 234 bp, Staphylococcus aureus
cgttttgttacgcttgatggaataactgattctttatattcttcagattgttgttcaaatgcattccagttaggcattgaaacaacacgtactgatttaccttgtttttcaagatctttagcagcttcaactgcaagactaacttctgaacctgaagctaataataggaattctggtgtctcttcagagccataaactgtataggcaccttttcgaacgccttcttcaactaca

SEQ ID NO: 2966 - DNA, 157 bp, Staphylococcus aureus
ataagggtcagtcataactttgaacgctaatgcagcgaattcagctgaatcgtctgctttcgcgattacttcttcttcagggttgctagcacggtgaccaataattggtttaacgtctagtggtgaaggtaagtaatcaattacagcgtcaagcatt

SEQ ID NO: 2967 - DNA, 349 bp, Staphylococcus aureus; identical to SEQ ID NO: 1962

SEQ ID NO: 2968 - DNA, 225 bp, Staphylococcus aureus
acagcttgtgtcaattgttcaacttgtgctttatcaagcgttggattgttagtttgattaattaaatcttttgcattttgaactgctgcttggtaagcatctttttgtggtttatcttcattgataaacttgctacccgcttccgtttgctgttgatcttgaatgctattacgtaaagcttccattgcttggttaagtgcttgtgcttcagttaatttttgtgct

SEQ ID NO: 2969 - DNA, 756 bp, Staphylococcus aureus
  misc_feature (1)...(756): n = A,T,C or G
tacacttggatcttcatcgtaataatgactcattattccacctcatcttcactttgtaactcgtcattataattataacatttcactcagtctttaaatgaataaaaccccgttatcaaaataacggggttttaacttctcaaagaatcattatattatagcaatacttgctataaaactttgattattaagtttaagatacttgaattattttaattctacagtagctccaacttcttctaattgttctttaagtttttcagcttcttctttaggtaaagcttctttgattactttaggagctccgtctactaattctttagcatcttttaatcctaaaccagttgcttctttaacagctttaacaactttgattttagatgaaccagctgaagttaactcaacgtcaaattcagttttttctgctgcagcgtcagcgccaccagctgcacctgctactgctactggagcagctgcagttacaccaaattcttcttcaattgcttttactaagtcgtttaattctaatactgacatttctttaatcgcttcaatgatttgttcatgattagccattttataattcctccattatttttaatttttttactgntaaaaattattcaggctgttatcttctttttgttctccaatagctttancctgcataagcgaacgttgcgtacaggagcttgtaatactgataaaagcatagatacaagaccatcgtgtgaaggtaatgaacctacagtttta

SEQ ID NO: 2970 - DNA, 143 bp, Staphylococcus aureus
agcttcttgttctgtcattcggaagccagtttcaagttctttttcatcacgagcaacacggataccttttccgccaccgccagcagtagctttaatgatgaccggatagccaatttttttggcgattttcttagcttctgaga

SEQ ID NO: 2971 - DNA, 97 bp, Staphylococcus aureus
agccgacatcgaggtgccaaacctccccgtcgatgtgaactcttgggggagataagcctgttatccccggggtagcttttatccgttgagcgatggc

SEQ ID NO: 2972 - DNA, 231 bp, Staphylococcus aureus
catacaaggttactgtaaataaggcattaggtaatcctttttcagctgcttcgcgcgtctttggactcatacctgcgttaatccttaatgcgcaataatcctcgcaagtcggaatatcatatgtcactttaaccattatttaccccacttttcatcacacaatatatcaacctagtataaatgtttatttacaatagtcttattcgcttctttaaacacttcatgatgact

SEQ ID NO: 2973 - DNA, 130 bp, Staphylococcus aureus
ttacgtgataaaagaatgtgttcacgagtttgtggcattggaccgtcagcagcagatactactaagataccgccgtccatttgagcagcaccagtgatcatgtttttaacgtagtcagcgtgtcctgggc

SEQ ID NO: 2974 - DNA, 187 bp, Staphylococcus aureus
accgaatccttgaccgtaatcttggaattcattttgttgacgttggccaccattttgttgcgcatttttaggttcaaggaattgaacgctatcacacacaacttcagtaacaaacacacgacgaccttcttgattttcataattacgggattgtaagcgaccatctacaccagctaaactaccttta

SEQ ID NO: 2975 - DNA, 903 bp, Staphylococcus aureus
tgtgcttcagcttctgcctcttcttcttttgtcacttcatcatcagcctcatctatgatcgctagtacttcttcaggtgatgaagcatgtaataatttctcacgtacattttcatccattaaaataccagacaacttagctaaagcatctagatgtgtttgggcgccaccttctggcgctgcaatcataaagaataagtgtgctggttgcatatccaaactttgataatctacgcctgctttagatttaccaaacgcaatagctggtgacttaactgcggccactttggcatgtggaatggcaataccttcgccgataccagttgtactttgtgattctcgattgtgaatcgcttccttaaatgacgcgacatcacttaatttacctgctttgtctaattgatttactaactcatcaataacaccatttttgtcatttgccattaaatccattgctattgtatcttttgttaataactctgttactctcattattttcactccccatcaagtacgctaatcgtaacttgtgattttattttttctatagcgtcccgtgttgctaagtcctcatcaaatgccgtggcagtaccgcatgcgactgcttgttggaatgctttttcaatcgttaaacctgaagcaattccagccaccatgcctgcaactgtactatcaccagagccaactgtattaaccactttcccttgtggattaactgctttaatactgatttctttatcaatataaatagcaccatcaccgccaagcgagacaataacagattgcgcacctttatcaactaacaaactgaccatatttaataacatctgtgtctgagttcactgttgtattaaacatcacttctaattcatctttattaggtttaataaatagtggatgatat

SEQ ID NO: 2976 - DNA, 171 bp, Staphylococcus aureus; identical to SEQ ID NO: 2934

SEQ ID NO: 2977 - DNA, 167 bp, Staphylococcus aureus; identical to SEQ ID NO: 1733

SEQ ID NO: 2978 - DNA, 236 bp, Staphylococcus aureus; identical to SEQ ID NO: 2569

SEQ ID NO: 2979 - DNA, 188 bp, Staphylococcus aureus
taccgcatatccacctaaacgtgatgctaaaactctatccgcacctgttgggctaccaccacgttgaacgtgacctaacacagacactctattatcaacattgatgtattgtgataattctttttgacaatcttgcgcagtcatacaaccttctgctacaagaacgattgagtgtttcttaccacgtt

SEQ ID NO: 2980 - DNA, 229 bp, Staphylococcus aureus; identical to SEQ ID NO: 2950

SEQ ID NO: 2981 - DNA, 236 bp, Staphylococcus aureus
ttcaccacgttgaactggttgaccgatttctacaataattcttgaagtacctgaagcaaggtatgatcttgtttcattagcacctttaacaacaatttcttgttgtctatcttttgctaatttaatatcttctacgacaccttcgatttccgtaattaccgcttgacctttagggttacgtgcttcgaaaatctcttgaatacgaggaagaccttgtgtgatatcgctacctgcta

SEQ ID NO: 2982 - DNA, 296 bp, Staphylococcus aureus
gcaggcacctaagcatgaactttcataactttcaggaaccactaactctgtgtcaaatatatctgacatcatttgacgccatacttcacttttcgcaaaaccacctgttgcttttatcatcttaggtgtttcattcattacttcaataagcgcaagatagacggtatacaaattgtaaagaacaccttctaatgcagcgcgaatcatatgttcttttttatgagataaagttaaaccgaagaatgaacctcttgcatttgcgttccaaagcggcgcacgttctcctgctaaatagg

SEQ ID NO: 2983 - DNA, 174 bp, Staphylococcus aureus
tgtaatcatgtcgcctttttcaataattttatcacttgcaacaccatgtggtaatgcacctctatgaccagatgctacaatcgtatcgaatgatggtccatctgctcctaattctagcattttgctttctaatattgcctttaattctttttcagtcatgcctgcttttacaac

SEQ ID NO: 2984 - DNA, 160 bp, Staphylococcus aureus
tatctggcgctgctgcaccgcatgcaccacatgcaatacaagtatccatatcaacgattgtatattttgccaatgtcttcgcctcctttgataaaaatgctaaaatagtaatgtgactaaaattttagacagcatcatttttattttcaaattatccgtt

SEQ ID NO: 2985 - DNA, 140 bp, Staphylococcus aureus
cagtttgttgattttcccaggtaatcacaccatttttcacaaatactttccaagaacatgagcctgtacagttaacaccatgtgttgttcttacttctttatcgtggctccaacgttctctgtacattttttcccattct

SEQ ID NO: 2986 - DNA, 383 bp, Staphylococcus aureus
atattgatcccaactcgcacaagcaggtgacaataatacaacatcatttggttctataatatcttgtactttatcaacagcgtcttcgacattgttcgcttcaatgaccgatttcccttgactattacctagtttagcaaacttagctttcgtttgtccgaatacaaccatcgcgcgaacattttccatataaggaatgagttcgtcaaattcattccctcgatccaaaccaccacataaccaaatgattggttgattaaatgaatttaaggcaaactgtgttgctagcgtgtttgttgctttggaatcattataatatttattagttctattagtaccaacatattgcaatctatgctctattcctgaaaatgtagttaaac

SEQ ID NO: 2987 - DNA, 426 bp, Staphylococcus aureus; identical to SEQ ID NO: 2509

SEQ ID NO: 2988 - DNA, 205 bp, Staphylococcus aureus; identical to SEQ ID NO: 1684

SEQ ID NO: 2989 - DNA, 303 bp, Staphylococcus aureus
tacatttgaattcccaaatttaacatgatgtttcatgcgtgctattaattcggtgtttccattcgattcattacttccacctgaagatacgccgtttttatataatttttcaggattcatattataatcaactgcactcggtctcccgtgaaaatatcgtgtctctgtccagtgctgtccaatcaattttgatccaactatacgattgtcatacgtaattaaactgccatttgcttgttgataaaaaaatatttgaccaattaacgtgatagctaacgggaataaaaatccacataataccat

SEQ ID NO: 2990 - DNA, 182 bp, Staphylococcus aureus
tttctgggaaaattaattgttctttaacacctaaagtgtagttaccgcgtccgtcaaatgcttttttagaaacaccttggaagtcacgtacacgtggtaatgatactgaaattaatttgtctaagaattcatacattctttcaccgcgaagtgttactttcgcaccgattggcataccttca

SEQ ID NO: 2991 - DNA, 197 bp, Staphylococcus aureus
cacacacgttgacgagaaataacccattcgccacggtcacgaaccatattgtaaatacgtgttttaccccaatttactttgaagtttgtattttcgattgcatctaaaatatcttgtcttactttactgattgaggcaaaccattgtggtgtagcacggaagattacaggtttttttgttctccagtcgtgtggata

SEQ ID NO: 2992 - DNA, 162 bp, Staphylococcus aureus
gcttttttagctgctttagcaatacctttttcacgtaggtagtcaatcgctttatcgatgtcaccatcagtttcagttagcgcttttttacaatccatcatacccgcgccagttttttcacgtaattctttaacaagttttgctgaaatagttgccattcat

SEQ ID NO: 2993 - DNA, 162 bp, Staphylococcus aureus; identical to SEQ ID NO: 2992

SEQ ID NO: 2994 - DNA, 265 bp, Staphylococcus aureus
tgtataattcttctactgttttgccacgtaatttcgcaacatcttcagcatttttaaggttttgtaaaccatcgattgtagcacgaaccatgttgattggtgtgtttgatcctaatgatttacttaagatatcagtgatacctgctaattcaagtacggcacgaacaggaccaccagcgataactcctgtaccaggtgcagccggtttcataaatacgcttcctgaaccgtaacggccagtaattgtgtgtggagttgtaccttc

SEQ ID NO: 2995 - DNA, 217 bp, Staphylococcus aureus; identical to SEQ ID NO: 2288

SEQ ID NO: 2996 - DNA, 257 bp, Staphylococcus aureus; identical to SEQ ID NO: 1711

SEQ ID NO: 2997 - DNA, 121 bp, Staphylococcus aureus
tacatacttagctttacgttcatctggtaattcaggaattgtctgacgaacacgctctttccaagcatcatcaatatataaaggtacaatgtcaggctctgggaagtaacggtaatcatca

SEQ ID NO: 2998 - DNA, 305 bp, Staphylococcus aureus
agtctactgcacgcttattaacaactggtaagacacctggatatgctaagtcgataacatttgtatttgagttaggttctgctccaaaatgcgctggtgatggagaaaacatttttgagtccgtttttaactctacgtgaacttcaagtcctataactgtttcaaaatgcatgatttccactccttataatttttcataaacgtcatgtaaattgtattgtgtttcatattgataagcgacacgatataacgttttttcatcgaatggtttaccaatgaactgtaaaccgattggtcggccattt

SEQ ID NO: 2999 - DNA, 505 bp, Staphylococcus aureus; identical to SEQ ID NO: 1899

SEQ ID NO: 3000 - DNA, 203 bp, Staphylococcus aureus; identical to SEQ ID NO: 1892

SEQ ID NO: 3001 - DNA, 187 bp, Staphylococcus aureus
taaattaatgagtaaatcacactcagttaatgccatgttactagcataagaaccatgcattcctcccatacctaaaaatagtgtatcctcataaggtacagcacctagacctagtaaagtagtaactgttgggatttgatgtttattaacaaactgtgttaataattgatttgattttgattgatta

SEQ ID NO: 3002 - DNA, 361 bp, Staphylococcus aureus
tgctgatcttgtcacacgtggcttactttctgatgccgttcttggctgtgccacttcaacttgtgtttctgcgacttgattttgtgtagcctttttaggtgttaaatctacttgtctttgatctccgctattgtcttgagattgtgttgtttccttaacttgaggtttcgcttcttccttaactacctcttctttaactgtttctatatttgctggttgtgcagtttgtggtgcttgtactgcttttggtgcttcttcagttgttacttgtgttgcgtttgacggttgttctgttactgttgcgttatatgattgagtttcttctatatgattaacgttagttgcagttgtttgtgtttca

SEQ ID NO: 3003 - DNA, 270 bp, Staphylococcus aureus
tcttttgtatatatatcatttgtaataacgccgatactcatttcttttgaaagacgttttacaactttttcaattaattgtgttttacctgcacctacaggaccaccaataccaattttaatcggatttgccacaattataacctcctatgatatgaaaattctaacattgacgttctcatgcgccatttgatttagttctaaaccaggcgctgtcatgccaaaatctgcttcttttaattcgaaaatctgctttcttgttccttctata

SEQ ID NO: 3004 - DNA, 360 bp, Staphylococcus aureus
tcttggtaaacagtgacattttcttcaatcggcgtatgattgtttgtggcaccgaccatcgatgaaacgattgaaaaatcttcaatgtcacctacagctttaagtccgagcacgcaggcacctaagcatgaactttcataactttcaggaaccactaactctgtgtcaaatatatctgacatcatttgacgccatacttcacttttcgcaaaaccacctgttgcttttatcatcttaggtgtttcattcattacttcaataagcgcaagatagacggtatacaaattgtaaagaacaccttctaatgcagcgcgaatcatatgttcttttttatgagataaagttaaaccgaagaatgaa

SEQ ID NO: 3005 - DNA, 515 bp, Staphylococcus aureus
ggttgaattctgctgaatctgttaacactctcggcgttgtttcatgtttaatactatttaatttttgtactttacctgctaattccttggttttaactccatgtttaggattggctgctttttcaacaatttcctccatttgattccaagcgccacaattaggacatttccccatccatttaggagattgataaccacaagccatacattcaaaaatcacttttttcttggccaaaattgcacctccactttcctttgaacaaatctattttaaacgcacattcccattatgacaaattaaatgtgagttacatttgtttgtattttaacatgactactaacgcaaactgttttaccagatttattttttatgaatattataaaataaacttacatcatgttgatagtcggtatctttcaaagataaaatcttaataatttcttagtaaactcttttctctagatttatcacaatattatatagacctattttattttgacgtaagttgctagta

SEQ ID NO: 3006 - DNA, 141 bp, Staphylococcus aureus
cctgaagttacttctccaataatatttccatctaaatccataacttcataaccagttcttgcaattcctttttcaagtaattctaatcccactgttcttcttggtgcaccattttctttttgatcttttaatacagattta

SEQ ID NO: 3007 - DNA, 166 bp, Staphylococcus aureus; identical to SEQ ID NO: 2846

SEQ ID NO: 3008 - DNA, 371 bp, Staphylococcus aureus; identical to SEQ ID NO: 2513

SEQ ID NO: 3009 - DNA, 517 bp, Staphylococcus aureus
tacctgttaatacacctattgccatacctaaatttgcattacttgctgtcttcatatcattagcagtgtctcctactatagctactttctgaggatctacattatattgctcaaataaaggcgataatactttaggatttggcttctcataggcatccgcttcggtagaaatgatcaaatcgaacaacgaggtagcattggtatgtgctaaaaattgttctacaccttttttagtatcactcgtaacaataccaagttgatagccttttgctttcaaatcgataagtgcttctttaacaccttctacccaattaatttcaggaatacgttcatctaccagcttttgacttgttgacttggaccagtcggttgtatcttgtcccgtcacatcattaaatgcctggataatttgttgtaaagatcctgaacccatcactgattttggatcaatagattctttaatgacaccgagttgtcttaaagcagcttctttattatgtactgggaaagtctcaag

SEQ ID NO: 3010 - DNA, 497 bp, Staphylococcus aureus
gccaaatttctctttcaagaccttcttctctaatcacttggcgtaaaatcgcgtctgattctctaacgatttctagtttatcttcagtaatttctccaagtacacgaataccaagaccaggtcctgggaatggttgtctccatactaaatgttctggaatacctaactcaatacctaatttacgtacttcatctttaaacaatgtattgattggttcgattaattcgaattccatgtcttctggtaatccaccaacattgtggtgtgatttgattgtttgtgctgttttagtacctgattcgatgacgtctgtatatagtgttccttgcgcaaggaagtctacacctttcagttttgatgcttcatcatcaaatacgtatacaaattcattaccaatgattttacgtttttgttcaggatctgaaacaccttttaatttattcataaagcgatctttcgcattaacacgaataatattcatgttgaaaccttcaccg

SEQ ID NO: 3011 - DNA, 197 bp, Staphylococcus aureus
tattttacctccaaattttacatcttcatttttaatttgtattgattattttctttcttcaagcgggatatacttacgattcgtttcgccaatatatttcgctctaggacgcataattctattatctttatattgttctaaaatatgagcaatccatcctgcagaacgacttacagcaaagattggcgtgaataagt

SEQ ID NO: 3012 - DNA, 363 bp, Staphylococcus aureus
tgacctacttccgcttcacgtgtaatttcctcaatgatttcacgagcacgatttatcatagcttgatcaacagcaccaataaagatagtaccatcttgttcaatatctaatttaacacctgtttcatcaataatttcgttaatttttttaccaccaggtccgataacatctctaatcttatctggtttaattgtcatagttacaacttttggcgcgtaagcacttaattcagtacgtggttgatcaattgtttgtaacatatgattcattatttctaaacgaccacgtctcgcttgttctagagcctcttcgataatttcacgcgttaaaccgtcaattttaatatccatttggattgctgta

SEQ ID NO: 3013 - DNA, 147 bp, Staphylococcus aureus; identical to SEQ ID NO: 1791

SEQ ID NO: 3014 - DNA, 94 bp, Staphylococcus aureus
ttcagctttctctttgctgcctgcatagtttactgctacattatatccttcttctgctaattgtaacgcaatactacgtccaattcctcttgat

SEQ ID NO: 3015 - DNA, 330 bp, Staphylococcus aureus
gcaattttactgctcattgttccgtcttcgataagtttaatcatacctgctaaattttctggtgttaatttagtatctaataattctacttgatttttatttaaatattcgtttacgccacccattaaccagttagatgttaatttaacatctgcaccgtgttcaattgttgattcaaagaaatctgacatttctttagtcaatgttaatacgtgtgcatcgtatgcaggtaaacctaattcatttacatacttagctttacgttcatctggtaattcaggaattgtctgacgaacacgctctttccaagcatcatcaatatataaaggt

SEQ ID NO: 3016 - DNA, 147 bp, Staphylococcus aureus
cttgggttatctaattgtcctgttttaactaaatatgcccaaaactgttttgaaatttggtactgctcatttatcttaattgctttactacaatcaactgtgccatccttaccttcttttgtatagttcaactcgcaaagtgctgaa

SEQ ID NO: 3017 - DNA, 166 bp, Staphylococcus aureus
ccgaattgcgctttaccgccaagtggttgttgtgtaacaagtgaatatggtcctgttgaacgcgcatgtaatttatcatcaaccatgtgcgcaagtttcaacatgtacattacacctactgaaatacggttatcgaatggttcacctgtacgtccatcataaagta

SEQ ID NO: 3018 - DNA, 194 bp, Staphylococcus aureus; identical to SEQ ID NO: 1701

SEQ ID NO: 3019 - DNA, 193 bp, Staphylococcus aureus; identical to SEQ ID NO: 2646

SEQ ID NO: 3020 - DNA, 232 bp, Staphylococcus aureus
gtaaacgtttcagaaacgccaccgccacgacgtttaattacaacgccttcgaatacttggatacgctcacgagtaccctcaatgatacgtacgtgtacacgtaaagtatcaccaggacggaaacttggtaagtctgtacgtaattgtgatttagttactgcttcgattaatttgtgatttgtcattataaattctcctcttcaacctatgttcttgcctcgacaaatatata

SEQ ID NO: 3021 - DNA, 101 bp, Staphylococcus aureus
atgagtaagaactaatgtcttgagctaacaagaagccttcacgtgaagtttcagaaaagcgtccgcgtaagtcttccatattagcaaatgcgattgaatga

SEQ ID NO: 3022 - DNA, 183 bp, Staphylococcus aureus
tggctcccagccaaatgcttcataaatcataatttgtttaggcgtgtttgaaatatgatcatcaccacgaattacatctgaaatttgcatgtaatgatcatctatagctactgcaaaattgtacgttggaatgccatctttttttacgataacccagtcaccaataccatttgaatcaaatga

SEQ ID NO: 3023 - DNA, 260 bp, Staphylococcus aureus
ccttcgaacttactgtagtcatatacaccattttcatagaattctgatgatgcacagtcaaatcctaagaatacttcttcacctggtttgtaaccagctgcttcgattgcttggataattgtttcaacagcatcttcagtaccttcaaatttaggagcgaaaccaccttcgtcacctactgcagtttctaaaccacgtttgcttaaaattgattttaagttgtggaaaatttcagtaccccaacgtaatgattctttgaa

SEQ ID NO: 3024 - DNA, 91 bp, Staphylococcus aureus
cgttgttctatccgagatacacgacgtacctcacccgttaaaccaacttctccaatatagcaatctaatccgtcgacagctttatctttaa

SEQ ID NO: 3025 - DNA, 175 bp, Staphylococcus aureus
tttacctttaacatcttgtgtaaaaattactttcatgcatcttcactcctacttaattgttctgtaattgcttgttgtaattgtgctatcgcctcttcgactgtcacacctttaagttgtgttgccgcattggttaaatgtccaccgccaccaagtgcttccattgttaactgga

SEQ ID NO: 3026 - DNA, 216 bp, Staphylococcus aureus
gctgctactactaaaatagtaatatctgttacttgtgcaccacgcgcacgcatcgttgtaaatgcagcatgtcccggtgtatctaagaaagtgatttttttgccatcgttttcaatttgatatgcaccaatatgttgagtgattccgcctgcttcacctgctgtaacttttgtatgacgaattgaatctaataaagtcgttttaccatggtcaaca

SEQ ID NO: 3027 - DNA, 80 bp, Staphylococcus aureus
ttcttctaatttcataccacgtgatcctttaactaatacacggtcatgcgcttttaaatcgtttattaaaacttctatca

SEQ ID NO: 3028 - DNA, 170 bp, Staphylococcus aureus
gcttcagcagcatttttacctctgattaagtcaagaactagtcttactttacgaggtgcgattcttattgttctagcaaccgcttttgcttccattaggatgtcctcctctacttaatagatattatcttcttgttttcttgtcgtctgcaacgtgtcctttgaatgtac

SEQ ID NO: 3029 - DNA, 236 bp, Staphylococcus aureus; identical to SEQ ID NO: 1994

SEQ ID NO: 3030 - DNA, 799 bp, Staphylococcus aureus
  misc_feature (1)...(799): n = A,T,C or G
ttgatacgttttgaaattattttctaacgcttctccaaaagcaacctgcttttgctgcaataacatgctcaagaggtccaccttgaataccagggaaaattgttttatctatgtcttttttatattcttccttacataaaatcataccaccacgtggtccgcgtaatgttttgtgtgttgtagttgttacaaaatcagcatattctactggatttggatgtaaacctgccgctactaatcctgcaatatgtgccatgtctaccattaacttagcgtttacttcatctgcgatttctttaaactttttgaagtcaattgttcttgaatatgctgatgctcctgccacaataagcttaggcttatgctctaacgctaatttacgaacttcatcataattgattcgttctgtgtctttatctactccatattcaacgaaattgtagaatttaccactaaaattaacaggcgctccatgtgtcaagtgaccaccatgactcaaattcatacctaaaactgtgtcgcccatttctaatgcaactaagtaaacagccatgttcgcttgtgaacctgaatgtggttgaacattgacatgttcagctccaaacaatgctttagcacgatcaattgcgatgctttcaggtaacatctacaaactcacagccaccataatatcggcgtcctggatagccttcagcatacttattagtcaacnctgaaccttgtgcttccataaccgcttccgatacaaaattttccgatgcgattaactctatgttgctattttgtntctgaaattntc

SEQ ID NO: 3031 - DNA, 579 bp, Staphylococcus aureus
tcatcattttcttctgaatcaatcacttcagtatgaattgcatttcctggtgtttcatcatttacaaccgcttcacgttgttgttcagtaccatcttcagatacagttgaagtagattgctcatcttcattcgtttcatcttctgcatcttcttttactttagcaaccgttgaaacaaattgatcatcacctaagcgaattaagcgaacaccttgtgctgcacgaccattttgagaaatatctgcaacatctagtcgaataatgacacctgcattagtaacaatcattaaatcttcttcaccagttactgtagtgatacatacaacattaccattacgctcagtaatcgtagctgttttaatacctttaccaccacgatttgataagcgatagtcattaactggcgtacgtttaccataaccattttcagtaactactaatacttcatcaacactgtttgcatgagctacatcaagccctacaacttcgtcaccttcacgaagtgtaatacctttcacacccgttgctgtacggcctaaaggacgtaatgttgattcagggaatcgaattaatgatgca

SEQ ID NO: 3032 - DNA, 250 bp, Staphylococcus aureus
accagatcttaatctgattaatacgtatttaccttctttaccaagtacttgagcacttgcaccagctgaacgagcgatttgtccacctttaccaggtttaagctcgatgttgtgtactactgtaccaactggaatgttttgtaatggtaatgcgttaccaactttgatgtcagcttcagcaccactttcaacgatttgacctacttctaatcctttaggagcaatgatatatcgtttttcaccgtctgca

SEQ ID NO: 3033 - DNA, 209 bp, Staphylococcus aureus
tcctgctgttgctggattcacatatgtttggccgcttccattggcatttgcattttttggataacagttataaaaataatgcgtatgtccttgagcatctacgaatgtatagctatattctttattatcaaacattgcttgattccagttaccatcaggtgtgtgatgataatccccattagaatcaattgtataataagtaccataag

SEQ ID NO: 3034 - DNA, 151 bp, Staphylococcus aureus
tcattaataattgtttgcctatttttacaacctctattaactttgtaggattcgaatctaaatcaattagattagctgcctctttagcactaattgtccctgagttcatagctaatcctatattcgcttgtgctagcgcaggtgcatcatt

SEQ ID NO: 3035 - DNA, 258 bp, Staphylococcus aureus
gcagcaattgcatcaagaatatctgcaactttgttataagcttcttcttgtccacccggcattaatgacggaccagttaacgctccaatttcaccaccagaaacgcccataccaataaagttgattgcactttgtgctaatgctttattacgtctgatagtatcttgatagtttgtattaccaccatcaattaaaatatctccatcatctaataaaggtaacaaactatcaatcgttgcgtccgtagctttacctgct

SEQ ID NO: 3036 - DNA, 215 bp, Staphylococcus aureus
cgtaaggagtttcctagtgtagtaccgtagccacgttctagtggttcaacaacgaacttaccgaatttagcatcttcactaatttcaattgtctcaattctaggtttttcgatttctatcatttaaatatcctccttatatacgtcgacttaatttaaaatgtttgctcagtgacctgtaacaataccatcataaattatacacgacgacgtttt

SEQ ID NO: 3037 - DNA, 368 bp, Staphylococcus aureus
tgctttctgcagcttgtaacgcttgatctactgcttcttttttatcagttgacgcttcagtgtaatttggttgagccttatctgtattcacttgatcaactttatttttcaatgtttccatcgcgtgatcaagttcagtagcagtttgaacatgttgtgcaacctctgttcttgtaggcgctgcatttatagcatcagttaatgcttgttgttgtgcatgatttaagtttggcaatgcatttacagttgttactgcttgttgttgatcacgagcaagtttttgatcaccatgtagattatcttttgcagttgttactgcttgtgtcaattgttctacttgtgatttgtcgagtgttggattacctgtt

SEQ ID NO: 3038 - DNA, 144 bp, Staphylococcus aureus
ctatcagatcgttctactgtcgtacctcgctttaaagccaagcgcacttttgaacgatttcggcgttcaaaactatttaataactcatcatcatttttatcaattggtgtaatcatagtcatacgtggttggatgtagtctttt

SEQ ID NO: 3039 - DNA, 247 bp, Staphylococcus aureus
tttttttaacttgtcattcggtagtggcttcgttggtatgattttattatgttccatttttaccggataccttttttcatcatcctttggtctgccgttactgtcatctgtcatttcacttataaaataatacccttttgtggttctagtattgcgattgatatagagcaccattcctctcgtttccatatccttaccttttggctcgattaccatttcagaattaactatccaagtacctttatca

SEQ ID NO: 3040 - DNA, 148 bp, Staphylococcus aureus
actagaaatcttttgtaagacttcccaatcgatgcgtgcgaagtcacttgtcataccgtcgatagatgttactgcacgaatacctactgtgtgatcatacgtacggtagtctcccataacacctactgattgaatgtttggtaacact

SEQ ID NO: 3041 - DNA, 390 bp, Staphylococcus aureus
attatcgtaagcatctttgatcttttgtaagaattgtgcacggataatgcaaccttctctccaaatcatagctaaatcaccaagttttaaattccattcattatcttcacttgctttacgcatttgcgcgaaaccttgtgcataagaacaaattttactcatatataatgctttacgaattttttctaaaaagtctttcttgtcaccatcaaatgatgcttttggaccatttaattctttagaagcatttacgcgctcttctttgattgaagagataaaacgtgcaaatacagattcagtaatgattgttaatggaatacctaattctaatgcgttaattgaagtccattttcctgtacctttttgacctgcagtatcaagaattttttc

SEQ ID NO: 3042 - DNA, 340 bp, Staphylococcus aureus
tgctgtgcatgccatgacaaccgtttcgtattcacccttaacgtttttaacatctttatacaaacgattaatttcaaacttaccttccagatgttgatgcgcctcgttttgtattttgacttcaaattgtttctcttttttatacgcttgatataagcgttttgatttttctgatgttgaggcacgtccaaccatatcaatctcataatctgattttaaatagcaaatattcgctaattggattgcgaccggaccagtgcctatcattaataatttagacatccgtaatacctacctttatagctgcttttttataaagtgctatatcaaaaatttgctg

SEQ ID NO: 3043 - DNA, 229 bp, Staphylococcus aureus
tgcttcaattctatctggaatgatagcatgttctacaccatgtaatgattctacaccattgattgtaattgtgtctgtaccagcaccagtaattctaccacccatttcattaatgtagtttgctaaatcgacaatttcaggttctttagctgcattttcaattaaagtcttacccttagctaatgatgctgccataataatattttgtgttgctcctacacttggaaaa

SEQ ID NO: 3044 - DNA, 257 bp, Staphylococcus aureus; identical to SEQ ID NO: 2941

SEQ ID NO: 3045 - DNA, 261 bp, Staphylococcus aureus
tgtttcaggagcatcattttgttgtaaatctactttgcgttctacaacatcatcgtcatcaacgtctgtcatttcgatttcattatcttgctcatccataacttttacatctaaacctaaactttgtaattctttcatcaatactcggaatgattctggaacacttggtctagagatgttttcacctttaacaatagcctcgtatgttttcacacgtcctactgtatcatcggatttgtaagttaagatttcttgtaatgt

SEQ ID NO: 3046 - DNA, 248 bp, Staphylococcus aureus
gggcgaacagcccaacccttgggaccgactacagccccaggatgcgatgagccgacatcgaggtgccaaacctccccgtcgatgtgaactcttgggggagataagcctgttatccccggggtagcttttatccgttgagcgatggcccttccatgcggaaccaccggatcactaagtccgtctttcgaccctgctcgacttgtaggtctcgcagtcaagctcccttatgcctttacactctatgaatg

SEQ ID NO: 3047 - DNA, 173 bp, Staphylococcus aureus
gcccagttgccatatcaggaattaacattggtacgaaaaatggactcacacgtcttgggcctttatccattaattgtttatgtgcaatttcaaatgtttccataccaccgataccagaaccaatccatacaccgattcgatctgcagtattttcattgatatctaattgcgca

SEQ ID NO: 3048 - DNA, 399 bp, Staphylococcus aureus
ctaaaggttgtttagattctctacgttctgttaaatcatccattttagcttgtatttcagtcattttaccaggagctaaagtaaatgcagcttctaatacaactaagtgttctttttgaataatgctattacgataatctaactctaattcttttgttgtaagtttaattaacgagccttgttcgtttacgcaaagcgcatagtctatacaatctttaacttcgccaccataagcgccagcattcatatacactgcaccaccaattgaacctggaataccacatgcaaattcaaggccagtaagtgcgtaatcacgagcaacacgtgagacatcaataattgcagcgccgctaccggctattatcgcatcatcagatacttcgatatgatctagtgata

SEQ ID NO: 3049 - DNA, 176 bp, Staphylococcus aureus
taccattaaacgccatacgcgatctaagaatcgacgagacccatctaatcctttttcactccatgcaattgcagcatctaaaggtcccataaacatttcgtaaagacgcaaagtatctgcaccatgagactgtactatatcatcaggattgattacatttcctttagatttactca

SEQ ID NO: 3050 - DNA, 324 bp, Staphylococcus aureus; identical to SEQ ID NO: 1697

SEQ ID NO: 3051 - DNA, 203 bp, Staphylococcus aureus; identical to SEQ ID NO: 1892

SEQ ID NO: 3052 - DNA, 313 bp, Staphylococcus aureus
tgctaatggatcattaccatctacttgttcaccatgtataccgtaaccaagtgctctatccgataatttttcagctgcgtattgtaatgaatcaggtactgaaattgcatatttattatttataatgacacatacaaaaggaagtttgtgtacacccgcgaagtttaaaccttcatggaagtcaccttggtttgagctaccttcaccaacagttgctgttgcaattttcttcttaccatccatttttaaagctaaagcagcaccaacagcatggggtatttgagttgctaccggtgaactttgagacaaaata

SEQ ID NO: 3053 - DNA, 194 bp, Staphylococcus aureus
cacgaacaataacatcttgtgccacgtcaacaagacgacgagtaagatatcctgagtcagctgttttaagtgctgtatcggcaagacctttacgtgcaccgtgagttgagatgaagtattcaagtactgttaaaccttcacggaatgaagatgtgattggtaattcgataatcttaccagatggtgcggccatc

SEQ ID NO: 3054 - DNA, 107 bp, Staphylococcus aureus
tctttaccgtcacttacgacgattgtaatgtggcttgtacgtttgttaatcgcacttgcacgaccttgcgcacgtggacggaaacgttttaatgttggtccttcgtt

SEQ ID NO: 3055 - DNA, 143 bp, Staphylococcus aureus
tgctttacttaaactttctgcaaattcatttaaaaatgcctgtgttctagagaaagtgtgtggttgaaatactgcaacaacttctttatgtggatatttctttcgtgctgtttcaattgtagcactaatttctcttggatggt

SEQ ID NO: 3056 - DNA, 278 bp, Staphylococcus aureus
tcattggttacaaccatagtaattggactacctaatgtataaccatttctaacgcctgatactatttctactgtatctttctcaatttgcatacgacgtccacgtccgtaaccgccttgacgcttaaacatttctttattaatatcctcaaccttaatttctatatttgcaggtacaccttcaacaataactgttaattgaggtccatgtgattctcctgatgttaggtatctcatacacactcgctcctttcatacttccacgataacattataata

SEQ ID NO: 3057 - DNA, 226 bp, Staphylococcus aureus; identical to SEQ ID NO: 1856

SEQ ID NO: 3058 - DNA, 193 bp, Staphylococcus aureus
agtagtgcttcgtcataagttggccaaggttggtacgtaatagactcttcatgtcctaattttgaccataattcttcaccgatatgtggtgcaataggtgctaacattttaacgaagccttcaatgtaaggtttataaacttcatcaactttataacactcattaataaataccattaattgactaatagcag

SEQ ID NO: 3059 - DNA, 268 bp, Staphylococcus aureus
caaatcaattctagcttctgtaatattcgctacataatctacacccatgaccttgggtacatcgccttgaatatacgctttgatatcatcaacacgtttcatcggtaaacctgttaattctgcttcaatattcatatactcatgttcgctgtcgtaaataatttgaccatcatgatatgtaagaacgaaaaagcctctatctcgacaataatctacaatttcatcgaaatcttgcttaccaatcgatttacttacttctacttcttca

SEQ ID NO: 3060 - DNA, 147 bp, Staphylococcus aureus
gtaccttgacgagcacgacctgttcctttttgcttccatggtttacgtccgccaccgcttactgctgaacgattcttaacagcatgcgtaccttgacgtaatgaagcacgttgtaaattaatagcttcgaataaaacgctattattt

SEQ ID NO: 3061 - DNA, 153 bp, Staphylococcus aureus
actttgttgatttgcccacgaatagcagggttatcttcaacaactactgaactgttagtctttttaagacctaaagcttcaacagttttacgttgtgtttcaggacgaccaataacactacgagtgagggtaatttgtaatttagccataact

SEQ ID NO: 3062 - DNA, 140 bp, Staphylococcus aureus
actaattcagcgatatcaagtgagtcagcgcctaaatcatctttgaaagatgcatcttcagttactttatcagcgtctacacctaaacggtcaacgatgatatcttttactttatcgaaattttccacgtcgattcacct

SEQ ID NO: 3063 - DNA, 158 bp, Staphylococcus aureus; identical to SEQ ID NO: 2908

SEQ ID NO: 3064 - DNA, 131 bp, Staphylococcus aureus
gattgtacgctttggctggtgcttcggccacagctaaactcgctgcatgtggaaagcggttaccgggtccgattacaaaagtgtcaaatgtgttatgggcattgaattgctctctaccaagcacatgatta

SEQ ID NO: 3065 - DNA, 311 bp, Staphylococcus aureus
tgcatgagtttacctgctaattcataattgtgctgtgctaatgcacaaatcattgtattactaattgcactacttttaaccgcttcactatgtgttaatttttgtggtaaagcacgtcttgatgcttctgtttttagttcataagttggtatcgttacaatcacatccacgtctggtatgtcgatatgtgcaactgacgtttctttcgagacatcattataatatccagcgattaaaccaccataaatggtcggcgcaacattatcaggatgtccttcgatttcagtcgctaattgtaatacctcatgttt

SEQ ID NO: 3066 - DNA, 135 bp, Staphylococcus aureus
gtccgtttttaactctacgtgaacttcaagtcctataactgtttcaaaatgcatgatttccactccttataatttttcataaacgtcatgtaaattgtattgtgtttcatattgataagcgacacgatataacgt

SEQ ID NO: 3067 - DNA, 332 bp, Staphylococcus aureus
tctctgattttataacccattttttcattacggtcatcaatacttacacgaacgccttgagatttcaattcatcttgtaattggcgcgcataatcataatgtaaatcaacgttaactggaatgatttgaacttgttttggcgctaaccaagttgggaatgcacctttagtttcttcagttaaaaatgctacaaatcgttccattgttgatacaacaccacgatgaataacaactggacgatgatgttcaccatcttgaccaatataagttaaatcaaaacgttctggtaataagaaatcaagttgtgctgttgataatgtctcttctttacc

SEQ ID NO: 3068 - DNA, 307 bp, Staphylococcus aureus
gaaataccaggtaatccagctaagtttactggtgttgttaataaatcattggcatacattgttaatggatcatcaatttcttcacctaaattaaacgcagttgtaggcgctgttggaccaactactacatcataattttcgaatactttatcaaagtcatttttaatcaatgttctaactttttgagattttttatagtaagcatcatagtaacctgaacttaatgcaaatgtacctaagaaaatacgacgttttacttctttaccgaaaccttcagatcttgacattttatataattcttctaatg

SEQ ID NO: 3069 - DNA, 343 bp, Staphylococcus aureus
tactaattcaccgcgttcataaaaagcaacttgcgtaacgtcttcaccaatatcaatgacacatgcacctaactctttttcagtagctgttaggattgaaccatagttatatgcatcagagtaaacatctaatacatcaacaccacatgcttctacgcatttaatcatattaattaaaatcgatttttgaatagcaattacgcctgcttcaacctttaatgaatgtctggcaattaattctttagggtctgaaacctcattttctttatcgactataaaacgaatcgggaacacattaattacttctgtttcttgcacatcatttttttctctaataccttct

SEQ ID NO: 3070 - DNA, 468 bp, Staphylococcus aureus
aatgattacaaagtctaaatgttcttctttagcatgttttaatgcattagttacaatttgttgtggctttacttgatctccttcactgtatacaggaatatcaatttgtttccctactgtttgtaattgatttatcgctgctggacgataaatatctgctgcaactaacataggttttttgttgtattttttacgcatcaataatgctaatttacctgcagttgttgttttaccagcaccttgtaaaccaaccatcataacaacagtaggtggtttatttgacatattaatcgacgtattttctccacccatcaactgcgttaattcatcttgaactattttaataacttgttgccctggtgttaatgattgcattacatcggaacctaatgcgcgttctgatactgttttaataaattcttttaccactttaaagtttacgtcagcctcaagtaacgctaatcttac

SEQ ID NO: 3071 - DNA, 443 bp, Staphylococcus aureus
tcaaatgcttctggtaatgttgatgaagtcataaattgacgacgactaacgatttcattcgtaattaaagggctaaatccttcaaactgattcaataattgtttagcaatattacctgcgttaaaatcgatatatttcaacacctctgcacctgtaatatcatacggatttattttgtgctgagtaggtggtgcttcataattaaatcctggcattactgtacgatagtgattcgtatttggtgttaagtgtttaaatccttcaattattttgcgattttcatctactaaaattaagttactatgtttacccataatctcaaggatgacagtgcggtaaatagtatcgccaatttcatctttactctttatatcgatttcaatgcgacgatcattaccaatttgcttaatcgattcgataataccaccttctaagtgttttct

SEQ ID NO: 3072 - DNA, 223 bp, Staphylococcus aureus
aatttaaaattgcatcaccgataataaatgggataattggttcattaggtacgtttaatccttcagttccttgagtaattttttctgcagtcatagttattttacctccaaattttacatcttcatttttaatttgtattgattattttctttcttcaagcgggatatacttacgattcgtttcgccaatatatttcgctctaggacgcataattctattatc

SEQ ID NO: 3073 - DNA, 407 bp, Staphylococcus aureus; identical to SEQ ID NO: 1911

SEQ ID NO: 3074 - DNA, 113 bp, Staphylococcus aureus
gtagcaattactttaccttctttacctttgtctttacctgcgataactttaacgttgtcaccttttttgatatgcatgtgggcacctccttatttgtattggttgttattaat

SEQ ID NO: 3075 - DNA, 278 bp, Staphylococcus aureus; identical to SEQ ID NO: 2471

SEQ ID NO: 3076 - DNA, 414 bp, Staphylococcus aureus
tcacctttatgtgttgacttaccagcatcttcttccatgtgaagacgagtaataccgattcgttttgtttcaccgtcgacttcgatatcgatatatccattttcaccaattggttgatcaaattgagaaatttgatatgcttttggattatctggatagaaatagttcttacggtcaaacttagattctgttgcgatttccatatttagtgccattgcagcacgcattgcccagtctactgcacgcttattaacaactggtaagacacctggatatgctaagtcgataacatttgtatttgagttaggttctgctccaaaatgcgctggtgatggagaaaacatttttgagtccgtttttaactctacgtgaacttcaagtcctataactgtttcaaaatgcatgatttccact

SEQ ID NO: 3077 - DNA, 308 bp, Staphylococcus aureus
aaataccaggtaatccagctaagtttacctggtgttgttaataaatcattggcatacattgttaatggatcatcaatttcttcacctaaattaaacgcagttgtaggcgctgttggaccaactactacatcataattttcgaatactttatcaaagtcatttttaatcaatgttctaactttttgagattttttataggtaagcatcatagtaacctgaacttaatgcaaatgtacctaagaaaatacgacgttttacttctttaccgaaaccttcagatcttgacattttatataattcttctaatg

SEQ ID NO: 3078 - DNA, 380 bp, Staphylococcus aureus; identical to SEQ ID NO: 2465

SEQ ID NO: 3079 - DNA, 109 bp, Staphylococcus aureus; identical to SEQ ID NO: 1797

SEQ ID NO: 3080 - DNA, 266 bp, Staphylococcus aureus
tttaacaattcttcttcttggcgtttttcttcatattctaaacctttacgtacatagttaaatgagtttaagtttttcaattcggctttagtaccaaatttttcttgaccatatggacgtaaagagatgttagcatcacaacgtaaagatccctcttccatcttaacgtctgatacaccagtgtattgaataattgaacgcaatttttctaaatatgcatatgcttctttaggtgaacgaatatctggttcagatacgatttcaat

SEQ ID NO: 3081 - DNA, 299 bp, Staphylococcus aureus; identical to SEQ ID NO: 2029

SEQ ID NO: 3082 - DNA, 685 bp, Staphylococcus aureus
tatgaagttttgtcattatacttgaatgataagaatttcattcattctcaactcctcatctttatcttaattcacattataacttttttcgttatcaaataacaaataaataagtaagacaattttgaaaatgagttgtgttcattctgctacaaggactttgcacttaatcgaaattattttttattcttttgaaaatcaaaatactatagttgcaatgtaccaaatttgaagaagtataaataacctttaacttctttattaagaatcgtttgaagcgtattttgataatatttcatctgtatcttatatttattttttaattgtgtaccaatttcttcatctgtcatcccacggcgacgattaaatgcatcggttttatagtctacaaaataatgcacaccatctttaacaaagattaagtcaatcataccttgaataattgagacgtcttcgtctccttgtggcaattggtcaactaatgcttggttaactacaaacggtaattcacgataaacttgctctgcttcagcaataatcgaatataactcactattgataaatgtcattatttcatccatacggatatcttttttcgcatctgcttcgataatatgtttatcgattaatccatcgatatactgatgtaactcaacttcagatatgcgttcttttttgaatggta

SEQ ID NO: 3083 - DNA, 150 bp, Staphylococcus aureus
tctaattaaccacgtaattcgtagttttctggttgttgtgcagcgtgtggatgttcagcgccaccatatacaaataattttttaccttgtttttcgcctaaacgagtgcttggtaacatacctttaattgagttttcaattaaacgttct

SEQ ID NO: 3084 - DNA, 278 bp, Staphylococcus aureus; identical to SEQ ID NO: 2471

SEQ ID NO: 3085 - DNA, 181 bp, Staphylococcus aureus; identical to SEQ ID NO: 2625

SEQ ID NO: 3086 - DNA, 329 bp, Staphylococcus aureus
tgtggatgatttataatacccattgatgatactgaaccaaatgtaccagtattatttaccgtaaatgtaccgccctgcatatcttcagctgtcaattgcttattacgcgctttcgttgctaaagtattaatttctctagctatacctttgattgacttttcgtctgcatgcttaatcacaggtacgtataatttattttcatcagcaacagcaattgaaatattaatgtctttatgtaagacaatttcatttccttgccagctactatttaataaaggatatgcttttaaagcatctgctacagcttttacaaagaaagcaaagaacgt

SEQ ID NO: 3087 - DNA, 153 bp, Staphylococcus aureus; identical to SEQ ID NO: 2957

SEQ ID NO: 3088 - DNA, 245 bp, Staphylococcus aureus
tcaattgggaattctcttaatcccctagccataactgataagccagtgccaccaccgataagtacaacttttatttgtctcattttttctcgccactttcaatatgtgcgtccctatgatgcacataaacattatattcaaatacttcatttagataattacctagtcgttctgctaatgctacagatcgatgttgtccacccgtacaaccgatggcaattactaattgagatttcccttctttt

SEQ ID NO: 3089 - DNA, 174 bp, Staphylococcus aureus; identical to SEQ ID NO: 2859

SEQ ID NO: 3090 - DNA, 206 bp, Staphylococcus aureus
tgtcgttggattttggttcggaacttcaataccaacacgactagttcctggaataggcgcttctatacgaatatctttcgctgccaatgccattttaatgtcatcttgtaatgccgtaattcttgaaactttaacacctttttcaactgataattcaaatcttgtaacacttggaccttcagttacatcttgtacttctgcaggta

SEQ ID NO: 3091 - DNA, 193 bp, Staphylococcus aureus
caaaatttcgcttcaatttcaccacttttatcttgcaaatgtaatgtcatataatctttaccttgtgctgttacaccctgtgtagctttatgcactaagaaaaagtgatcaactgaatctccgggatttagattctctatatttctcatcgtttcccgccttcctctattttgtttaatgtaatcacttcttt

SEQ ID NO: 3092 - DNA, 134 bp, Staphylococcus aureus; identical to SEQ ID NO: 2039

SEQ ID NO: 3093 - DNA, 1126 bp, Staphylococcus aureus
  misc_feature (1)...(1126): n = A,T,C or G
aacggcatcataaatggacaatgtcggatcacctttttaaggcatctttaatcttcaatgttttaaccacggattcaggcaagacatcttctctaattaaataaaactttttataatctttattgtccatcatgtttcgctcctattcaacgaattcaaattctccgccaagaattctaacgatatcaccatttttacaaccacgttctctaagcgcatcatcaatacccatcgaacgcatttgacgagcaaatcgacgtactgctggatcactgttaaagtcagtcattttaaacattctttcaatagcattaccacttaccacataagcaccatcatcatctcttgaaattgtaaatttatcttgtgacggtgtatgtttatataatactcggttaatgccaactgactcctcttcttcaactgtgaagtcaacatctttatattcttctaatttatctgctattgcatataataattgatcaatattatcacgcgttattgttgaaactggaataactggcacatcttcgccaatttcttctttaaacaagtttaaattatcttgtgattcaggtaaatccatcttgttagctactacgatttgaggtctatcttctaaacgttgctcgtacgcagctaattcttgattaatgactttataatcttcaataggttctctaccttcagaaccgctcatatcaatcatgtgaacaataacttttgttctctctacatgtcttaaaaattgatgtcctaatccaacgccatcagatgcaccttcaattaaacctggtaaatctgccataacaaaactacgttgatcaggcgttgaaacaacacctagatttggtttaatcgttgtaaaatgatatgccccaattttaggcttagcttttgaaacgatagataataaagtcgatttacccacactagggaaacctantaatcctacatcagntaataatttcaattctaaagatacatntaattcctcacctggttcacctttttcactgaagtcaggtgcagggtttctaggtgttgcaaaacgtgaattacctcggccacctcgacctgccnttcgctactacagntctttgaccatcttcaacaagatctgata

SEQ ID NO: 3094 - DNA, 1246 bp, Staphylococcus aureus
  misc_feature (1)...(1246): n = A,T,C or G
aatctcggaccgtcataaaaaatttatttgctttcangaaaatttttctgtataatagattcaagttagtttgtttattaaattaaccaactaaaatgtagaattcgagctcggtacccaacggcatcataaatggacaatgtcggatcactttttaaggcatctttaatcttcaatgttttaaccacggattcaggcaagacatcttctctaattaaataaaactttttataatctttattgtccatcatgtttcgctcctattcaacgaattcaaattctccgccaagaattctaacgatatcaccatttttacaaccacgttctctaagcgcatcatcaatacccatcgaacgcatttgacgagcaaatcgacgtactgctggatcactgttaaagtcagtcattttaaacattctttcaatagcattaccacttaccacataagcaccatcatcatctcttgaaattgtaaatttatcttgtgacggtgtatgtttatataatactcggttaatgccaactgactcctcttcttcaactgtgaagtcaacatctttatattcttctaatttatctgctattgcatataataattgatcaatattatcacgcgttattgttgaaactggaataactggcacatcttcgccaatttcttctttaaacaagtttaaattatcttgtgattcaggtaaatccatcttgttagctactacgattngaggtctatcttctaaacgttgctcgtacgcagctaattcttgattaatgactttataatcttcgataggttctgtaccttcagaaccgctcatatcaatcatgtgaacaataacttttgttctctctacatgtcttaaaaattgatgtcntaatccaacgccatcagatgcaccttcaattaaacctggtaaatctgccataacaaaactacgttgatcaggcgttgaaacaacacctagatttggtttaatcgttgtaaaatgatatgccccaattttaggcttagcttttgaaacgatagataataaagtcgatttacccacactagggaaacctactaatcctacatcagntaataatttcaattctaaagatacatctaattcctcaccatggttcacctttttcactgaagtcaggtgcagggtttctaggtgttgcaaaactgtgaattacctcggccacctcgaccgccnttctgctactacagntctttgaccatcttcaacaagatctgata

SEQ ID NO: 3095 - DNA, 176 bp, Staphylococcus aureus; identical to SEQ ID NO: 2304

SEQ ID NO: 3096 - DNA, 456 bp, Staphylococcus aureus
ccaatataaacgataccacgatcgtctaagttcttaagtgcactttcagaaacattaggaatatctcttgtgatttcttcaggtcctaacttagtatcacgtgcttctgattcatactcttcaatatgaatagaagtatacacgtcatctttcacaagtctttcactcatgataacggcatcctcatagttgtaaccgtcccaagtcatgaaaccaactactacgtttctacctaatgccatttctcctaattccatagatggtccatctgctaaaatctcgttatactcaacaacatctccaactgcaacgattggacgttggttgtaacatgtacctgagtttgaacgtttaaatttagctaatggatagcgatctaattcaccttcatgctcaacgccgttctcttcaactagacgacgaacaagaatttcattagattcaacatgttcaaca

SEQ ID NO: 3097 - DNA, 199 bp, Staphylococcus aureus
ctgcttctggaaataatgctacgattttcatatccatctctcctaaatgataaattttgacttccttaaagtacgtgttgcatgttgcttgttttaaaaatatgacaaaaaaacggcaccgtttgacataccacccccttgaattattgttaaattcaaagcgaagttagcaaacagcaccgtgtaccttacaccagca

SEQ ID NO: 3098 - DNA, 265 bp, Staphylococcus aureus; identical to SEQ ID NO: 2933

SEQ ID NO: 3099 - DNA, 148 bp, Staphylococcus aureus
taattcatgtgatacattagcaatgaaatctttcttcatttgatctagattgtgctcattagtcatatcacgaactgtcacaacaacaccacttttacctccctgttcaatcttgtcgatatagcttgtggtcacaacaaagaatcgt

SEQ ID NO: 3100 - DNA, 304 bp, Staphylococcus aureus
accatgaacaatttccaaggattttaagaatgccaatggaatatttgtccataatgacccaaatctgatatctaaaatatcaatgcttcctgtaacagaatcctcattttttgtcacttctcttatttctaatgcctcaatactatcaacattaattgcctgaccgagacgttcaaacgctatcttatttgcagctaatctcgcaccattgtatgcataaacatctctaccatgaaaagtatgactttcttccgaatgaggcaatcggcttttcacttcatcaatttcgataacttttttaata

SEQ ID NO: 3101 - DNA, 99 bp, Staphylococcus aureus; identical to SEQ ID NO: 2244

SEQ ID NO: 3102 - DNA, 140 bp, Staphylococcus aureus
caatgattgcttcgaattcgtcttccgcaccaattggtaattggattggagcagcgttagcttgtaaacgatcatgtaatgtacttacagagtattcgaagttagcacctaatttgtccattttgtttacaaatacgata

SEQ ID NO: 3103 - DNA, 279 bp, Staphylococcus aureus
ataatgtatggtttatcaacattgcctctcactgtttgcgctacttcaaaggcatcaccgataactcgtttcatatcatcgtaatgccctcttgttgattcatcaatattaataccatgtcctcgatgattatgacgtatcacatcgaagccatgctttgaaagtgcatgtgctaatttatcgtaacgttccatatgttcagccataccatgaaatatatgaataattccttttgaatctacatctgtaaaattcactttaacttcaatattcgtatta

SEQ ID NO: 3104 - DNA, 176 bp, Staphylococcus aureus; identical to SEQ ID NO: 2304

SEQ ID NO: 3105 - DNA, 168 bp, Staphylococcus aureus
tacaacaacataagaagcaaagtaaataacttcttctaatgctcttggtgacatgtcaagtaataatcccatacgacttggtatacctttgaaataccaaatgtgagaaactggagcagcaagttcaatgtgacccattctttcacgacgtactttagatttagttac

SEQ ID NO: 3106 - DNA, 407 bp, Staphylococcus aureus; identical to SEQ ID NO: 1911

SEQ ID NO: 3107 - DNA, 672 bp, Staphylococcus aureus
  misc_feature (1)...(672): n = A,T,C or G
tgcctgcatccatggcaccatctgttttaccagcacctacaagcatatggatttcatcaataaataatataattctaccatcagactctttaacttcttttaggactgcttttaatctctcttcaaattcaccacgatatttagcgcccgctactaatgcgcttaaatctaactcaaaaacagttttatctaataatgattctggcacatctttcttaactatacgttgcgctaatccttcaacaattgcagttttaccaacacctggttcaccaatgagcacagggttgtttttagttttacgacttaaaatacgaatcgtatttcgaatttcttcatctcttcctataacaggatccattttaccttgtctaacttcttctactaagtcgcggccatatttagctaatgcttcgtaattaacttctggattttgtgatgtcacgtgatttccccctcttacttttttaataatttctttgataacttctactttattatttatataatgttttgttgtttgatcaatgtccattgccgaacgtaaaatatgctccattgaaatatattcatcttcatattctttcatgtatgattcagccttagttatcaattggtttgcttgttggctaatatattgaccatattgtanattgtcaccttctacagatg

SEQ ID NO: 3108 - DNA, 158 bp, Staphylococcus aureus; identical to SEQ ID NO: 1832

SEQ ID NO: 3109 - DNA, 92 bp, Staphylococcus aureus
gttgtaccttcaacacgtggaacaactactaaatcttttttagctgcttcaacagcttttttgattgcttctggtacctcttgagctttacc

SEQ ID NO: 3110 - DNA, 195 bp, Staphylococcus aureus; identical to SEQ ID NO: 1776

SEQ ID NO: 3111 - DNA, 310 bp, Staphylococcus aureus; identical to SEQ ID NO: 1685

SEQ ID NO: 3112 - DNA, 592 bp, Staphylococcus aureus
tatgcgttcaaaatcttgcgggttctgttgcatacgttgtcgcatggatgttaaaacgagtgccatcattactggttttaaatgactccaaaatgagtttaaatattgatgattagatgctttgattaatgtttcatgaaattcaaagtcatgcttcgtaaatgattctgcatcctcaaattttactgccactttcatcatttcaagttgtttcttcatttcttttacgataggtagtcgctcttgatttttaactcttgaaaatgcaaatgactctaacatcagtcgcaaatcatacatttctttcttttcttgttccccaaacggcaacacatgtgcacccattctttctaattggatgagttgattttgttgcaataatttaaatgcatctcgaattggcgaacgactcacattaaattgctttgccatttgattttcagtgagtaacgtaccttcagctatgtgaccattcacaatgcctaagcgtaattctgccgcgataccttctccagttgtcataccttccaaccatttctctggatatccatacatcatcaaagtcactccttcattacacgacatacttgta

SEQ ID NO: 3113 - DNA, 306 bp, Staphylococcus aureus
tgtgcttgatcaggacgatggtgtcttgcaacatcgaaaataatgttgtgtaagaacgttgttctaccatatcctggacttccgattaacgcgatgtgcccagcttttttcaattgcaataccatcggtccttgatattgttcttctggtacgtctttaagtcctaatgttaattccacttcttttgcatcatctgaccataattttctgaaatctgtttctactaaatcttcttgatatacattttctggcaatggtggtagccatggacgcttaacttcttcgatttctaatcgtgttgtaata

SEQ ID NO: 3114 - DNA, 169 bp, Staphylococcus aureus
gattcaggcaagacatcttctctaattaaataaaactttttataatctttattgtccatcatgtttcgctcctattcaacgaattcaaattctccgccaagaattctaacgatatcaccatttttacaaccacgttctctaagcgcatcatcaatacccatcgaacgca

SEQ ID NO: 3115 - DNA, 164 bp, Staphylococcus aureus
tatcgtcggaatcataaatcctgttggcccttttggaccattatatgaagctttattagtcgttgctggacctgcaatatcgaaatgaatgtgaggtgtttgaccactaaaatgtgttacaaaacttgccgcaaatagcgctttaccttgtccattcgtatggt

SEQ ID NO: 3116 - DNA, 233 bp, Staphylococcus aureus
aataactataagacttctcagtttcaagttgtcttctagataagatgtaagctccagtttcattttcttcatcaaactcaactttagtgacatatgcttcaacttcgtcgccctcttttacaacttcacttgggctatcaatatgatgcgtagatagttgactaataggaataatcccattaaatttaccaccgttgatatgaacaacaacttgcttgtcttcaacttgttgt

SEQ ID NO: 3117 - DNA, 478 bp, Staphylococcus aureus; identical to SEQ ID NO: 2772

SEQ ID NO: 3118 - DNA, 520 bp, Staphylococcus aureus; identical to SEQ ID NO: 2327

SEQ ID NO: 3119 - DNA, 159 bp, Staphylococcus aureus
caattggatttgattcctcagaggactcagtgtatcctccaacgtgacctgcttcgctatccacagcagtatggtaatcgatatcaatagctgatgaatccgtttcttctattgtttcaatgtatccatcaacatatccacctccaccatctatagctg

SEQ ID NO: 3120 - DNA, 244 bp, Staphylococcus aureus; identical to SEQ ID NO: 1762

SEQ ID NO: 3121 - DNA, 590 bp, Staphylococcus aureus
ctgatcctactgaaccatcattgaaaaattcactcgttttacagttcggacaaatatagtgtggcggtaacgggtttacttcagtaatctcagtcattgtcgctacaaaactagaacctactgaaccacgggaaccaactaagtatccatcatctaatgattttttaactaaacgttgcgaaattaagtaaattaccgcaaatccattaccgataatactttttaattctttttctaatcgatcaattacgatttgaggcaggtcttcaccatacagtttacgcgcatttgcataacttagttctctaatttcttcgttagcaccttccatacgcggtgtgtataattcatctttaataggaacaacacgttcaattcgatctgctaattcgtttgtatttttcacaacaatttcatgcgctttttcttcacctaaaaaatgaaactcgtttaacatttcatctgtagttctaaaatgtgcttccggtaaagttgagcgattaagtggattgccgggttgtgatgctattaaaattttacgtgcgataccatcatgttcaaacaaatagtgtgcatttcctgtcgcaata

SEQ ID NO: 3122 - DNA, 115 bp, Staphylococcus aureus
gtaaatctactttgcgttctacaacatcatcgtcatcaacgtctgtcatttcgatttcattatcttgctcatccataacttttacatctaaacctaaactttgtaattctttcat

SEQ ID NO: 3123 - DNA, 148 bp, Staphylococcus aureus
cgctaattttttgtgatcttccgcaccttctacagccatcgtcatagcatgttgtccaccagcaataatacctataatttcatgagggtcagtattgaatgtaggtacacactccgctgcatctaagacacccaaccttccacttgta

SEQ ID NO: 3124 - DNA, 207 bp, Staphylococcus aureus
cttgtggttgaatttgattgtgaatacctaaatctacaattcgatcaacgccgaagttagatacaccgattgctttaattttaccattttcttttaactcttctaatgcacgccatgagccatatacgtcattgtaaggttggtgaataagcactagatcaagatagtccaaatttaatcgttgtaatgatcgttcgattgatttga

SEQ ID NO: 3125 - DNA, 189 bp, Staphylococcus aureus; identical to SEQ ID NO: 2060

SEQ ID NO: 3126 - DNA, 98 bp, Staphylococcus aureus
gaatcagcatctactaattcaccgcgttcataaaaagcaacttgcgtaacgtcttcaccaatatcaatgacacatgcacctaactctttttcagtagc

SEQ ID NO: 3127 - DNA, 179 bp, Staphylococcus aureus; identical to SEQ ID NO: 2382

SEQ ID NO: 3128 - DNA, 220 bp, Staphylococcus aureus; identical to SEQ ID NO: 2613

SEQ ID NO: 3129 - DNA, 186 bp, Staphylococcus aureus; identical to SEQ ID NO: 2303

SEQ ID NO: 3130 - DNA, 98 bp, Staphylococcus aureus; identical to SEQ ID NO: 3126

SEQ ID NO: 3131 - DNA, 199 bp, Staphylococcus aureus
tcgagtcgcgccagttgtagcattgatatttgttatcgcctctcgcgctttatcatttacaacattgcgagtatccgttttaacttgtgttgccggttgaatcactactatattttgtgtgccctgatcttttgcttgtgcaacttcttgattcgtatctgctgcattaatattttgcttcgctgtggctacagcttga

SEQ ID NO: 3132 - DNA, 208 bp, Staphylococcus aureus
tacgtcttctaatctattggcttgtcccacttgttcttttaatttagctttttgaggtgtatttaattgtgttaatgcatcaatagcagtattggcgttttgttttgcttcacgtaatctttcgtcaccatttaattcttgtttcgcgctgtttacttgattagctgcagctgttacttctgaaggtgtcgtaacaaccgttggcgta

SEQ ID NO: 3133 - DNA, 159 bp, Staphylococcus aureus
cgttattatgaactccatcaataatacgtgctaactcttcaaatgagcagaccaatctctgtacctttacctgccatcgtttcaagcgcaatacgtacattattgtcattcgttaaaacttcatttaatccttcaataatcttattaattccggcatca

SEQ ID NO: 3134 - DNA, 120 bp, Staphylococcus aureus
aataccatctggtactgcttgtgctaacgcttctgcaaaatcctctttcttataatcaataccagcgtcaaagcccagtgtctctgttaaataatttacttttttgtcgccacccgcaat

SEQ ID NO: 3135 - DNA, 598 bp, Staphylococcus aureus
tcatctaatattagtaattctggtttatgtaacatacttgctaacagctgaattttttgttgattcccttttgatagactatcaattcgttttttgcggttttcagtaatatcaaaacgctcaagccaatacgatatttgctgttgtatttctgtttttgacattccctttaaagttgccaaatatttcaattcttcttcaactgtcaatttcccatgtaaaccgcgttcttccggtaaataaccaatacgattgtacattgttttatctagttttttaccgttatacgtaatgtgtccttcagttggttcacttaagcctaaaatcatacgaaatgtcgttgttttacctgcaccatttcttcctagaaaacctaacattttacctgattctaactttaatgaaatatcatttactgccgtcatcttgccaaaacgtttcgtaacatgttcaattacaagtcccatactttgcctcctaaaaaaatatgtatttatcttaatataacatttccattctctataaatgcaatatttttaaaatgaatttatttttaaaatttctgaaattgaaaaatttaaatagtgccatttttgca

SEQ ID NO: 3136 - DNA, 560 bp, Staphylococcus aureus
tgcccgtttttattgaagtatgatcgttttgtcaaaccaccttggaaatgtaatggttcatcgaccattgtttctccaactttgatagctttattctgataaccggctaataatgttccaccttttacagaagatccaaccgcaaattgagaagtaaacgtaccaatgtcataatcagtcattttaccactcttattaatctgctttccggcaagcgcaagaatgtctccatttttaggattttgtacaaccatcattgcattatccatatctttggcaccttgactgcgaagcttcttaatttgtttatctaataatgcttctacttctttttgaagatctatatcgatcgttaatttcaaatcttgaccgcgagcgccaggatttaacacttctgaagatgtaactttaccagatttgtccgttgtgtatttcatttctttcttcttaccacgcaatacatcttcatattgatattctaggtaagattttccaacacgatcattgcgtgaatatcctttggataagtaatgttctgtcaattcttttggaataccttc

SEQ ID NO: 3137 - DNA, 191 bp, Staphylococcus aureus
tgctgatcttctttattcatcgtaattaaagcctcttccacagtcatttcatcaagatgcatcgtcgcttcattacgcgcttcggtcgtactattttccatcacttcttacactccctagttttttgaaaatcaaatgtatcattcggctcgatacaacttaacagtggtaagtcttctttaataatttgt

SEQ ID NO: 3138 - DNA, 343 bp, Staphylococcus aureus
ctcattcaatatttgttttgcaatatcatcaccttcttcagctgcttcaaacaatactggcacatgtgtgcttctcgtaaatcctccggcaatcatgcgctttttcaatgcactcgttgcagcacgttgctcaaacgttgtattttcagttggacgatacaataaatacccaacttcatttgccttatgaagctcaccattatcaatatgaccttgattattcttgtacgcacccccaatgcctgtaccaagcgtcatacaaaagatccgttctgcttgatattgatgtaatttcaattcgcctagtaatgcagcgtttacatcattttttactttgacataa

SEQ ID NO: 3139 - DNA, 302 bp, Staphylococcus aureus
cacgaatcgttgaaataatttcatcgatatggtcaagtgcgatacgtaatccttctaaaatgtgggcacgatctttagctttacgtaagttgtattgcgtacgtcttctaacaactgtcttttgatgctctaaataatgtaccaacgcttcttttaaattaataagcttcggtctaccatttacaagtgcaatcatattcacaccaaatgatgtttgaagaggtgtttgtttgtataagttatttaaaatgacactagcatttgcatccttacgcacatcaataacgacacgcacaccagta

SEQ ID NO: 3140 - DNA, 130 bp, Staphylococcus aureus
cacgcgcaacttcttcagaaacgccagcaacttcgaataaaattctacctggtttaacaactgcgatccagccttcaaccgcacctttaccagcacccatacgtacttctaaaggttttttagtatatgg

SEQ ID NO: 3141 - DNA, 174 bp, Staphylococcus aureus
gttttaaagatgctttaatactttctagataagtttctttttcactcaaagtttgtcgacttttgtcactcgtataaccatcatttttttcaaattcgaattcttcatgatcattttttatttgtgtttcttgtgtagttaatctatcgagctccatttcaaaatgatgcactt

SEQ ID NO: 3142 - DNA, 99 bp, Staphylococcus aureus; identical to SEQ ID NO: 2668

SEQ ID NO: 3143 - DNA, 185 bp, Staphylococcus aureus; identical to SEQ ID NO: 2370

SEQ ID NO: 3144 - DNA, 266 bp, Staphylococcus aureus
cctgcgctcgcaccaatacgtgtcgcacctgcttcaaccattttattgaaatcttctaaattacgtacgccacctgatgcttttacttctacatcagcacctactgtatctttcattaatttaacgtcttctgcagtcgcaccgccacctgcaaaacctgttgaagttttaacgaagtccgcaccagccgcttttgttaattcactcgcttttacaatttcgtcatggtccaacaataccgtctcaataatcacttttactgtgtg

SEQ ID NO: 3145 - DNA, 416 bp, Staphylococcus aureus; identical to SEQ ID NO: 2187

SEQ ID NO: 3146 - DNA, 181 bp, Staphylococcus aureus
agaatcaatttcggtatcaaatagctcaattctgattggttccccaattagcggaaagatatcgataatacctcctcgcaatgagaattcaccaatatgcgataccacggattcccgtttgtaccccatattaactaatttgttaagaaattggtccacatcgatatcctcaccaacacgc

SEQ ID NO: 3147 - DNA, 153 bp, Staphylococcus aureus; identical to SEQ ID NO: 2957

SEQ ID NO: 3148 - DNA, 252 bp, Staphylococcus aureus
gacctaaaaaagcacccttctagtcgattaatctaaaagggtgccatatactttaattttaatacatgattgattctaaaaaagtgaattattccacagtaactgatttagcaaggttacgtggtttatcaacatctaaatctctgtgtaatgctgcatagtatgaaattaattgtaatgcaaccactgatactaatggcgttaacaattcatgtacatgaggaatgacataagtgtcgccttctttttcaa

SEQ ID NO: 3149 - DNA, 754 bp, Staphylococcus aureus
  misc_feature (1)...(754): n = A,T,C or G
agatatttgtgcttgatgaattttgatgcgttggtttttcaagtgtgcatttgcaggatcagcaatcgatgcctcttgaatacgttggtctacacgatgcttcatttcacgtgcgcttaagtttgtaaacgttacgactaaaagtcgatcgacatcaatgccatcacgtaaaatcttttggataatacgctcaactagtacagctgttttacctgaacctgccgcggctgcaacaagtacatcttgtccagttgcgtaaatactttgccattgcgcgtcagtccaaatcacgccttgtggtttctctggaattgtcatctattgctcacccccaaattcatcattaatgttaatattttgaattgcttcaattggatttattgtttcatctacagttcgatatcgcttactatcaatcatgccatctacatgacataccgattgataactacaaaaagcacatggcaatttttgtttgtactttaatggtgcaacttcagtatgtccatccataatatttgaagctgtttctataaaattctctttgttatgttggatgaatttataaatcgttgcttcatctgccncaaggctgcctcgtttactcaaagagccatctttattcaaaccaactggtacaatatctgaagtgaatttaggttctaaacgaatatccaatgcatcaataacagtttggtctgcattaactaaaccactcaacttaaactttttaattaaatcttgttctagttta

SEQ ID NO: 3150 - DNA, 171 bp, Staphylococcus aureus; identical to SEQ ID NO: 2478

SEQ ID NO: 3151 - DNA, 435 bp, Staphylococcus aureus; identical to SEQ ID NO: 2789

SEQ ID NO: 3152 - DNA, 548 bp, Staphylococcus aureus; identical to SEQ ID NO: 2582

SEQ ID NO: 3153 - DNA, 372 bp, Staphylococcus aureus
tatttaaaatggcttaaagtactaaactgaatcatcaataaaattcagcttagtatctttttgcctgttttgtaaattgcgtattaatcagtaacttctttttgtgtttcaggagcatcattttgttgtaaatctactttgcgttctacaacatcatcgtcatcaacgtctgtcatttcgatttcattatcttgctcatccataacttttacatctaaacctaaactttgtaattctttcatcaatactcggaatgattctggaacacttggtctagagatgttttcacctttaacaatagcctcgtatgttttcacacgtcctactgtatcatcggatttgtaagttaagatttcttgtaatgtgtatgca

SEQ ID NO: 3154 - DNA, 153 bp, Staphylococcus aureus
tgatgaaattttacgaactgtaaacgtttcagaaacgccaccgccacgacgtttaattacaacgccttcgaatacttggatacgctcacgagtaccctcaatgatacgtacgtgtacacgtaaagtatcaccaggacggaaacttggtaagtc

SEQ ID NO: 3155 - DNA, 320 bp, Staphylococcus aureus
tattttcttttggatccaactttactaaaaatagttcagcatctccatcttcatgcaacgcatcataaatattttcaaagtaactaatatcacgcgttaagaagccatcgcgttccccagtgattttcattaactcagcaaatgtttttaaaccttctctatcagatcgttctactgtcgtacctcgctttaaagccaagcgcacttttgaacgatttcggcgttcaaaactatttaataactcatcatcatttttatcaattggtgtaatcatagtcatacgtggttggatgtagtcttttgataaaccttctttaaat

SEQ ID NO: 3156 - DNA, 140 bp, Staphylococcus aureus
caacgcaacgtatatgcatcttgtacacgtatttctgattgtcgcgtcgttaatgttgatccttctaaccaatcacgcatacgcgctgccacattaatctgttcttgaaaattacgaactgcgtgcacatcatgtcgata

SEQ ID NO: 3157 - DNA, 272 bp, Staphylococcus aureus
tacaggtgatagattgatatcttcacgactcttattttccattattcgtaattctccagccatgtttattcacctacaattaattttaggaattcaccatatgattagcagttaatcttaagcgctcaaataaataatctccaacaccttgtggaaacgcagcgcgattaattgctgtctgcatattttctaaccatgcatctctttcaaattcagtgattgtaaaatctatatgtctttttcttagcataggatgtccgtgttcttcggta

SEQ ID NO: 3158 - DNA, 388 bp, Staphylococcus aureus
gccatgagcaaatgcaagcgcattatgtttttctaaatttggttcaatttcgtttttgtatacatcaccttgaatttcatcaggtaatagcaccataattacatcagcttgcttaactgcttctgcaacagggaacacatcaaatccatcttctttagctttgtcaaaagaacgacctgggcgaatgccgatgactacatcatatccattgtcttttaagttttgtgcatgcgcgtgaccttgtgatccataacctactactgcaatttttttgccttgtaaagcgtccgtttttacatcttgatcataataaactgttgtcataataaattcctccaaataattaaatattttgtgtttcgaaaattctgaaatataactttgtaat

SEQ ID NO: 3159 - DNA, 288 bp, Staphylococcus aureus
acttgagagctgtcttcttcatcaataatactatttctttcgttatagataatttcacgttgtttacgtaatacttcatcgtattctaagatacgtttacgcgcgtcgaagttattaccttctacacgtttttgtgctgattctacagctcttgataccatttttgattcaattggtgtagagtcatctaaacctagtcggctcatcattttctgtaaacgttcagaaccaaaacgaatcattaattcatcttgtaatgataaatagaagcgactatcccctttatca

SEQ ID NO: 3160 - DNA, 315 bp, Staphylococcus aureus
tatatcagcacctactgtatctttcattaatttaacgtcttctgcagtcgcaccgccacctgcaaaacctgttgaagttttaacgaagtccgcaccagccgcttttgttaattcactcgcttttacaatttcgtcatggtccaacaataccgtctcaataatcacttttactgtgtgacctttcgcagctttcaccactgcttcaatgtcttgttgtacatcatcaaaacgtccatcttttaatgcgccgatgttgatgaccatgtcaatttcatctgcaccattttgaatcgcatcttctgtttcaaatgcttt

SEQ ID NO: 3161 - DNA, 204 bp, Staphylococcus aureus
tgccaaacctccccgtcgatgtgaactcttgggggagataagcctgttatccccggggtagcttttatccgttgagcgatggcccttccatgcggaaccaccggatcactaagtccgtctttcgaccctgctcgacttgtaggtctcgcagtcaagctcccttatgcctttacactctatgaatgatttccaaccattctgagg

SEQ ID NO: 3162 - DNA, 360 bp, Staphylococcus aureus
ccaacattacttgaaggatttgcagcattcgcaatgttttgtgcccattctttatctggatagaacaacgttaatgttctaggcagtaagaagaacgccattgcaaagattacaggaataacaccggctgagttcacttttaaaggtagataagttgcctgtgaacctaatctttgagcagtttgtttcttagcatattgaatcggaattttacgaacggcttcaagtacataaatagcacctacagttaatagtatcagtgacactaaaagtcctaatactttcaaccatgctaatgatgtatcttcttgcccaacgaacgcagtttgtccaaattgaattagactggctggcaacgtt

SEQ ID NO: 3163 - DNA, 206 bp, Staphylococcus aureus
tctttaatgaacgtcaacaattcttgtccacgaaatgccaaatcttcttcatcataaacaccttcaccaagacgtttgaaataacggttcatcccattttctgaaacttgtcctctaatacttaacaagtgataattttcattcaatgcttcgcctaacggtaataaatcgaactcatcaccacctgtaccatgcaataatattag

SEQ ID NO: 3164 - DNA, 415 bp, Staphylococcus aureus
tagcgttctcgcatatgtcggcttgctaatttgcaaattttgagcgcatatttgtaactcttcgtgtgccttagtaaactttccattaatattgccgtgtgcaacaaccataactccaacttgttgttcgtcacctgctaatgcgtcacaaatacgttgttcaattaatcgtctcattaaaggatgtgtgccaagtggctcgcttacttctacctttatgtctggataccgtcgtttcatttcatgaacgatattcggtatatccttgagataatgcattgcactaaagattagcaatggtacaattttaaaatggtcaaccccactttgaatcaacgtcgtcattaccgtctctaaatcctgatgctcactttctaaaaacgcaatatcatagtgatgtatatcatcttttact

SEQ ID NO: 3165 - DNA, 100 bp, Staphylococcus aureus
aacttagtaccatcggggaacgtagcctcgatttcgatatctgtaatcatgtgttcgacaccatccatgacatcttctttgtttagaatttgtctaccat

SEQ ID NO: 3166 - DNA, 135 bp, Staphylococcus aureus; identical to SEQ ID NO: 2893

SEQ ID NO: 3167 - DNA, 518 bp, Staphylococcus aureus
tgcgttctgattgttttactattttgtgttgattgatgcttcgatgattgaagcgtatctttaccttctgtcactgttccacttttaccattctctttatgcatatcgtctaattgctttcctgactgcatttgatgtgacgttatcgcattcccttgttctcccggttgatttagtgtttctttttgtgccgctgcattagttgatgttttttccgaggcttgtgcttcatgtgatgacacaacaaacattgtagccgctaacactgacaccacgcctattgaatactttctaatactatactttctttcttcttgtcctcttaacatataatcacctcaaaagtatttttttgaccccctcttgagaatgaaaaacaactgcaccttcaatataacatgacatatattattttttgattaagactacaaaattaataaaaatttaataatacgatattaaatcgatactaatcatttacaaatatgtgtatttccaaataatttataaacactttt

SEQ ID NO: 3168 - DNA, 94 bp, Staphylococcus aureus
atacgcgtctaaccactgtgtcgcctctctaaatatcgctaaagacgtattttcttccctagtaccatcaccttgttgattttcaaacaaaaca

SEQ ID NO: 3169 - DNA, 592 bp, Staphylococcus aureus
  misc_feature (1)...(592): n = A,T,C or G
taaatggtcggatcatctggcaataccttttcatgaaaaacttgttgataattgagataagcattttccgtaaaaaagaaattatgatgtgctaattgcgggtattggcaagcaacacctaaatgcatcacatatcctgagcttgccggctcaaattccctctctaatttgtttaatcgntgagtatcaaggtgaattaaatatttataagtaggtatgacttccatatttgaaataatataatctgcctttacaaactcacctgtattctaatctgacacccgtcacacgtctttgatatgttttaatattgtccacacgtgcacctgtatgaattgtgacaccttcttcacgcgctagcttttccaaggcattggctaaatgatggattccaccttctacataccaaaggccttgctcttgttgcatatggaataacatagataatacagctggcgcatcgtatgatgaagaacctacatatttgataaaatagcctaacatttgtcgcaagtatggattcgagatacgcttgtctatggcctgttgcatagtatgtacataatcatatgaataagagcatttaangncc

SEQ ID NO: 3170 - DNA, 183 bp, Staphylococcus aureus
gcggcaatgaccggaattgaaacgacatctacaatttgtggcactaaagatattgttccaaccataggtaattgatttttaggttttaaaaatgaaccacgatgtccacctgcttcactaccttgagcaacgatagcatccatacccgctttttcattcgcaatagcttcatcaacacttgtt

SEQ ID NO: 3171 - DNA, 206 bp, Staphylococcus aureus
caccgattcgatctgcagtattttcattgatatctaattgcgcatctttaacagcctctctagctgctacaattgcatattgagtaaatctatccatacgacgcgcttcttttttgtcgatatgatcttcaatattaaagtttttaagttctcctgctaagtgaacgctataaggttcagtatcgatacgtgtaattttatcgata

SEQ ID NO: 3172 - DNA, 265 bp, Staphylococcus aureus; identical to SEQ ID NO: 2933

SEQ ID NO: 3173 - DNA, 138 bp, Staphylococcus aureus
tctaactacatctcctgtttctggattcttaattcctggtttacctggaacttcctctttctctcctgttggtaacttcggatcaaattcgtctcgatgacctggtgttatcgtttctggtccgtattctgttaattc

SEQ ID NO: 3174 - DNA, 212 bp, Staphylococcus aureus
ctgtcgcaataacaggtatacccgctgtgtcacctgcatgtattaaacgttgataaatttcatgtaatgtttcagtatctctaataagctctctatcaattaaatcttgataaagtgccggtggttgaatttcaataaaatcataatatttggcaattttttcaacttgactctggtccttctgcataactgccgtaaataattcaccttca

SEQ ID NO: 3175 - DNA, 371 bp, Staphylococcus aureus; identical to SEQ ID NO: 2513

SEQ ID NO: 3176 - DNA, 239 bp, Staphylococcus aureus; identical to SEQ ID NO: 2257

SEQ ID NO: 3177 - DNA, 189 bp, Staphylococcus aureus; identical to SEQ ID NO: 2060

SEQ ID NO: 3178 - DNA, 398 bp, Staphylococcus aureus; identical to SEQ ID NO: 2241

SEQ ID NO: 3179 - DNA, 235 bp, Staphylococcus aureus
tgtttttagtttacccgaactatcccttgataatgattgtgacatctgcggataatatttcattttcttagatatcgtcgaaatatcaccgattacttgaagtccatctgtcgtaaacaattcaattctgctttgtttgtttttacttggggcgtatgtcacttcggcaatatatcgtctaacttcaggtgtcatttcagataacgccttaatcatatcatcttcttttgtacct

SEQ ID NO: 3180 - DNA, 185 bp, Staphylococcus aureus
aactttatcgcaacactgtttaacgccgaacgtgtcgctcttatttgcgtaaggacatcatcacaatagacatcttcttcaatcatgcgattaatcgctctcacttgtccttcaattcgatttaaacgtgatttaagattcgtttttatttgttcagaatgatgtgcattatcttgttcagtcat

SEQ ID NO: 3181 - DNA, 188 bp, Staphylococcus aureus
gatcaaataacgctttaatatcttctgctgttgtttctttgtcaagcgttacatcaatttcaacactatgactatcttgaacaggcacacgtgcgcatgttgctgttacttttaagtctggcgcatttaaaatttttctcgtctcatcaatcattttttgttcttcttttgtatatccgttttctaaa

SEQ ID NO: 3182 - DNA, 235 bp, Staphylococcus aureus; identical to SEQ ID NO: 3179

SEQ ID NO: 3183 - DNA, 398 bp, Staphylococcus aureus; identical to SEQ ID NO: 2241

SEQ ID NO: 3184 - DNA, 413 bp, Staphylococcus aureus; identical to SEQ ID NO: 2531

SEQ ID NO: 3185 - DNA, 328 bp, Staphylococcus aureus; identical to SEQ ID NO: 2321

SEQ ID NO: 3186 - DNA, 396 bp, Staphylococcus aureus
tgcatcaatgagtgctgtttgattttcaacaattggacctggcaactcttttttataatccatgtaaaaacctctaagctcatcgccatatttatctaagtcatatgcatagaaaatttgcggacgctttaatacaccgaagtcgaacatgacagatgagtagtcggtaactaacgcatcgctgattaagtataaatccgaaatgtcttcataatctgaaacgtctttcacaaaatcatcatgttcatcaatacgtgtcacaactaaataatgcatgcgtaataaaataacataatcatcatccagcgcttgacgcaaagcttctatatcaaagttaacattaaattgatatgaaccttctcgaatcgcttcatcgtcacgccaagttggcgcgta

SEQ ID NO: 3187 - DNA, 193 bp, Staphylococcus aureus; identical to SEQ ID NO: 2287

SEQ ID NO: 3188 - DNA, 307 bp, Staphylococcus aureus
aaaataaaaccgaggaaatccttaaatggagattctcggttttttcggtttatttaataacgaagcgggactcatcgagtttgtttctaaattctttttgttcggctttggatttctttttaaaatcgttaaggaaagcttcatatttaggtaatacatcatcaagttcaccgtaatcttttaactttccgccttcaatccaagcaatcttagtacaaaattgtctcacttgtcctaagttatgactaacgaaaaagatggttttgttttgctctttaaactcgtaaattttatctaaacatttttg

SEQ ID NO: 3189 - DNA, 450 bp, Staphylococcus aureus
catcccactttttagctagtaaaggcttaataccatctttcgtgttacgtacaagcggctcgtatatcatactttcagcagacattgatccaccgtaaacatgcggattcatatcaccgatatctttaaccgtcgtatacgttaattgcttgttttcttttttctcctctaaacctttattaccgccacaaccagttaaaattagccctgatgcaagtaacattgcactcattttagttagttttctcatttgcttttcctctttctaaattgataagttgcattacttaatcaaatcgtaatgattatttttctcaattatttgcttatttttatgtaaatgtcaaacataattcaataatttttttctattataaaacttcaaacccttattatgaaagcgttctattgatttccaaaaattttgtgacgagtgctttatctccttca

SEQ ID NO: 3190 - DNA, 307 bp, Staphylococcus aureus; identical to SEQ ID NO: 3188

SEQ ID NO: 3191 - DNA, 198 bp, Staphylococcus aureus
tcacgtaaatgcggtgcttcatttttagattgttctaagcgatcaatttcttcttttcctaagaaagtaaagtattttaagaatttaattacatcttcgtctgattgattaatccagaattgataaaattcataaggacttgttttttcagcatctaaccaaacagcacctgactcagacttaccaaatttcttacca

SEQ ID NO: 3192 - DNA, 214 bp, Staphylococcus aureus
tcccaatcgatgcgtgcgaagtcacttgtcataccgtcgatagatgttactgcacgaatacctactgtgtgatcatacgtacggtagtctcccataacacctactgattgaatgtttggtaacactgtgaagtattgccaaatttctctttcaagaccttcttctctaatcacttggcgtaaaatcgcgtctgattctctaacgatttctagtt

SEQ ID NO: 3193 - DNA, 402 bp, Staphylococcus aureus
tatttagtacctgcaactactgttcccatatctaaagacataacacgcttatcttttaatgtctctggtacctcattattcactatggcttgcgctaaaccttcagcaatagcagttttaccaacacctggctctccaataagcacaggattgtttttcgtacgtctacttaatacttcaattacacgtgtaatttctttatcacgtcctataacaggatctaatgtaccgtctttggcaatgactgttaagtcacgagctaaactatctaaagttggagtattatttgacttactagcttgtgcatttttattactcatttcagggtttcctaaagctttcacaacttgtgcacgtgctttagtaatatttaaatctagatttgcaaaaactcttgctgca

SEQ ID NO: 3194 - DNA, 235 bp, Staphylococcus aureus
cagaatcacttaaagctgcaatcacatttctgatgtctcctggtgctggtatatccatttcatctctgattttccctgtactcccaccattatcagcaactgttacaatcgccgtaatatcaattgggaattctcttaatcccctagccataactgataagccagtgccaccaccgataagtacaacttttatttgtctcattttttctcgccactttcaatatgtgcgtcccta

SEQ ID NO: 3195 - DNA, 97 bp, Staphylococcus aureus
taggcattttgtatgcataacttcttggagttggtccgaatacgataccaccgccacgccattgtggagcacggattgtaccttgacgagcacgacc

SEQ ID NO: 3196 - DNA, 214 bp, Staphylococcus aureus
  misc_feature (1)...(214): n = A,T,C or G
agacaaaccttgaattattctacctataattaaaaatgctggcaaaggtgtaatgatgatgagtaatgaacctncaacatttaatatcaatcctacataagtaattttgacgcgaccaaatttatcagcaacatcaccagcacctacgataaacaaaccagcaaataaggcagatnagctaacagcgatatttatcgttccaacgtcactacta

SEQ ID NO: 3197 - DNA, 122 bp, Staphylococcus aureus; identical to SEQ ID NO: 2326

SEQ ID NO: 3198 - DNA, 174 bp, Staphylococcus aureus
aatagcctcgtatgttttcacacgtcctactgtatcatcggatttgtaagttaagatttcttgtaatgtgtatgcagcaccatatgcttcaagtgcccatacctccatctcaccaaaacgttgtccaccgaattgcgctttaccgccaagtggttgttgtgtaacaagtgaata

SEQ ID NO: 3199 - DNA, 165 bp, Staphylococcus aureus; identical to SEQ ID NO: 2248

SEQ ID NO: 3200 - DNA, 511 bp, Staphylococcus aureus
tccaacccagtgtagtcgattccattgattagtatatctatccatttctctttggtaagttactttgattttagatttttttgtatcattttgtttatgagaaagtacgcttataaattctgggttaaagttaccacgcgccaataaaggcatttgatgtgttggcaagaaattttgaccagcatttgaactactttgtctaccacctaaaaacagttcattaccatatgttgggtcataactatctctaccatatggtccccaaccattattcataattttgtgcgcctcaacaccccagccaattgatttatgatttgtttttctatcaatcgtagttctgtaactttcttgtttataatttatcgtttctgaaaatgattttgatccatttaatccacctgataagccattagatatattaatatctccgccataagaataacctaatgtttgttgaacttggaattcttcattttgatttttaggtgcatagtcaacaacatttaca

SEQ ID NO: 3201 - DNA, 226 bp, Staphylococcus aureus; identical to SEQ ID NO: 1856

SEQ ID NO: 3202 - DNA, 174 bp, Staphylococcus aureus; identical to SEQ ID NO: 2659

SEQ ID NO: 3203 - DNA, 174 bp, Staphylococcus aureus; identical to SEQ ID NO: 3198

SEQ ID NO: 3204 - DNA, 268 bp, Staphylococcus aureus
  misc_feature (1)...(268): n = A,T,C or G
actttcattggcacttttttttgtaaatcaataactaaatctttaataccctcacctaaagatttgtcttttaaaccaagcggtctnaaatgnnacagcaaagcacgcatttctaactgcgaatcttgaaccattttctctaaaataggaatttgttggtctaatggtggttctaacttcgtttctttgatagcagatagcatcatacttgccgcaaaaagttgctgactaacagaatcgtgaagttctcgtgctagtctttgacgtt

SEQ ID NO: 3205 - DNA, 118 bp, Staphylococcus aureus
tgatttaagaccaaactttttgttgaaacgttccacacgtccatccgcagcagcgaatttttgacgtccagtgtagaatggatgtgaatcagatgaaatatctaaacgaataactggg

SEQ ID NO: 3206 - DNA, 145 bp, Staphylococcus aureus
agggaataataatacgtctctgattgatggagagtcagttaataacataaccaatctgtcaataccgataccaagaccacctgtcggaggcataccatattctaacgcttcaatgtaatcttcatccatttcatgcgcttcatca

SEQ ID NO: 3207 - DNA, 360 bp, Staphylococcus aureus; identical to SEQ ID NO: 3004

SEQ ID NO: 3208 - DNA, 200 bp, Staphylococcus aureus
ccatcttctgctaaaagatgacggtctctcaacacgatatttcctacatccccaataccaatgccatctattaaaatatttcctgaatttaccttttcatttaatatcatatctttaccgttgtaattaatgacatctcctttttccacaaggaaaatcttttctggtgcaacacctgcttcagctgctagcttcgcatg

SEQ ID NO: 3209 - DNA, 328 bp, Staphylococcus aureus
caataatggttcatcgccatcatatataaacgtaccattatcttttagacctattgtaatttcagatttagctttagcaatcccctcgcgcgaacctaaatcttgcatatgtgactcaccaatattagttataactgcaatatctggttgagcgaggtttgacagaaattcaatttcatggaaacctgacatccccatctccaatattgatatttcagtatcattatctaattccaaaatagttaaaggtaaaccaatttcattattgtaattaccttgcgttttcttaactttaaattcggtatgcaatacactttcaatcatatct

SEQ ID NO: 3210 - DNA, 276 bp, Staphylococcus aureus; identical to SEQ ID NO: 2225

SEQ ID NO: 3211 - DNA, 196 bp, Staphylococcus aureus
tgtagtacgttaccgatgataacttcatcaatctcacttggattcaaacccgtctctttaataatatgttctattaaagtcgcacctaaatcataggctggcacgtctttaaacgcacctccaaaaacgccaataggtgtcctgtatgctgctgctaatacgactctcgtcatgtcatattcatctccttatgata

SEQ ID NO: 3212 - DNA, 497 bp, Staphylococcus aureus; identical to SEQ ID NO: 3010

SEQ ID NO: 3213 - DNA, 497 bp, Staphylococcus aureus; identical to SEQ ID NO: 3010

SEQ ID NO: 3214 - DNA, 329 bp, Staphylococcus aureus
tcgcaacatcttcagcatttttaaggttttgtaaaccatcgattgtagcacgaaccatgttgattggtgtgtttgatcctaatgatttacttaagatatcagtgatacctgctaattcaagtacggcacgaacaggaccaccagcgataactcctgtaccaggtgcagccggtttcataaatacgcttcctgaaccgtaacggccagtaattgtgtgtggagttgtaccttcaacacgtggaacaactactaaatcttttttagctgcttcaacagcttttttgattgcttctggtacctcttgagctttaccagtaccgaaacctaca

SEQ ID NO: 3215 - DNA, 450 bp, Staphylococcus aureus; identical to SEQ ID NO: 2885

SEQ ID NO: 3216 - DNA, 221 bp, Staphylococcus aureus
tgcaagttctgccattttatttttacgttcatgcatagaatcaactaaaattaattcagttaaacgttggcttgtgatttcatgttcatctaacattttaggcatgacgccaatagctttgccgccatgatctaatacaccatcttgaatggcacccataatgccaattgaccctgcaccaaatactaattcataaccttgttcagcaaaatatttaccta

SEQ ID NO: 3217 - DNA, 148 bp, Staphylococcus aureus
cttgaatgcctactgcttcacgttcttcacggttcatttcgtaaatattttggttaactggttctggaacttttaatttatttttaataccatctagtccagcttctaagattgcagctaacgccatgtatgggtttgcagctggatc

SEQ ID NO: 3218 - DNA, 352 bp, Staphylococcus aureus
tagtggtacagctctatcatgatttagcaacacaaaatcttgcataaacccatcatgtccacttgatctgaagtagctcgattttaaatagttttcagcaatgacatcgtctttttctgtcggcgtattcggtaccataactacttttgtacctttattaaacacacctttactgtcaaatacgacctcaccaacaccttcatgaattaaagacattggcaatttctgagataagacattctcatcacggctaccagtataatatctttgatcggcagcacaaattgacatatataaaggacgtacaatgacatagtcactgtaaatatctacgttgttatacgtaacttca

SEQ ID NO: 3219 - DNA, 193 bp, Staphylococcus aureus; identical to SEQ ID NO: 2936

SEQ ID NO: 3220 - DNA, 431 bp, Staphylococcus aureus
cgctagataaaattttatcatgatcaaatgataagaatggcaactctgcaggcgaagaaccagttgcaattaatacaaattggttgggtaataagtctgattcaccatcttcatattcgacagaaattgtgccactttgaggtgaaaatatagatgtacctagaatacgtcccgtgccattataaatgtcaatgtgattgtgttgcattaaatgctttacaccttgatacatttgattaataatgtcttcttttcgtgccaacatattttcaaaattaacattagcatctttgacatcaacgccaaacattgctgcctgttttactgtttgaaatacttcagcagatttaagcagcgatttagtaggaatacaacctttatggagacaagtacctcctaatagttgtcgttctactattgccactttttta

SEQ ID NO: 3221 - DNA, 194 bp, Staphylococcus aureus
taaaccttcttcagataatagcttacggtctcttattacaacattaccgatatcaccgataccactaccatcaacaagtacattaccagatggaatgcgaccagctttacgtgctgaatcgtgtgttaaagctaagacatctccaatatcaaagatgaagacattatcttcttcaacgccgcattcaacaccag

SEQ ID NO: 3222 - DNA, 455 bp, Staphylococcus aureus
gctccatcgcttaactaaataatcatctagtgaaatatatatacaagatgatcccggatccccttgtctaccagaacgaccacgtaattgcctgtctacacggctattttccatatgttcatgaataataacagctaatccacctaatgcttcgacaccttcaccaagtttaatatctgtgcctcgacctgccatactagtcgcaacagtcatggaaccaatttgccctgcttcagctatcatctgcgcttcttttgcaacattttgcgcaatgagtaaattattaggaatatccatttggaataatactttcgaaaagtattcagccgcttcagcagttctcgttatgagtaaaaccggtcgccccgtttcatgaagttcaactatatcatgaatcatcgcgatgtttttctcatcaactgaacgaaacactttatctggttcatcgatacgtt

SEQ ID NO: 3223 - DNA, 248 bp, Staphylococcus aureus
ttaactgttactaatttttgaccaaagcgaatcgtcagcacatcttcaactttaacatccgatccagctttagcaacattaccatttattgtaattctaccttgatcacttacttcttttgctagcgtacgtcgctttattaaccgtgatacttttaaatatttatctaatctcatgtattactctcccctttttctagccactgctttaacgcggcctcatcaaatgacttatccttcgtcttctca

SEQ ID NO: 3224 - DNA, 379 bp, Staphylococcus aureus; identical to SEQ ID NO: 1849

SEQ ID NO: 3225 - DNA, 266 bp, Staphylococcus aureus
ttcgtataaaaaggaccaattggtttagttgggttatcaaatcgtggatcatctttatctacttccacacgtgtaacgattgtgcctacagttctatcactattcatttcagttaaaatgcgattgatttcagtttccaaccaatagcctatcataccctgtgacattgcaccacaagtatccaatggcattgccggcgttgtgtcactgttcgatttagcttgttggattaataaacttccaatttgtggaccattaccatgtga

SEQ ID NO: 3226 - DNA, 329 bp, Staphylococcus aureus; identical to SEQ ID NO: 3086

SEQ ID NO: 3227 - DNA, 289 bp, Staphylococcus aureus
ttgaaatatgatcatcaccacgaattacatctgaaatttgcatgtaatgatcatctatagctactgcaaaattgtacgttggaatgccatctttttttacgataacccagtcaccaataccatttgaatcaaatgaaatatttccttttaccatatcatcaaatgaatacgtttggttttgaggtactcggaaacgaattgatggttggcgtccttctgcttcaaattgttgacgttgttcttcagtcaaatgcgcatgttgaccaccatagcgaggcatttcaccacg

SEQ ID NO: 3228 - DNA, 379 bp, Staphylococcus aureus
cgcctgcatcaactgcttctttaattttcttagttaaagaaactgtttctggtgtcgtatttgcaccttttgtctttgtttcattaatttggaaaccattagttcctaaatatgcactatttttttgtaactttctttgaattaaatgaatcatcgtcgcaatagaagttttaccatttgtacccgttacaccaaatgtcactaactgatgactcggataatcatataatgtgtgtgctagaatactagctactcttaatgtgtccggcacaaccacttgtgttacgttagctggtaatgattgttctttattgaccactaccaacttacacccttgatcagctacattttgacagaacttatgactgtctacagtata

SEQ ID NO: 3229 - DNA, 113 bp, Staphylococcus aureus
ttgaataattgagacgtcttcgtctccttgtggcaattggtcaactaatgcttggttaactacaaacggtaattcacgataaacttgctctgcttcagcaataatcgaatata

SEQ ID NO: 3230 - DNA, 262 bp, Staphylococcus aureus
tgagtagtaccaaatacgccaccttttctaccaacatcttcaccaagaataaacacatctttattttgttgtaatgctaagtcttgtgcctggcgtatcgcctctaaataagataatttagccattagttaagactcccttcttcgtacacaaatgcataggcttcttcgacacttggatatggcgcgtcttcagcagcctttgtcgctttattgatgatgtctttatgctccgcttctatttctgccaaccaagcatcatc

SEQ ID NO: 3231 - DNA, 381 bp, Staphylococcus aureus
actgtttctttcgtcatgataatttcgccattttcagcataaaatactggtaacggtacaccccacacacgttgacgagaaataacccattcgccacggtcacgaaccatattgtaaatacgtgttttaccccaatttactttgaagtttgtattttcgattgcatctaaaatatcttgtcttactttactgattgaggcaaaccattgtggtgtagcacggaagattacaggtttttttgttctccagtcgtgtggatagctatgtgtaataaagtctaattttaatagtgcacctttttctgttaataaatcagtaacggctttattagctttatcatagaacatcccttcaaattggccgccttcttcagtaaataca

SEQ ID NO: 3232 - DNA, 513 bp, Staphylococcus aureus
caatggcgtttgcacatcaatgaccgttttcgatgcttcgatactcacaatttcatcatccactttaacttcatctggacttacgaattcaacataacctactgtcccaatatcatcttgcaattcaggtgtcatactaaacacatacaaatctcctactttttctacccataaataattggctaactttttcatcttatcttcatcctttctcttctatttaaaatgctacaaataaatttccgcgagtaattttaatgttttacaacgctgttcaatacctggaataagcggtgctactaacacctcatcaacttcaaacgtagcaatgaaatcatctaattgtgctttaaccttttcttgtgtacctgcaatgatgcgtgcttgatgtgcttgaatcatctctttgtctcgatcattaagcttatacttttgtgctgtgtctactgaaggaaaatcttcaaattctgcaaattgtaatttacctaataaccaaacatctaaggcatgttg

SEQ ID NO: 3233 - DNA, 174 bp, Staphylococcus aureus; identical to SEQ ID NO: 2983

SEQ ID NO: 3234 - DNA, 139 bp, Staphylococcus aureus
cgaagatttttaacatttctgatgctagctttctttttcatctttcaaatgcttaataaaatcaaagccaggtcgccctttagccaatgcttccatcacatcataccaatccgaaccgacttgttgatatatattttgc

SEQ ID NO: 3235 - DNA, 235 bp, Staphylococcus aureus; identical to SEQ ID NO: 3179

SEQ ID NO: 3236 - DNA, 235 bp, Staphylococcus aureus
tctttagtaaatccaagaacttcgaacattttttcttgtaactcaccatcatgaattctgattgaaccgccacctaattcataaccatttaatactatgtcataagcatttgcctcagcttcttctggcgcagtgccaagcttagcaatatcagcttcttttggagatgtaaatggatgatgtgctgcaacgtaacgtttcgcatcttcatcatattctaataatggccaatctg

SEQ ID NO: 3237 - DNA, 310 bp, Staphylococcus aureus
atcaatatttttcaatacacctttttgatcatagaaatctaaaataggcttagattgtttaatattaacactcaaacgattagctaccgtttcaggattatcatcttctcgttgatacaatttaccaccatcgatatcacaaataccttcgaccttcggaggattaaatacaagatgatacgttgtaccacatgactcacagattcgacgacctgtaagacggttcattaattcttcttccggaacttcgatattgatgacagcatcaatgtttctgtcaagctcagacataatattatttaatgcctca

SEQ ID NO: 3238 - DNA, 232 bp, Staphylococcus aureus
tgacttaactgcggccactttggcatgtggaatggcaataccttcgccgataccagttgtactttgtgattctcgattgtgaatcgcttccttaaatgacgcgacatcacttaatttacctgctttgtctaattgatttactaactcatcaataacaccatttttgtcatttgccattaaatccattgctattgtatcttttgttaataactctgttactctcattattttc

SEQ ID NO: 3239 - DNA, 256 bp, Staphylococcus aureus
agtaacttctacaccatctgtatgtctgtattcaggatgacctggtgttttagaaccccattgtctaaattgctttaattcttctaattctaaactaccagaaacatgtaacaagctatacaataatgctgaaccatgccctgcagataatacgaaacggtctctattgaagtaatctttagattgtggattaaaattcagatgacgtgtccacaaagtgtaagccattggggcagctcccataggtaatcctgga

SEQ ID NO: 3240 - DNA, 224 bp, Staphylococcus aureus
aagtttgttccgttgactgggtctccaccaataccaacagctgtagtttgaccaataccttcttcagtcaattggtgcactgcttcatatgttaatgtacctgaacgagatactacaccaacatgaccttttttgtgaatatagccaggcataataccaattttacattcatctgctgtaatcacacctggacagttcggaccaactaaacgtgtttttctacc

SEQ ID NO: 3241 - DNA, 721 bp, Staphylococcus aureus
cttaaaccaacttgatgtacgtcattgttcggtcttgcatgtgcaattgcaatttcaggtgcgataacgatataaggtccaagttcattaacgctatcaatcattgcttgaacatagccttgttcaataatttgttcttgtagtaatggctgagaagctatagttatagcttcagtccaatcatttacttgttcttttacaatgatgcgtgttgttgacaaaatgtctaatgacacgttattaagcctcctttgtcatagttaaagcaatgtgttgtttaattttaaaaatattcccatctaagaaatcttgtcgatataagtcgttgcttaagcattcgcttaactgtcccaatgcctttaaatgtgcattggggtggtccgttgctaatgtaattacaaggtgaacgggatcgttagctttactaccaaagataatcccttcagtgaaatatgttagtgcgaaacctacaccattctgtacataatcagtaccagcgtgaataagtgcaatatgtggactaatgaccatatatgacccgaattgttcaaattgttttaaaattgcagctgtataatttgaatagacaatgccatcattgattaaaggttgcacagccactgcaattgcggattcaattgataatggttgtttatttataatgatgcgatgttcaggcaataaatctgcgagtgacttgccatcagttgccattttcatg

SEQ ID NO: 3242 - DNA, 210 bp, Staphylococcus aureus
gtattaaacattaatttatatccaggttgctcttgatacatttttatttcttctgcaataatacctttttctttatcaacagtttcttttgtaaaataaggcgtttcaaccattgtaagtaaacgtttaatgttgttttcaatattatcagttgcactgaacaagtagcttgtacgatcaaagcttgtaaacgcatttgcttgtgcgtta

SEQ ID NO: 3243 - DNA, 276 bp, Staphylococcus aureus
tgctgcgtctaaatcatgtgtttttaaatgtaagtgtccaatcatgccttttgctggcattccttgccaaccttcatcagtacgatgtgttaataaggtttggctatcaacttctaaagtatccattttaactttgccattttgccattcccatgaagatgaaggtctatcgcgatagacttcaataccattaccttcggggtcgttgaaatataaagcttcacttactaaatgatcaccagcgccgatgcccatatttttttgtgccacgaaata

SEQ ID NO: 3244 - DNA, 179 bp, Staphylococcus aureus
cttgtgttacgttagctggtaatgattgttctttattgaccactaccaacttacacccttgatcagctacattttgacagaacttatgactgtctacagtatatccaactgaagcgacaaaaatgctaccttctctcgctgtacgtgaatcagtagtgatatcatctatttgttgttct

SEQ ID NO: 3245 - DNA, 221 bp, Staphylococcus aureus
tgtaaatcactttggcatctggattattatctaaaacatgatgaccaatggcatgcattaaatgggtttttcctaaaccaacacctccatagataaataatggattgtacgctttggctggtgcttcggccacagctaaactcgctgcatgtggaaagcggttaccgggtccgattacaaaagtgtcaaatgtgttatgggcattgaattgctctctacca

SEQ ID NO: 3246 - DNA, 167 bp, Staphylococcus aureus
agaacgtttgatagctgtagtcaacatacgttgatatttagctgaagtaccagttacacgacgtggtaaaattttaccgcgttctgagataaaacgttttaataattcagtgtctttgtagtcgatatgtgtaataccatttgctgtgaaatagcatacttttttac

SEQ ID NO: 3247 - DNA, 189 bp, Staphylococcus aureus; identical to SEQ ID NO: 2060

SEQ ID NO: 3248 - DNA, 181 bp, Staphylococcus aureus; identical to SEQ ID NO: 2612

SEQ ID NO: 3249 - DNA, 104 bp, Staphylococcus aureus
gcttctaataatgcacgagcgattccgtgacggatagcttgagcttgtccagtgaaaccaccaccatgaacgttaactaaaacatcatagttacctttagtttc

SEQ ID NO: 3250 - DNA, 350 bp, Staphylococcus aureus
tgtcgataaacattcatatcgtagcggtctgcaaattctttaatgcgatatgccggcggtaccatgacaggtaatgaatcatgtttgaattgttcgtctacggcatctttttgaataggtaatccaaagaagcctgcaataccaatcgtttcaaagggccctgctgcttcgatatgtctacgaaatggttctgaacgaacatctatacaaaatgcaatttgcgctttcgttgatgtgcccatctgatttagctcgctattattttcatcaactgcttgtgtgtcatttaacaatactgaatgtggctgattagcgttatcattttctgagacatttacttggtttacatc

SEQ ID NO: 3251 - DNA, 268 bp, Staphylococcus aureus; identical to SEQ ID NO: 2888

SEQ ID NO: 3252 - DNA, 215 bp, Staphylococcus aureus; identical to SEQ ID NO: 2735

SEQ ID NO: 3253 - DNA, 250 bp, Staphylococcus aureus
taacgttttttcatcgaatggtttaccaatgaactgtaaaccgattggtcggccatttgattgtccacaaggaacagaaataccaggtaatccagctaagtttactggtgttgttaataaatcattggcatacattgttaatggatcatcaatttcttcacctaaattaaacgcagttgtaggcgctgttggaccaactactacatcataattttcgaatactttatcaaagtcatttttaatcaatgtt

SEQ ID NO: 3254 - DNA, 161 bp, Staphylococcus aureus
ccaggaataccgatagtttgaatttctttacattcctcactgatgcgttgtgcaccgcgataactaccgtcaccaccaataactacaaggccctcaatccctcttttacgtaagttttcgattgcaactttacgtacttcttgctccttaaactctggaca

SEQ ID NO: 3255 - DNA, 215 bp, Staphylococcus aureus
aatttctgcaaagctctgtaaacaatctagctctgaaataattttagcttgttgttgtaaacgttcagtatattttttaacttcttcacgtagctgaacaaataattgatattctaattcgatggctttgtcttccgcacctaaaatgatatcttctttttctttaagttcatcagttataaaacgttcagcattcgataacgtttgcttcctca

SEQ ID NO: 3256 - DNA, 499 bp, Staphylococcus aureus
tgaaccatcaatatttttcaatacacctttttgatcatagaaatctaaaataggcttagattgtttaatattaacactcaaacgattagctaccgtttcaggattatcatcttctcgttgatacaatttaccaccatcgatatcacaaataccttcgaccttcggaggattaaatacaagatgatacgttgtaccacatgactcacagattcgacgacctgtaagacggttcattaattcttcttccggaacttcgatattgatgacagcatcaatgtttctgtcaagctcagacataatattatttaatgcctcagcttgctcgattgttcttgggaagccatctaataaaaagcctttttttgcatcgtcttcagaaattctttccttaacgatacctacagtcacttcatcaggaactaattcgccacggtccatataagacttagcttctttacctaattcagtttcttcttttatagcttttctgaacatgtca

SEQ ID NO: 3257 - DNA, 372 bp, Staphylococcus aureus
agcagattcgatttgacgagatgtgatccaagacgttgttgtagcttgtaaaccaaactcaccaaatgttacgtagttaccgcctttagaacgaccagttgttttaggacgatgttgacgacgatattttacacgttttggtagtaacattattattttcctcctccactagtgttcttagtaggaagaacttctccacgataaatccatactttaacgcctaatttaccgtaagtagtgtcagcttcagcgtgtgcataatcgatgtcagcacgtaacgtatgaagtggaacagttccttctgaatattgttcagcacgagcgatgtcagctccgcctaaacgaccagatacttgagttttgataccttta

SEQ ID NO: 3258 - DNA, 104 bp, Staphylococcus aureus; identical to SEQ ID NO: 3249

SEQ ID NO: 3259 - DNA, 153 bp, Staphylococcus aureus; identical to SEQ ID NO: 2957

SEQ ID NO: 3260 - DNA, 117 bp, Staphylococcus aureus; identical to SEQ ID NO: 2878

SEQ ID NO: 3261 - DNA, 290 bp, Staphylococcus aureus; identical to SEQ ID NO: 1942

SEQ ID NO: 3262 - DNA, 152 bp, Staphylococcus aureus; identical to SEQ ID NO: 2676

SEQ ID NO: 3263 - DNA, 176 bp, Staphylococcus aureus
ctgatcgtcccattgctcgttgtcgtgttctttcattaattcttttgcttcttctactagatttaagatttgatctaaatctgacattttacctagacggatcatgtacgtcactccttatatcattatgttaaacatgtttttcagtacatgttaatcttacacactattaacat

SEQ ID NO: 3264 - DNA, 176 bp, Staphylococcus aureus
cgtacacaaatgcataggcttcttcgacacttggatatggcgcgtcttcagcagcctttgtcgctttattgatgatgtctttatgctccgcttctatttctgccaaccaagcatcatcgataatgccagctgaaagcaactcttttttgaacttttcattgcagtctgctttttta

SEQ ID NO: 3265 - DNA, 350 bp, Staphylococcus aureus; identical to SEQ ID NO: 3250

SEQ ID NO: 3266 - DNA, 80 bp, Staphylococcus aureus; identical to SEQ ID NO: 2480

SEQ ID NO: 3267 - DNA, 225 bp, Staphylococcus aureus
gatacaaatagtggccggcaacgcctatcattgcagcattatctgtgcataatttaggacttgggatagttaattgaatgtcattgactttgcattgatccgctaaagattgacgtaatcctttattactcgccacgccaccagcaacaattaatcgctgaacaccatattctttacaagcttgaatagctttaaacgtgagcacctctacaacactgttttgaa

SEQ ID NO: 3268 - DNA, 181 bp, Staphylococcus aureus; identical to SEQ ID NO: 2612

SEQ ID NO: 3269 - DNA, 221 bp, Staphylococcus aureus; identical to SEQ ID NO: 3245

SEQ ID NO: 3270 - DNA, 138 bp, Staphylococcus aureus
gcccagaccaccagctaaggtcccaaaatatatgttaagtggaaaaggatgtggcgttgcccagacaactaggatgttggcttagaagcagccatcatttaaagagtgcgtaatagctcactagtcgagtgacactgc

SEQ ID NO: 3271 - DNA, 516 bp, Staphylococcus aureus
ctttcttctttaacatgtggtgtatgagaccaaacttcttcagctgtatgcactaagattggtgctaacaacttcgtcatatcaactaaaatttgatataacacctgtttgcatactacgacggatatgagaatcacgttgttcaatatataaaatatctttaccgtaatccaaatagaaattacttaactcaacattgataaagttttgaacttcttgataaatatttaagtagtcaaagttttcatagttgttaatcgtacttgcagtaaattcacgtaaacgatttagcaagtaacgatccacttctaataactctgattcaggaatgctatctgtgtcaggattgaaatcgttaatgttacctaacataaatcttaatgtatttctgattttacgataaacatcagatgtttgttttaaaatttcatcagaaattctaacatcagctaaatagtccgtactacttacccaaagtctcgcaatatcagcacctttttgtttaaccacttggtc

SEQ ID NO: 3272 - DNA, 190 bp, Staphylococcus aureus; identical to SEQ ID NO: 2723

SEQ ID NO: 3273 - DNA, 250 bp, Staphylococcus aureus; identical to SEQ ID NO: 3253

SEQ ID NO: 3274 - DNA, 177 bp, Staphylococcus aureus; identical to SEQ ID NO: 2849

SEQ ID NO: 3275 - DNA, 337 bp, Staphylococcus aureus
cataaccgcaaaagttaataatgctcctgtttttgttttgtgtatcatttccaaagtttcaagatcaattggttggccttcgctttgcatatctaacatttgaccgccgaccattccaacatgaccacttgctattgacagccgttgtagaacttttatttttacttcatcagttaatctatcatcacttgaaataagttcaaatgctttagttaataaagcatcacctgctaatatcgcagtccactcaccatatactttatgatttgttaattttcctcgtcgataatcatcattatccatcgctggtaggtcatcatgaataagtgaatatgta

SEQ ID NO: 3276 - DNA, 572 bp, Staphylococcus aureus
cagtataaaaatctaaaatacctaacccttctaattctgtaccatcaggcgtgatatattttttccctaaaaattgatagcctccacaaatcgttaatcccggcataccatcttcaatcgcttctttaagtggtgtcttaattttacttaattcttttgttgctaatgcttgttctctatcacttccaccaccgataaagaaaatatcacattcatcaaaggtaataccttctgtttcattgatttctacgacattaactttaatatttcgttttttagcacgttgtcttaaagcaataatatttcctatatcactgtataaattcaatttatctgacataaaatgataaatagtcaattcatgcatattatgattgacctccttcaaacgaacggtttaattgttcaagcataggcgctaatgatgtatagtttggtattgcaactgtgaaacctttataatccatagtctttgccgttgctttataaatatcacgctcaactataattggtacttcaacctctgctaacttcaatcgcaattgaagttcttctgctcgtgtacctgtcac

SEQ ID NO: 3277 - DNA, 109 bp, Staphylococcus aureus
cacccaaataagttgattatattattttttcttacgtccacgaacgataagtttgtctgatgattttttaccacgacgagttttcttaccaagcgtaggtttaccccat

SEQ ID NO: 3278 - DNA, 153 bp, Staphylococcus aureus; identical to SEQ ID NO: 2957

SEQ ID NO: 3279 - DNA, 108 bp, Staphylococcus aureus; identical to SEQ ID NO: 2943

SEQ ID NO: 3280 - DNA, 207 bp, Staphylococcus aureus
gtaaaaggtaaactttttcgcttacttctataatctaatatttgctgttcattcatcgcaatatcttgaataattatttgcggtgattgattaccattccattcgttgatttgaacagatcctaatatattaattggctgttcatcttgtaactcaggttctaagtgtccattttgccaaaatagcgcggcgatattactttcacca

SEQ ID NO: 3281 - DNA, 215 bp, Staphylococcus aureus; identical to SEQ ID NO: 2735

SEQ ID NO: 3282 - DNA, 323 bp, Staphylococcus aureus; identical to SEQ ID NO: 1927

SEQ ID NO: 3283 - DNA, 372 bp, Staphylococcus aureus
ccaaatcctaatgaatagaaatcatacacgtctgtacgcatttccatattatctactttgttaaccgctaatacgaccggttttttagatttgtataaaatttgagcgaccatttcatcgctttgtgtcaatccttcacgcacgttaaccataaaaataataacatccgcttcatctatggcgatttctgcctgcgctctaatttgtgtttggaatggtgcatcaccaatttcaataccacctgtatcaataatattgaaatcatgtgttaaccattcacctgaagaataaatacgatctcgtgttacacctggcgtgtcttccacaatcgaaacacgttctccaactattctattaaaaattgtagattta

SEQ ID NO: 3284 - DNA, 123 bp, Staphylococcus aureus
attgaaaatgcatttttagatttttgtatgcctctcgcaggctttttcgaagatttttgaacaggagcgacactcactccttgtgcttttagtgtttttagttcttgctctaactgttccata

SEQ ID NO: 3285 - DNA, 149 bp, Staphylococcus aureus; identical to SEQ ID NO: 1812

SEQ ID NO: 3286 - DNA, 350 bp, Staphylococcus aureus; identical to SEQ ID NO: 3250

SEQ ID NO: 3287 - DNA, 132 bp, Staphylococcus aureus
taacttgtcattcggtagtggcttcgttggtatgattttattatgttccatttttaccggataccttttttcatcatcctttggtctgccgttactgtcatctgtcatttcacttataaaataatacccttt

SEQ ID NO: 3288 - DNA, 231 bp, Staphylococcus aureus; identical to SEQ ID NO: 2160

SEQ ID NO: 3289 - DNA, 189 bp, Staphylococcus aureus
tgtatcagttggtttcgcaccatcatttaaccattttaaagctaacgcttcgtcaactttaatttctggagcattagcgctcgttgggttataagtaccgatttgttcgatgatacgtccgtcacgtggagaacgagcatctgctactacgatacgatagaatggatttctttttgaacctaaacgtgt

SEQ ID NO: 3290 - DNA, 178 bp, Staphylococcus aureus; identical to SEQ ID NO: 2904

SEQ ID NO: 3291 - DNA, 96 bp, Staphylococcus aureus
atacctaagtgtagctctaatacttgtccgatgttcatacgagatggtacaccaagaggatttaacatgatatcgatcggacgtccatctggtaag

SEQ ID NO: 3292 - DNA, 265 bp, Staphylococcus aureus
cacaaaccatggttttaacatattaccatcattaaagaacgctgattgcgcttgtaacatttgaacaggtgttactgttgtcgattgaccaaatgatgacgttttttgttgcaactcattactccatccaatttgaccaggtgcttctccatcaaacatacctttagttgattttccaaatccaaatcgttcataccaagatttcattttgtctgcaccaactaaatcttgtaaatgcatcatcaatgtattagatgaataagta

SEQ ID NO: 3293 - DNA, 278 bp, Staphylococcus aureus
tatacttagcgcaaaaccaatacctgtttcacttggaccatctagcaattctaataaaccattataacggccaccaccacaaagcgttgtaatggcaccatcatagttagggttatccatcattaattcaaatgctgtatgtgtataataatccaatccacgaactaagttaggatcttcaatatatggaatacctaaatcatctaaataagcttttacttgttcataatatgccttagattcctcatttaagaaatcagtgattctaggtgcagtct

SEQ ID NO: 3294 - DNA, 278 bp, Staphylococcus aureus; identical to SEQ ID NO: 3293

SEQ ID NO: 3295 - DNA, 138 bp, Staphylococcus aureus
tcaacttgtacacgaattaaagttcgtgtttctgggttcatcgtcgtttcccataattgttcagggttcatttcacccaaacctttgtaacgttgtaacgtgaagcctttaccaagttctttttgcaatttattaagc

SEQ ID NO: 3296 - DNA, 277 bp, Staphylococcus aureus; identical to SEQ ID NO: 1824

SEQ ID NO: 3297 - DNA, 309 bp, Staphylococcus aureus
taattgttaacaatgtatttggtgcaatttcgtcacgtaaatttttaatagcttcgattaattcccaatgtgcatctactttactcatttctttacgtgtacgaagatgaatagataaattggcaatgtcttgttcgaagacgtgcttcaaccaatctttccattcatcgatttcatagtagccaaggcgtgttttaacacttaccggaagcccacctgctttagtcgcttgaataatttcggcagcaacgtcaggtcttaagattaagccggaacccttaccctttttagcaacatttgctacaggac

SEQ ID NO: 3298 - DNA, 717 bp, Staphylococcus aureus
  misc_feature (1)...(717): n = A,T,C or G
tatgcagtcatattacgcgataaatcttcattgttaatatagtttgtacttgaaataagcggttgtgcttttttattaccataatcgacaatgatttcttcgctatatgtatcattacctaaagttacttccattttataagctgttttatcagttgttgcatttttacgtttcgcaaatgcaacttgttcaaagctacctctaacatttgtatattgatctacatagttcgtaaaagtatatgttgttgtgtttgttgtactatcataaataccttttgcaataatattaccttgggcattatataaattttgagtttgtgaaggtaatcttactgatcctggacggaaatattgaccatatttaaaagtaaatgtatcgccctctttaacagaatcatcgattgtgtaatttgcttttaattttaaaacatcacttgaagttgcccaaaattcagttttaccagtagtctgattaacatgtcctttatcaatcgcaatgtcaatatttgaaaaatgtactttatcattaacatttgttccttgttgtggagctgcaacagtattcactgccatgcgatttaaagttcttggtttaatagtcgttgttttaggtgtagttgaaacatcttttgcttgtgttaaattacttttatcagtttcattactatatgtagttgatgatttatcatttgttgttacattgntagtttttgta

SEQ ID NO: 3299 - DNA, 548 bp, Staphylococcus aureus; identical to SEQ ID NO: 2582

SEQ ID NO: 3300 - DNA, 298 bp, Staphylococcus aureus; identical to SEQ ID NO: 2782

SEQ ID NO: 3301 - DNA, 183 bp, Staphylococcus aureus
ccatagtttatcgctttattaatattacgtttacgttgactatcaaatgtctttttcaatgtttcgggtgttttaccttcaaggtttaatacgcccatccatcgtacttggctcgatgtatcatactcagttgtaaagccatgatgctcgtaaccatgtgatttaaacaagtttactagggca

SEQ ID NO: 3302 - DNA, 152 bp, Staphylococcus aureus
cgctgctttcgaaatgtctacgtcacaaaatgcgatcatttcaacattttcaactttttgtaaacttggcatgtgcttgccattcgcaataccaccacacccaatgattccaactttaatcgtcatcataacgtcctccttttaatctttat

SEQ ID NO: 3303 - DNA, 667 bp, Staphylococcus aureus
  misc_feature (1)...(667): n = A,T,C or G
tattacaacattaccgatatcaccgataccactaccatcaacaagtacattaccagatggaatgcgaccagctttacgtgctgaatcgtgtgttaaagctaagacatctccaatatcaaagatgaagacattatcttcttcaacgccgcattcaacaccagtctcaccatgtgcttttaacatacggtattcaccatgaataggtaagaaatatttcggcttgattaatcgaagcattaattgttgatcaccttgagaaccatgccctgaagtatggatgttagaaatcttgctatggataacatctgcaccagctttatacaaggaattaatagttctgttaatactttttgtattacctgggataggtgatgaactaaatacaacggtatcttcaggtataattttaatttgcttatgagtaccattagcaattctagataatgctgccattggttcaccttgtgaaccagtacatagtatcaataactcatgcttcggtacggtattaattttattaggttcaataaatgtttcaggtggtgctttaatataaccaagttccatacctattttaatattgttttccatcgaacgaccgaacgtaacaattntacggttatttttgatagcagcttcaactgcttgttgaactcggtaaatatta

SEQ ID NO: 3304 - DNA, 153 bp, Staphylococcus aureus
tcagcagcttgaccatcaattgcttcagcagcaactttagcttcatagctagctttgtgagcaagtggtaaacctggaacgatatcaccaattgcatagatattgctgatagacgtacggctttgtttatcaacttctaataatccacggtca

SEQ ID NO: 3305 - DNA, 169 bp, Staphylococcus aureus
tgtattgtttgtagatttaatgatgctgttttatcaacttgtgcattgctacgatcttgatcaatttgtccaatagcagtgtcataaatattttgtaactgtgctaatatactatttctttcttctaccgttgcttgaatattcgcttcaattgcttgttttttatcgt

SEQ ID NO: 3306 - DNA, 788 bp, Staphylococcus aureus
  misc_feature (1)...(788): n = A,T,C or G
tcattttctaaaccatcaagttcaccagaattaatatgtttaccttcaccagtgtatgctgcttcttcaacatttccaccttcgatgacttcaatgattggcaaatcaaactttttagcaaattcataatctctgtcatcatgcgctggtactgccataattgctccagtaccatatgttgataatacataatcagcaatccaaatttgtactttttcaccagataaaggattagttgcatatgcaccagtaaatacacctgatttatcttttgctaaatctgtacgttctaaatctgactttttagaagcttctgtttgataagcttttactttttctttatattcatctgttgtaattgaattaactaatgcatgttcaggacttaagactaagaatgatgcaccatagattgtatctggtctagtcgtaaatacttctacttttccttccgtattatctacatcaaatgaaactttggccccttcagaacgtccaatccaattgcgctgcatatcttttaaagactcaggccaatctaaatcatctaaatctgctaataattgatctgcatattctgtgattttaagtacccattgtttcatcggcttacgataaactggatgtccaccacgttcagagacaccatcaatcacttcttcgttagataaaacagtgcntaatgctggacaccagttaactgcaacttcatcaactgtatgctaaacctttgttatataactgtatgaaaatccactgtgtccatttatagtattctggatctgttg

SEQ ID NO: 3307 - DNA, 282 bp, Staphylococcus aureus
gaaccgccacctaattcataaccatttaatactatgtcataagcatttgcctcagcttcttctggcgcagtgccaagcttagcaatatcagcttcttttggagatgtaaatggatgatgtgctgcaacgtaacgtttcgcatcttcatcatattctaataatggccaatctgtcacccataagaagtttaattttgtttcatcgattaaacctaattctttagctaatttgacacgtaatgcacctaaactttgtgcaacgacatttggtttgtctgcaaca

SEQ ID NO: 3308 - DNA, 361 bp, Staphylococcus aureus; identical to SEQ ID NO: 2309

SEQ ID NO: 3309 - DNA, 224 bp, Staphylococcus aureus
ccacgacgaccattatcaattaaagcgtcaacggcttcttgtaacatacgtttttcgttttgaacgatgataccaggtgcacctaaatctaataaacgtttcaaacgattatttcgattaattacacgacggtataagtcgtttaagtcacttgttgcaaatcgtccaccatctaattgaaccattggacgaatttctggtgggatgattggaagtacatctaa

SEQ ID NO: 3310 - DNA, 185 bp, Staphylococcus aureus
tctatacatttttcctttgttacacctgcaaaattaaattcatcctcttctggtggcaatgctttcgatgataaattaactgcttctcttaaatcatacgttgccatattccacacaaaccaacctgtctcttcagcatttttcactgtatctttacgttcgtgatcaccaagaacggattgatt

SEQ ID NO: 3311 - DNA, 278 bp, Staphylococcus aureus
ataattttctgaaatctgtttctactaaatcttcttgatatacattttctggcaatggtggtagccatggacgcttaacttcttcgatttctaatcgtgttgtaatagattcgatatgatctatgaccgcttctaactcagtttgattttctttcgtttcttcatcttcaagtccactcaagtctttgttgattgcttgaagttgaccatagtcattaatcatgtaaatcgtcttatcttcaacttctaatttatcgccttcgatgtcatatgttgca

SEQ ID NO: 3312 - DNA, 266 bp, Staphylococcus aureus
tcacttaagtatgttccccacacttttttaaatgcccataatccataatgttctgagtctttatctggatcattatctgtaccaccgaaatcgtaagttgttgcaccatgttcacgtgcatacttcatcatcgtatactgcatatgatgatttggtaaaaaatctctaaattcattagaagacgcaccatataagtaatatgattttgagccagcaaacattaatagtgcaccagaaagataaataccttcaggatgttccttttc

SEQ ID NO: 3313 - DNA, 290 bp, Staphylococcus aureus; identical to SEQ ID NO: 1942

SEQ ID NO: 3314 - DNA, 148 bp, Staphylococcus aureus
tattaacttcgattctactaacagcttcttcttctttaatcgttacatgttggcgttcgatagttgtcactaatgtatcaaccacgtcttgtgctttgttggaaactggaaacatacgcccgtgatcttcttcttttaatttaacacc

SEQ ID NO: 3315 - DNA, 381 bp, Staphylococcus aureus; identical to SEQ ID NO: 3231

SEQ ID NO: 3316 - DNA, 132 bp, Staphylococcus aureus
gaaacttgctgcaatgaagtcaacattttctttaataccgaaacggatatcttcagcatctttttctgtaataccaggtaaacttactcttacgccaggtaagttaacaccttttttgtttttaagctcacc

SEQ ID NO: 3317 - DNA, 123 bp, Staphylococcus aureus
taacatctttaacgcgctcttttctacgttcttctgttaaggcaggtacagcaatacgtatcacttcaccatcacttgttgggttaacacctaagttagctgctattatcgctttttcgatgt

SEQ ID NO: 3318 - DNA, 106 bp, Staphylococcus aureus
acttgttgttcgcttgcattatccacattatacgccttcgcattgtcaccattacttttaattttatcgacagtctccgataccgcttcagctatgtctaccgcca

SEQ ID NO: 3319 - DNA, 141 bp, Staphylococcus aureus
aattggtttacaccaggtgataatgtatcgtcgccttcttcacgattgaatacttttacatcaagaacgataccgccagcgccgtgaggtacacgtaatgaagtatctctaacttcacgtgctttttcaccaaagattgca

SEQ ID NO: 3320 - DNA, 287 bp, Staphylococcus aureus
gcttttttgattgcttctggtacctcttgagctttaccagtaccgaaacctacacgaccatttttgtctccaactacaactaatgcagtgaaacggaaacgacgaccaccttttacaacttttgctacacggttgattgtaacaacgcgttcttcaaattctttcgtctcttcttctctacgagccatgtatttgtccctcctttaaattaaaattctaatccgctttctcttgctgcttcagctaatgctttaacacgtccgtgatataaatatcctccacggtca

SEQ ID NO: 3321 - DNA, 265 bp, Staphylococcus aureus; identical to SEQ ID NO: 3292

SEQ ID NO: 3322 - DNA, 175 bp, Staphylococcus aureus; identical to SEQ ID NO: 3025

SEQ ID NO: 3323 - DNA, 132 bp, Staphylococcus aureus; identical to SEQ ID NO: 3316

SEQ ID NO: 3324 - DNA, 226 bp, Staphylococcus aureus
cattgcaaaaatagaaaatcgtttcaaggctccgccaccaaaagtatttaataactcagtggcaccttgagaaccttggggattatcaaaagctgcaggatttactcctggagctggtatataagtccctattttaaaaattactaacattgctagtgtgaagaaaatcttgttacgaacctcttttgttctaaagaagttcacaagggtttgaatcattagatca

SEQ ID NO: 3325 - DNA, 309 bp, Staphylococcus aureus; identical to SEQ ID NO: 3297

SEQ ID NO: 3326 - DNA, 151 bp, Staphylococcus aureus
caagataccggcagtctaaattgttgcgtacctcctcttaatatggcataccaagcaccatgtactttcttaatgtctagcacttctgtcacatagtaaccaatatgtgccacaataaagcgcccacattcaaagttcaatgtcacatctt

SEQ ID NO: 3327 - DNA, 207 bp, Staphylococcus aureus
ccccatggtgacattggagatggtctaccgataggagcacgaccttcaccaccaccgtgtgggtgatcgttagggttcattacagaaccacgaactgttggacggatacctttccatcttgaacgtccggctttaccaacgttaactaattcgtgttgtaggttaccaacttgaccgattgtagcacggcaagtagataagatcata

SEQ ID NO: 3328 - DNA, 435 bp, Staphylococcus aureus; identical to SEQ ID NO: 2789

SEQ ID NO: 3329 - DNA, 174 bp, Staphylococcus aureus
ccccaaaaaatcaaactataaagatgatagcttacatttaagctcaccttgtattttaacctaggctagctagtcaaaacaagttatattattcacctttatttttcttgataatatcttcagcgattgattttggaacttcagcatagtgatcgaagtacatagtgtaagtac

SEQ ID NO: 3330 - DNA, 287 bp, Staphylococcus aureus; identical to SEQ ID NO: 3320

SEQ ID NO: 3331 - DNA, 297 bp, Staphylococcus aureus; identical to SEQ ID NO: 2639

SEQ ID NO: 3332 - DNA, 556 bp, Staphylococcus aureus
atatttgattagtttaattgaacttattttttaagtttatcaattgcatcagttattttgtttttagcattttcaacaacttcttttgctttaccagtcgctttatcttgctgaccttctttttctaattctttgttatcagtaacgttacctactgtttctttaacatttcctttaaattgatcgaacttactttcgtctgccatagtgaaacctccttggatgtatatatttatataccactaaggaggttcgctaaacattataatatgaagtttttatgttatagtatagtatttatacgattaaatataaaacatgtatccgtctaaatcttcacttgtatctacatattccgctaaatatttcaatgttgtattatctaaaacatctctcactgcatctctcatgcgaatccatagttgtttttgcgcaggtggttctgattcaatactttcaacaaatgtaattggaccttctaacagtcttataatatcccctgctgagatttcttccgctggcactcttaattggtatccacctttagcaccgcgta

SEQ ID NO: 3333 - DNA, 586 bp, Staphylococcus aureus
gtttggtttagtaactatgatgataaaagcatcttcatacaatacttctagcttacgagcataaggtattaaattaacactcggtatttctcgcggtaaatgaatttctaatatatcatttgtcattaattgcttacgcactgtgactggttcatcattaacaattaaagcgccattatttttaatggcgctcactgtcttcttagaaaaatcatgtcgtgctaaaaaagttttaacagtttcttgttgtgatatatgatacttaaatttcatcgttcttcatcacttgatatgaaagaatcgtgcacacgtttccagaatgggaatggtctaaaacgtgcaaacctcactttttcatttgctacacggtattgtattgaattaacatttttatgtttgatactaacatgatctatcgtcattctaatggtatcatgattaactggtgatattaaacatgtatgatgctttggtaatacaagtggtgatcctaccgttctaaacacacgattatttatcgaggcaatttctgtaatttgcattgcttcaagtgaaggatgtatcagtgcgccacctagcgctttgt

SEQ ID NO: 3334 - DNA, 225 bp, Staphylococcus aureus
attcgatctgcgatgtgtccattttcaggatcctgtcttaaatacggcttaagcggttgtacaaaatcattgtgcgcatgggctgttaatgcttctgttaatgcgtccacataaacttgtgaatgattacctcccgcttgttcaatatctgatctatttaaatacaacatctctctattcattctgatttaactccttgtcttgatttcattttttctaaccatg

SEQ ID NO: 3335 - DNA, 272 bp, Staphylococcus aureus
tgttttcatcatttcacgtagctcttgctcgatttctaaatcaagatctgttttacgataaccattcaaaccttgacgttcatcttcttcaggttgattttgttgctgtgtgtctttgttgtcagaagtcgctactgtttttttattatctgtttctttagtcataacaaacgcctccgttataaaacgctatatttaatgatatgtgatatttaagccattattttgaaaaatggtgataaatatatcttcttgagttatatcataatttt

SEQ ID NO: 3336 - DNA, 359 bp, Staphylococcus aureus
ttcgaaatgtttgtaagcagctacacttaaaatgcctatcgttgatagtgatgcaaggcgagaaatgtttttattgataaagctagctgagtataaagcagcagtagttgcttctgcaatgccgacgtattttacaagttctttttgcaagccaaaagtatgttcaaacagttcaatcatacccttatcttcttgcaatttaggtttactggcttggtatagctctttcgcaagttttaaattcgttgcgtaacgcaaaatcatatttaattcctcccaatatttgattttttgtgaaagatgattactttatcatttttacccgtttctataaaaatgaatcaattatgtaacgtatg

SEQ ID NO: 3337 - DNA, 188 bp, Staphylococcus aureus
caacttcttcaccaactttgatttgaccacgttcaacacggcctgtagcaacagtaccacgaccagtgattgagaatacgtcctcaactggcatcatgaatggtttgtcagaatcacgttctggagttggaatgtaagtatctacagcttccattaattctaagattttttcttcgtattgagcatcg

SEQ ID NO: 3338 - DNA, 386 bp, Staphylococcus aureus
  misc_feature (1)...(386): n = A,T,C or G
acacgatctgtcacgtgaacttgtaataccgcttctcctgtttcaganatcagcttaacttctgcaccttcatgaatgcctctatcttcagcaagctctggagaaatttcaacaaatgcacgtggcactttgtatttaatcattggtgtttgataagtcatattaccttcatggaagtgctctaacaatcgaccattgtttacatgaatatcataaatttcatcttgcttaaagtaattatcaaatgataatgggaataattttgctttaccattatcaaaattgaatccttctaagtatagaataggctcatcagtaccatcaggttgtactggccattgtaaactattgaatccttctaaacgatcntaacttaccccagcata

SEQ ID NO: 3339 - DNA, 195 bp, Staphylococcus aureus
ccactaccatcaacaagtacattaccagatggaatgcgaccagctttacgtgctgaatcgtgtgttaaagctaagacatctccaatatcaaagatgaagacattatcttcttcaacgccgcattcaacaccagtctcaccatgtgcttttaacatacggtattcaccatgaataggtaagaaatatttcggcttg

SEQ ID NO: 3340 - DNA, 97 bp, Staphylococcus aureus
tcttgcatccgatcttgcaacgctgtaaatgtttcgaagccatcctcttctaagaagtgccctccatcttccacgatttgcaagttcccctctaatg

SEQ ID NO: 3341 - DNA, 118 bp, Staphylococcus aureus
gatgcaacgtgtacttcagttggtacgccagcccatttttctaaaaattctttacctactaaacctgcatggtagcttgtacctgctgcaataacgtaaatgcaggtctgcttcttta

SEQ ID NO: 3342 - DNA, 236 bp, Staphylococcus aureus
ctggaatgttttgtaatggtaatgcgttaccaactttgatgtcagcttcagcaccactttcaacgatttgacctacttctaatcctttaggagcaatgatatatcgtttttcaccgtctgcatatacaactaaagcgatgtttgctgagcggtttggatcatattgaatagaatcaacttttgcattgataccatctttgttacgtttgaaatcgataacacggtattgacgtttg

SEQ ID NO: 3343 - DNA, 180 bp, Staphylococcus aureus; identical to SEQ ID NO: 2778

SEQ ID NO: 3344 - DNA, 180 bp, Staphylococcus aureus
  misc_feature (1)...(180): n = A,T,C or G
atgatatacctcccttacaacactcgtggaccagangttttctgatctctcacattaacttctaacttacgtactggcatttctagtgaaatattctacattctttttaatatccgaacgaattgcttcagttaaagattgaacttgaacattatttggtacgaaaaagtcagttttaat

SEQ ID NO: 3345 - DNA, 235 bp, Staphylococcus aureus
  misc_feature (1)...(235): n = A,T,C or G
gaattgcaaaaccatcatanggtgatttatcaaaccttggtatatcataagtagctacaatatcttctgctaagatatgatttagacttttttcaagtgctaccgtaattgccggcattgaactctgctgattaacgatacgttgaattgcttctttaactgggattgggtttcttttttctactaccattaaaaatcatctccaaaacttttattttttcatgatatactagat

SEQ ID NO: 3346 - DNA, 156 bp, Staphylococcus aureus
tgtgtagcccaaatcataaggggcatgatgatttgacgtcatccccaccttcctccggtttgtcaccggcagtcaacttagagtgcccaacttaatgatggcaactaagcttaagggttgcgctcgttgcgggacttaacccaacatctcacgaca

SEQ ID NO: 3347 - DNA, 151 bp, Staphylococcus aureus; identical to SEQ ID NO: 1770

SEQ ID NO: 3348 - DNA, 166 bp, Staphylococcus aureus; identical to SEQ ID NO: 3017

SEQ ID NO: 3349 - DNA, 269 bp, Staphylococcus aureus
cacaagatttgtagcatctacttcaatcatcatccatgcatgtggaatctctgttacactattaaccatattttgcgcaattgctttacgcacaccatttactggtattgtgctgttttcactattgtcttcagatgattggttacttgatgtatctactgatgttgattttgtttgaacttgtttgtcagattgagctgtggtaccaccattttcaataactgacattatatccttcttagttacacgaccttcaaatccactaccta

SEQ ID NO: 3350 - DNA, 75 bp, Staphylococcus aureus; identical to SEQ ID NO: 2779

SEQ ID NO: 3351 - DNA, 215 bp, Staphylococcus aureus; identical to SEQ ID NO: 2148

SEQ ID NO: 3352 - DNA, 208 bp, Staphylococcus aureus
tacttgaatcttacaattcaattctctattcaaatgaccgaaatcaatagcttgtaaaatcgtgtatgtgaattctgtatatgaaataccatgttctaaacgactttggattgaatctttacctaacatgtaattaacgccgacgtgtttaccatagtcacgtaaaaaactaattaatgagatttgtcctaaccagtctctattatta

SEQ ID NO: 3353 - DNA, 705 bp, Staphylococcus aureus
  misc_feature (1)...(705): n = A,T,C or G
tatatggacaatgtcggatcactttttaaggcatctttaatcttcaatgttttaaccacggattcaggcaagacatcttctctaattaaataaaactttttataatctnnattgtccatcatgtttcgctcctattcaacgaattcaaattctccgccaagaattctaacgatatcaccatttttacaaccacgttctctaagcgcatcatcaatacccatcgaacgcatttgacgagcaaatcgacgtactgctggatcactgntaaagtcagtcattttaaacattctttcaatagcattaccacttaccacataagcaccatcatcatctcttgaaattgtaaattnatcttgtgacggtgtatgtttatataatactcggttaatgccaactgactcctcttcttcagactgtgaagtcnacatctttatattcttctaatttatctgctattgcatataataattgatcaatattatcacgcgttattgttgaaactggaataactgnnacatcttcgccaatttcttctaataaacaagtttaaattatcttgtgattcaggtaaatccatcttgttacgctactacgatttgaggtctatcttctaaacgttgctcgtacgcagctaantcttgattaatgactttataatcttcnataggntctctaccttcagaaccgctcatatcaatcatgtga

SEQ ID NO: 3354 - DNA, 86 bp, Staphylococcus aureus
atagcaacgtctcttgctgcttcttcgtcagttgaaccttcaacaactgttaatacaccaatgcgtccacccatgtgtaagtaagc

SEQ ID NO: 3355 - DNA, 182 bp, Staphylococcus aureus; identical to SEQ ID NO: 2990

SEQ ID NO: 3356 - DNA, 277 bp, Staphylococcus aureus; identical to SEQ ID NO: 1737

SEQ ID NO: 3357 - DNA, 360 bp, Staphylococcus aureus
gcttttttagcgtgaccttcagctggtttattagcatatttattagattttgcatcttttttgtatgcttttttgtcttcaaatccaacttggattgcgttgtatccatcaacttctacagttttcttttgtaatacaacattttctttagcttctactactgttacagggattaattcaccgttttctccgaatacttgtgtcatcccaatttttcttcctaagattcctttggtcatcgaaagtccacctcctaaaattgtctattataatttgatttcgatgtctacaccagatggtaagtttaagcccattaaagcgtcaactgtttttggtgttgggtttacaatatcgattaaa

SEQ ID NO: 3358 - DNA, 215 bp, Staphylococcus aureus; identical to SEQ ID NO: 2148

SEQ ID NO: 3359 - DNA, 485 bp, Staphylococcus aureus
taaaattttatgttgtaacataaattatttattttgctcttttaaatagtaagaaacaagctcttccataataacatctctatcaatatgacgaatttgatttcttgcttcattttggcgtggaatatacgcagggtcacctgataataaataacctacaatttggtttacggcattatatcctcgttcatctaatgttcgataaacattatttaaaacatctcttacatcttgcgttggaagttcttcatagtcgaatttcattgttttatcaaagttttccatttgcgacactcctttaattacaaatataactcactatcatcatacaatattatggctttaaattatagatttttaatgtaatctttaataaagcttaatgattttgagatattttcaggttgtgtaccgccaccttgagccatatctggacgaccgccacctttaccaccaacgattggtgccatttgtttgataagatc

SEQ ID NO: 3360 - DNA, 552 bp, Staphylococcus aureus; identical to SEQ ID NO: 2157

SEQ ID NO: 3361 - DNA, 119 bp, Staphylococcus aureus; identical to SEQ ID NO: 1715

SEQ ID NO: 3362 - DNA, 108 bp, Staphylococcus aureus
agtttcaagttctttttcatcacgagcaacacggataccttttccgccaccgccagcagtagctttaatgatgaccggatagccaatttttttggcgattttcttagc

SEQ ID NO: 3363 - DNA, 261 bp, Staphylococcus aureus
  misc_feature (1)...(261): n = A,T,C or G
gagacaaaatattcttagctctactactaaagtgtgatggcatttgttttccaccagagttaacatcgtctttctttccaaacgctgataaaaacgtatcatacagctgagatacccatataagtaacgaaagctagatctctataatanggcgctgtaatatcaccttcttctaatgcgtatgccatcccaatctgagttgcttcttgtccttgaccacttacaacaaatggaattttacctgcacggttcaataaccac

SEQ ID NO: 3364 - DNA, 245 bp, Staphylococcus aureus; identical to SEQ ID NO: 3088

SEQ ID NO: 3365 - DNA, 261 bp, Staphylococcus aureus
tcagcttcaaacaattctaataatgcggtcgcaagatcccctaccgttgagcttggtgctttttgaaccataatatctcctgtctctgcatgcttaaatgcatgaacaactagttctaccgcatcttctaagctcattaaaaatcttgtcatatcaggatctgtaatcgttaaaggttctccagctttgattttgtcgataaacaaaggtattactgatcctcttgaagccatcacattaccgtatcttgtaccacaaata

SEQ ID NO: 3366 - DNA, 290 bp, Staphylococcus aureus
aatgctgattaacgaatttcttggattctagcagctttaccacgtaaactacagtaagtaatataatttagcacgacgtacctttaccacgacagtttaacttcgattttttcaatttttggtgtgtgtaatgggaatgtacgttccacgccaacacctgatgaaattttacgaactgtaaacgtttcagaaacgccaccgccacgacgtttaattacaacgccttcgaatacttggatacgctcacgagtaccctcaatgatacgtacgtgtacacgtaaagtatcacc

SEQ ID NO: 3367 - DNA, 307 bp, Staphylococcus aureus; identical to SEQ ID NO: 2020

SEQ ID NO: 3368 - DNA, 163 bp, Staphylococcus aureus
taccaaataaagccttctgacacttcctttagaccgacgaccgtcttagctaatgtcgatttccctgaccctgattcaccgacaatgcctaatgtttcgccttttctaatagccaagttaatatcattaactgctcggtataggctgccactcggtgatgtgt

SEQ ID NO: 3369 - DNA, 292 bp, Staphylococcus aureus
ttctccacccatcaactgcgttaattcatcttgaactattttaataacttgttgccctggtgttaatgattgcattacatcggaacctaatgcgcgttctgatactgttttaataaattcttttaccactttaaagtttacgtcagcctcaagtaacgctaatcttacttcacgcatcattatctttatatcagcttcagtaagtttacccttaccacgcattttttgcatcgtcgcttgcaagcgttctgataacccttcaaatgccatatcgatgtcctccctcaattta

SEQ ID NO: 3370 - DNA, 256 bp, Staphylococcus aureus; identical to SEQ ID NO: 3239

SEQ ID NO: 3371 - DNA, 258 bp, Staphylococcus aureus
acagaaggttcagtgaatgggaagtaacttggacgtaaacgaatttcacgatcagcaccaaataatttcttagctaacaattctaaagtacctttcaaatcactcattttaacgtttttatcaacaactaatccttcgatttgtgtaaattgatgactatgtgtcgcatcatcagagtcacgacgatacactttaccagggcaaataattttaactggaccttgaccatgacgtgattccatcgtacgtgcctgcact

SEQ ID NO: 3372 - DNA, 170 bp, Staphylococcus aureus
taaatccaacttttaaaacgcccttcctcattaacgctcattaaacgcagccaatgattagacaccttcctagcgaaatgctcattattcgcgagtagtcttgctacaacatagtcgggtgcctgaataacgacaagtaaacgaattggcgaatgatacatcgtccgatc

SEQ ID NO: 3373 - DNA, 118 bp, Staphylococcus aureus
cttttacacgtccaccacgtacaagtacaacactgtgttcttgtaagttatgtccgataccagggatgtatgcgttaatttcgatgttgtttgataaacgcacacgtgcatatttacg

SEQ ID NO: 3374 - DNA, 165 bp, Staphylococcus aureus; identical to SEQ ID NO: 2715

SEQ ID NO: 3375 - DNA, 319 bp, Staphylococcus aureus; identical to SEQ ID NO: 2935

SEQ ID NO: 3376 - DNA, 264 bp, Staphylococcus aureus
atgattgtgtgcctcctttgataattttttcgctttaatttcgttaatttttattagaatggtaagtcatcatcacttatatcaatcggtccgtttgcatttgcaaatggattatcagattgtttcgtgtttgatgaattattgtacgaattgttttgtcctgattgttgaccaccgaatccttgaccgtaatcttggaattcattttgttgacgttggccaccattttgttgcgcatttttaggttcaaggaattgaacgcta

SEQ ID NO: 3377 - DNA, 218 bp, Staphylococcus aureus; identical to SEQ ID NO: 1907

SEQ ID NO: 3378 - DNA, 249 bp, Staphylococcus aureus
tatttttttaaaatatcctgtgtatgggaaatccactgtgctggcgttgcgataataatctcattaaattcactcactaaaatgaacttctcaattgtatggattaaaatcggtttattatcaatatctaaaaattgttttggtaatggcacgttccccattctcgaaccaatacctcctgctaaaatacctgcataaatcatgttgtcctccattctgtcattacatcatttccatttatacattact

SEQ ID NO: 3379 - DNA, 319 bp, Staphylococcus aureus; identical to SEQ ID NO: 2935

SEQ ID NO: 3380 - DNA, 235 bp, Staphylococcus aureus; identical to SEQ ID NO: 3179

SEQ ID NO: 3381 - DNA, 702 bp, Staphylococcus aureus
taaatggacaatgtcggatcactttttaaggcatctttaatcttcaatgttttaaccacggattcaggcaagacatcttctctaattaaataaaactttttataatctttattgtccatcatgtttcgctcctattcaacgaattcaaattctccgccaagaattctaacgatatcaccatttttacaaccacgttctctaagcgcatcatcaatacccatcgaacgcatttgacgagcaaatcgacgtactgctggatcactgttaaagtcagtcattttaaacattctttcaatagcattaccacttaccacataagcaccatcatcatctcttgaaattgtaaatttatcttgtgacggtgtatgtttatataatactcggttaatgccaactgactcctcttcttcaactgtgaagtcaacatctttatattcttctaatttatctgctattgcatataataattgatcaatattatcacgcgttattgttgaaactggaataactggcacatcttcgccaatttcttctttaaacaagtttaaattatcttgtgattcaggtaaatccatcttgttagctactacgatttgaggtctatcttctaaacgttgctcgtacgcagctaattcttgattaatgactttataatcttcaataggttctctaccttcagaaccgctcatatcaatcatgtga

SEQ ID NO: 3382 - DNA, 137 bp, Staphylococcus aureus
ccagacactagcgctggcatagcttcaggtaaaaggactttacgaattactgtccaagtattagcgcccattgaccaagccgcttcgatgacacctttatcaatttctttaaaagcaatttctacgagccttgcata

SEQ ID NO: 3383 - DNA, 265 bp, Staphylococcus aureus; identical to SEQ ID NO: 3292

SEQ ID NO: 3384 - DNA, 215 bp, Staphylococcus aureus
tcttccaaagcgatcacctaaaacatcttcaagtgataaatcttgaattatttcactcactagatttcctcctcatcaaattgatcattttcaagcacttgtacttcagaattatctaaaatactttggtcctcttgcataccaaactcaacatgcttttcaatccattcacgtctaggttgtactttgtcacccattaatgttgttacacgttt

SEQ ID NO: 3385 - DNA, 269 bp, Staphylococcus aureus; identical to SEQ ID NO: 3349

SEQ ID NO: 3386 - DNA, 166 bp, Staphylococcus aureus; identical to SEQ ID NO: 2846

SEQ ID NO: 3387 - DNA, 235 bp, Staphylococcus aureus; identical to SEQ ID NO: 3236

SEQ ID NO: 3388 - DNA, 180 bp, Staphylococcus aureus
aaataagttgattatattattttttcttacgtccacgaacgataagtttgtctgatgattttttaccacgacgagttttcttaccaagcgtaggtttaccccatggtgacattggagatggtctaccgataggagcacgaccttcaccaccaccgtgtgggtgatcgttagggttcatta

SEQ ID NO: 3389 - DNA, 258 bp, Staphylococcus aureus
tacaactctagaaggtataataaaaacgcgcaactaatgttacgcgtttgaattaatcatatgatattatttgcgatactttaatttagcgaaagcatcatgttgatggatagactcttcattacgacattcgatatcgaaaccgtctaaccaatcaaattcaactaagtccgcggcaattaaacgaattaagtcttcgacaaaacgtggattttcatatgcacgctctgtcacacgtttttcatcaggacgttttaa

SEQ ID NO: 3390 - DNA, 205 bp, Staphylococcus aureus; identical to SEQ ID NO: 1684

SEQ ID NO: 3391 - DNA, 263 bp, Staphylococcus aureus
tgtgcgtttagaaatttcataaattgtcttatctaaactaccttgattgtatgccatatctcgaatatcatcaactcctgggattgttcttccaggttcgatgtaatctgcaataaaaatcagtttttcagtttttgtcatttgttgacgtccagtagtatggtatttgatagccattaatacttcctcatcattgataccatattcatgttccatgattgctgcacacacagggccatgcaatatttcactaccataactca

SEQ ID NO: 3392 - DNA, 180 bp, Staphylococcus aureus; identical to SEQ ID NO: 2778

SEQ ID NO: 3393 - DNA, 108 bp, Staphylococcus aureus; identical to SEQ ID NO: 2481

SEQ ID NO: 3394 - DNA, 186 bp, Staphylococcus aureus; identical to SEQ ID NO: 2655

SEQ ID NO: 3395 - DNA, 256 bp, Staphylococcus aureus
gaatacgaatgtaattcattctgattttaccacttacgtgagctaaaatctcatgaccattttctaattctactttaaacattgcgttcggtaaagtatctaatacagtaccttctaattcaattacatcttgtttagccattgattaacttccccctttttgcaatagtaaggtaatcgtcaatagacaactttattgttacgaatctatcagtgattaattttataagttaaacaaaaattacgggaattaatt

SEQ ID NO: 3396 - DNA, 176 bp, Staphylococcus aureus
tgatcttttgtaagaattgtgcacggataatgcaaccttctctccaaatcatagctaaatcaccaagttttaaattccattcattatcttcacttgctttacgcatttgcgcgaaaccttgtgcataagaacaaattttactcatatataatgctttacgaattttttctaaaaag

SEQ ID NO: 3397 - DNA, 330 bp, Staphylococcus aureus; identical to SEQ ID NO: 1836

SEQ ID NO: 3398 - DNA, 330 bp, Staphylococcus aureus; identical to SEQ ID NO: 1836

SEQ ID NO: 3399 - DNA, 193 bp, Staphylococcus aureus; identical to SEQ ID NO: 2541

SEQ ID NO: 3400 - DNA, 144 bp, Staphylococcus aureus; identical to SEQ ID NO: 1905

SEQ ID NO: 3401 - DNA, 253 bp, Staphylococcus aureus
tcgttgttttagactcatcagctaaaataacatcgtattgatgatcatgagctaaagcattaatgatttcttcattgacgtctgcaaatgttacctttaacattgttgtctgcaagaatataaccaatgaaaccacgacctatgttaccagcaccaaagtgaactgctttcattatgcatctgcctcctcgaatacttgtttaatttcttctgcagattttgcttgaacgatacgatccacattttcttcttc

SEQ ID NO: 3402 - DNA, 330 bp, Staphylococcus aureus; identical to SEQ ID NO: 1836

SEQ ID NO: 3403 - DNA, 171 bp, Staphylococcus aureus
tctgaagcgagtttaaatacaacaggtgaaaagcgaccattattacgtggttgattttgtttagcagtagatgtctgttccactgttgcactagcttttttagtagatttctgagtatgctcatccacttttgcttgtatctcttcagttgtttcatttgtcttttcatca

SEQ ID NO: 3404 - DNA, 113 bp, Staphylococcus aureus
tcctcataacgatagcctcgtaagtcaagttcagttttaattgtttgacgattttgacgtgtaaccattttcgttggcttaactttttctttttgttttttctctaaatcttc

SEQ ID NO: 3405 - DNA, 121 bp, Staphylococcus aureus
taaatatggatgatattcaacttgattaattacaggtttaattgacacttgtgccaacaaagcttccaaatgttcaggttcaaaattgctgacacctatatttttaacattattattttta

SEQ ID NO: 3406 - DNA, 164 bp, Staphylococcus aureus
gccgatacacgctctccagtattacagtgcttgtccattgaccactttcgcaaaataatcatcatctcttaacaagaaataaaatgctttattgtccttattcacagcataatcatgacttaacgaacctttcgttgttaaatgatcattttcatctaataata

SEQ ID NO: 3407 - DNA, 564 bp, Staphylococcus aureus
tctatcacatgtacagtttcttcaccgaaaagatcttttgctttttgagcaatatctgtttgttgtgcttgttgctttggcatatcatcgccttcgtttttacgattttgtaaatattccgttcgaactctttgccattgatctgatggtacaccaacaactttaacgtttttattaacgatattacatacaacactttctatactactacgtttctcgtcgtctttattgacgatttcacaatggatctcttcctcaaatttcacaagtacgtgatcttcacttgccgccacaggttccgaattttgcaataaactaacgagtgattttttatcattatttttggcatgatcaatcacttcttgccaatgatctttcaacaatttgatatctgccttattcgctttatctagcacttttgcaatttgttgcattgaaaatgcatttttagatttttgtatgcctctcgcaggctttttcgaagatttttgaacaggagcgacactcactccttgtgcttttagtgtttttagttcttgctctaactgttccatacgttgcaac

SEQ ID NO: 3408 - DNA, 279 bp, Staphylococcus aureus
tgtgatagaagagttgaaccaaccacgatattggtcactaccttctaaatacatatccgctgggaaacttaattccggtcttgtttccaacacgccacggtgtgatgaaccagaatcaaaccaaacgtccataatgtctgtttctttagtaaatgtaccgttagggctgcctggatgtgtaaatccttctggtagtaagtctttcgcttctctttcaaaccaaatatttgaaccgtgttctgcaaataaatcagcaacatgattcactgtttctttcgt

SEQ ID NO: 3409 - DNA, 183 bp, Staphylococcus aureus
cattttcgcagcttcactaataatttgatttgtcgcaggtaaaataaaatctgcaaattgaatttctgcaattggtcttttacctaccatagctgcaccaatggcagttccaacaatatttgactcagctaatggcgtatcgataactctgtcttcaccatatttttgttgcagtccttgagt

SEQ ID NO: 3410 - DNA, 226 bp, Staphylococcus aureus
tcatcatattctaataatggccaatctgtcacccataagaagtttaattttgtttcatcgattaaacctaattctttagctaatttgacacgtaatgcacctaaactttgtgcaacgacatttggtttgtctgcaacaaacattactaagtcaccagcttcagcaccagttaatgtaagtaatgtttcaacattttctgtttcaaagaaacgtccaattggacctg

SEQ ID NO: 3411 - DNA, 447 bp, Staphylococcus aureus
caaataactgaacgatctctttgcttatcttcacaaatataacatggatcattttcagtaatgtgaccacatacgctacaatatgttaattctctcttaacatctactaatgctttggcaaactgaacaacatcgtcttctttcatatctaaggtatgaaaagccagacgttgggctgtctttggaccaatgcctggcaatttcataaagctatcaataagttttgatataggttctggataatgcatctatgatcacattccagggatgtttaagccttgagtatgtttacctaaacgttcttgagtaagctcatcagctttattcatcgcttcattagtagctgctaacactaagtcttgtagcatttcaatatcgtctgggtctacagcttcttctttgatttcaacgtcgacaacttctttatgaccagttacagtaactgca

SEQ ID NO: 3412 - DNA, 180 bp, Staphylococcus aureus
aacctcttttgttctaaagaagttcacaagggtttgaatcattagatcacctcgtgtgctccacctttagcatcaatagcttctgctgctgaagctgagaatttatgagctttcactgtcaatttcttatcaagtgaaccattacctagtattttgataccagatttttcattcttaaca

SEQ ID NO: 3413 - DNA, 443 bp, Staphylococcus aureus; identical to SEQ ID NO: 3071

SEQ ID NO: 3414 - DNA, 564 bp, Staphylococcus aureus
tctatcacatgtacagtttcttcaccgaaaagatcttttgctttttgagcaatatctgtttgttgtgcttgttgctttggcatatcatcgccttcgtttttacgattttgtaaatattccgttcgaactctttgccattgatctgatggtacaccaacaactttaacgtttttattaacgatattacatacaacactttctatactactacgtttctcgtcgtctttattgacgatttcacaatggatctcttcctcaaatttcacaagtacgtgatcttcacttgccgccacaggttccgaattttgcaataaactaacgagtgattttttatcattatttttggcatgatcaatcacttcttgccaatgatctttcaacaatttgatatctgccttattcgctttatctagcacttttgcaatttgttgcattgaaaatgcatttttagatttttgtatgcctctcgcaggctttttcgaagatttttgaacaggagcgacactcactccttgtgcttttagagtttttagttcttgctctaactgttccatacgttgcaac

SEQ ID NO: 3415 - DNA, 350 bp, Staphylococcus aureus
tcataatctaatgataagccatgaatctcagcatataattcaacaatacctttaattactgtcgtttttcctgttcccggtccaccggttaatagcatcaccttagaattgatagccgtttgcaaagcttctttttgtgaagctgcatagttcacttgattcgcatcttctatttcaccaatatgcatttgtaaatctgactgttcaatttctgtaagtttatttgtatgcgtctttattctgaataagttttgaacacttttgatttcagaataatacaaacttggaattgcaacttgttcattgtcaataattagtcgtttttcctcatttaagtattgcaacatttc

SEQ ID NO: 3416 - DNA, 190 bp, Staphylococcus aureus
tgcgattggatctgtcattgtcattgattgttgcctcctttcagactcttttttattaccagctagctttacgaacgccagggatttggcctttgtaagctaattcacggaaacaaatacggcataatttaaatttacgatatacagaatgtggacggccacaacgttcacaacgagtgtattcacgaac

SEQ ID NO: 3417 - DNA, 192 bp, Staphylococcus aureus; identical to SEQ ID NO: 2912

SEQ ID NO: 3418 - DNA, 127 bp, Staphylococcus aureus
gtcattgattttgttgagctaacttttaagtgtttagctgcttcaccaaatgtatttttaatagctttaacttcatttaagtcaccaacaggagtacttgtaccatgggcatttaagtattgtacat

SEQ ID NO: 3419 - DNA, 437 bp, Staphylococcus aureus
gcattagtgatatctaaaacatttaaaccttgagcagttgtcacttgaacgccagggatgttgcgtgctgataattcaacatttacatcttcgttttcagtaactactaatacttttttaggttgttctaatgtagataatacatttttgaattctttagtttttggagcttcgaagttgaatgcgtcaactacagttaagccattctcttgagctttgaaagataatgctgagcgtaaagctaaacgacgcattttcttaggcattttgtatgcataacttcttggagttggtccgaatacgataccacctgccacgccattgtggagcacggattgtaccttgacgagcacgacctgttcctttttgcttccatggtttacgtccgccaccgcttactgctgaacgattcttaacagcatgcgtaccttgacgta

SEQ ID NO: 3420 - DNA, 196 bp, Staphylococcus aureus; identical to SEQ ID NO: 2765

SEQ ID NO: 3421 - DNA, 229 bp, Staphylococcus aureus; identical to SEQ ID NO: 2214

SEQ ID NO: 3422 - DNA, 121 bp, Staphylococcus aureus
gttcataaaaagcaacttgcgtaacgtcttcaccaatatcaatgacacatgcacctaactctttttcagtagctgttaggattgaaccatagttatatgcatcagagtaaacatctaatac

SEQ ID NO: 3423 - DNA, 218 bp, Staphylococcus aureus
acttgttggcatcgtggacatagatgcgtcaattcatcaacagcaccaagatcctctgaatagttccaacatctttcacatttttcaccatctgcatgttcgatgacaatatcaccatgttcataagctgttgcctgatcgtctaacttatctacaactttaacttgtgacacgataaataattgatgtaatgcatcaaatgaagttaagaattcaga

SEQ ID NO: 3424 - DNA, 121 bp, Staphylococcus aureus
aactgtttttaaaccatgctccatagctgatttagatgcagtttcagaagccatttgtgctgcaaatggtgttgattttttagatcctttgaatcctaatgcaccagctgatgaccatgat

SEQ ID NO: 3425 - DNA, 278 bp, Staphylococcus aureus
caacatttccaccttcgatgacttcaatgattggcaaatcaaactttttagcaaattcataatctctgtcatcatgcgctggtacctgccataattgctccagtaccatatgttgataatacataatcagcaatccaaatttgtactttttcaccagataaaggattagttgcatatgcaccagtaaatacacctgatttatcttttgctaaatctgtacgttctaaatctgactttttagaagcttctgtttgataagcttttactttttctttata

SEQ ID NO: 3426 - DNA, 269 bp, Staphylococcus aureus
tcactttcacgtacatatacaaacccacgagattgaatttcaggtcccgcagctatacgtctatttttaggatctaacagttacaacagcaataaagataccatcttctgctaaaagatgacggtctctcaacacgatatttcctacatccccaataccaatgccatctattaaaatatttcctgaatttaccttttcatttaatatcatatctttaccgttgtagattaatgacatctcctttttccacaaggaaaatcttttctggt

SEQ ID NO: 3427 - DNA, 268 bp, Staphylococcus aureus
tacaaatgaatctttgccgacgatagttttaaatttattttcaccatcatagttaactgtaatcgttccgcaaccaatattagtacgttcgccaattacagcatcgccaatataacttaaatgtgaaaccttggcaccatctttaagatctgcttttttaatttctacaaaatttccaaccttaacatctgcacctaattgcgcgcctggtctcaattgcgcaaacggtccgaccttagtattcgctcctacgctagcatcattaaca

SEQ ID NO: 3428 - DNA, 511 bp, Staphylococcus aureus
  misc_feature (1)...(511): n = A,T,C or G
catactgctttattttcaaaaaatcaaatgctcatttacaaaagtaaactccgctttaatttttcttaatgcattgtctaacaaccgctttctttaaaaagaatagattgtcaagcgctcgcataagcaatatcacctttaaccaaaaaatatttgaatgttaaataaacattcaaaactgaatacaatatgtcacgttattccgcatcttctgaagaagatgttccgaatatatccttanaaaggaggtgatccagccgcaccttccgatacggctaccttgttacgacttcaccccaatcatttgtcccaccttcgacggctagctcctaaaaggttactccaccggcttcgggtgttacaaactctcgtggtgtgacgggcggtgtgtacaagacccgggaacgtattcaccgtagcatgctgatctacgattactagcgattccagcttcatgtagtcgagttgcagactacantccgaactgagaacanctttatgggatttgctt

SEQ ID NO: 3429 - DNA, 143 bp, Staphylococcus aureus; identical to SEQ ID NO: 2490

SEQ ID NO: 3430 - DNA, 267 bp, Staphylococcus aureus; identical to SEQ ID NO: 2153

SEQ ID NO: 3431 - DNA, 160 bp, Staphylococcus aureus; identical to SEQ ID NO: 2323

SEQ ID NO: 3432 - DNA, 262 bp, Staphylococcus aureus; identical to SEQ ID NO: 1869

SEQ ID NO: 3433 - DNA, 118 bp, Staphylococcus aureus
tttatttttgtctcatataagggaataataatacgtctctgattgatggagagtcagttaataacataaccaatctgtcaataccgataccaagaccacctgtcggaggcataccata

SEQ ID NO: 3434 - DNA, 288 bp, Staphylococcus aureus
gcaattcatctttatcacgttgtttattcgcaatatccttttcgattgcagtaagttcaaattctttatttttaatttcattttcttgttgattcaaactaatgaaggcgtcaatatcagattgtttaactggctctaattgagtcgcttcttctttaagttgagctaaacgctcatttcttaaaccaatatctctttctaacgattgcttatgcgctcgtgctttttcgtaacgatccacacctttttctgggaatgtgattggctcaatatttaactgttgttcta

SEQ ID NO: 3435 - DNA, 330 bp, Staphylococcus aureus
ctcagaccaacgcttaatggcgtgcttttcaaactcattatggcacttatagcatggatagtatttattacaacatttaaatttaatagcaataatatcttcttcggtaaaataatggcgacagcgtgtttcagtatcgattaatgaaccataaactttaggcatagacaaagctccttaacttacgattcctttggatgttcaccaataatgcgaacttcacgatttaattcaatgccaaatttttctttgacggtcttttgtacataatgaataaggttttcataatctgtagcagttccattgtctacatttaccataaaaccagcg

SEQ ID NO: 3436 - DNA, 193 bp, Staphylococcus aureus
ttcagcaacctcacttcgaaatgtatcgactgaaatttttacatcaaaaccgacaatagcttcaacaacaggtaatactctgttcatctcttcttctaatgaaaccatttcatgaccgggtctcgttgaaacacctccaacatctataatgtcagcaccttcatctatcatggctttcactctatttatagct

SEQ ID NO: 3437 - DNA, 366 bp, Staphylococcus aureus
tcttctttagatgatgaatcatcatcatgacctttaaattgcatatcttctgcatcaggtgcatcgattttaacaataacgtcaccaactacagctactgtaccttcttctaccataacttcttctacagtaccagatgctggtgatgggatttctactactgatttatcgttttgtacctcagctaaaacatcgtcttcttcaatagtatctccagctttaacaaaccattttacaatttcaccttcgtggataccttccccgatatcgggtaatctaaattcaaatgccacgtttttgccctcctaagatttcgtaaattaaacatttcattttaatcaatgagactaaaatacgctaacttcg

SEQ ID NO: 3438 - DNA, 364 bp, Staphylococcus aureus
tggagaatctgtgttagaaactttcaaagatacatctgtttctaattgttgatttaaacgttcttgaatttgacgtgctgttacaaagtcaccttcacggccagcaaatggagaattgttaactttaaatgtcatttcaagagtaggctcatcaatacgtagaactggcaatgcttcttgatggtcatgtggtgttacagtttcaccaacattaatgtcttccatacctgaaacagcaattaaatctccagcttgtgcttcttcaatttctaaacgttttaatccaaagtaaccaaagattttagttacacggaagtttttcactgtaccgtctaatttaattagtgatacattatctccgaca

SEQ ID NO: 3439 - DNA, 331 bp, Staphylococcus aureus
agctgaagttaactcaacgtcaaattcagttttttctgctgcagcgtcagcgccaccagctgcacctgctactgctactggagcagctgcagttacaccaaattcttcttcaattgcttttactaagtcgtttaattctaatactgacatttctttaatcgcttcaatgatttgttcatgattagccattttataattcctccattatttttaatttttttacgctaaaaattattcagcgttttcttctttttgttctccaatagctttaaccgcataagcgaagttgcgtacaggagcttgtaatactgataaaagcatagatacaaga

SEQ ID NO: 3440 - DNA, 221 bp, Staphylococcus aureus
tgggtgatttgagtgacggtagtaaactttgtcagtttctttgttaccagtaaattcgatttttgatgcattaataacgattacataatcaccagtatcaacgtgtggtgtgtaagttactttatttttaccgcgtaagatagatgctacttctgatgataaacgacctaatgtttggccttcagcatcgataacataccatttgcgctcaatgtttgatt

SEQ ID NO: 3441 - DNA, 423 bp, Staphylococcus aureus; identical to SEQ ID NO: 2062

SEQ ID NO: 3442 - DNA, 224 bp, Staphylococcus aureus
gttcaaagtatttcttttcttcatctgtaatcaagcttgacgcagttactggttgtggcatcgttccatcattcatacctactaagtaaacatgttgcttattatcgactttagccaaatccatcgtaccaatacttacttggtccaatgtttgcggaatcataacaaattctaattgttctaaaccaatatcaaatacttctaagaaacgttccatcgacatt

SEQ ID NO: 3443 - DNA, 170 bp, Staphylococcus aureus; identical to SEQ ID NO: 2740

SEQ ID NO: 3444 - DNA, 194 bp, Staphylococcus aureus
cctgcgcttaatgcgtagttgcctcctgatccaatagcgataaggtcatcatctggagcaataacttcgccagttccactgacaactaaaatagcatctttatccattacaattagcatagcttctaattgacgtaattgtttatcgcctcgccattcttgtgccaattcaacagcagctctttctaagttacc

SEQ ID NO: 3445 - DNA, 213 bp, Staphylococcus aureus; identical to SEQ ID NO: 2105

SEQ ID NO: 3446 - DNA, 98 bp, Staphylococcus aureus; identical to SEQ ID NO: 2651

SEQ ID NO: 3447 - DNA, 213 bp, Staphylococcus aureus; identical to SEQ ID NO: 2105

SEQ ID NO: 3448 - DNA, 185 bp, Staphylococcus aureus; identical to SEQ ID NO: 2067

SEQ ID NO: 3449 - DNA, 267 bp, Staphylococcus aureus; identical to SEQ ID NO: 2153

SEQ ID NO: 3450 - DNA, 181 bp, Staphylococcus aureus
tatttcattttcatgatgtggaaattgtaaatctgaaccacccgcatgtatatcaattgtaggtcctagctcatgaaatgccattacagaacattctatatgccatcctggtctaccttcaccaaatgggctatcccaactaatctcgccaggcttcgcttttttccacaatgtaaaatca

SEQ ID NO: 3451 - DNA, 287 bp, Staphylococcus aureus; identical to SEQ ID NO: 2746

SEQ ID NO: 3452 - DNA, 364 bp, Staphylococcus aureus
caatctgatttttaatatctctagccaatcgataagattttaaatcatcaatttcttcaggagatacaatcactcggatttctctacctgcctgaatcgcaaatgctttttctacaccatcataactttctgataacgtttctaaacgttctaatcgacgaatataattctctaatgtttcttttcttgcacctggacgagccgcagacaatgcatctgcagcagcaacaaggatagatataatagatgtaggttcaacatcaccatgatgagaatggattgcattaataactgtttcattttcaccatattttttcgctaattctacaccgatttcaacatgactaccttctacttcatgatc

SEQ ID NO: 3453 - DNA, 368 bp, Staphylococcus aureus; identical to SEQ ID NO: 3037

SEQ ID NO: 3454 - DNA, 257 bp, Staphylococcus aureus; identical to SEQ ID NO: 2875

SEQ ID NO: 3455 - DNA, 661 bp, Staphylococcus aureus
  misc_feature (1)...(661): n = A,T,C or G
agcagctgctccaccagcaatttggtgcatcataggtgtttctacttccaagaaacctttattatttaaataattacgcatttcttgaatgattttactacgattaataaatgtacgagtgctatcttcgttcgtaattaaatctaaatatctttgacgatatctctgttcaatatcctgtaaaccgtggaatttatccggtaatggtcgcaatgatttagttagtagcgtgaatttcttcgctttaaccgataattcgccagtatttgttttgaacattacaccttcaacaccaacgatatcgcctaaatcagcatttttccataaatcaaattcgtcatcgccaacttgatctttacgaacgtaaatttgaatttgtccagctaagtcctgaacgtgtgcaaatcctgctttacctttaccacgcttagtcattaatcgtccagctatagcgacatgactatccgcttctttttctaccaattcttctttagaatactggtcccactcttctttcaaatcactagataaacctgaacggtcaaatttagaaccaaacgggtctataccaagatcatataattcttgtaatttttgacgtcgaaccaacatttggtcattcatttcttctgacataactttntntcctttaacttgttgt

SEQ ID NO: 3456 - DNA, 216 bp, Staphylococcus aureus
gggtcaataccttgccaccatagatgactaggatctaagttagcaccgatatattcatttgtagcctcacgtaacttcaacattgtatatggtgtatgcactaaaaatcctgcatgcaactctatggcaatttttacatcttgctcttttgcaaactcagctaaatcttgccaatatggtatcaacttttcattccactgataatcataaatttca

SEQ ID NO: 3457 - DNA, 340 bp, Staphylococcus aureus
tttaattatattagactattcagcttctctaatttcttctgccacatctttatagtctattttcgctttaacaaacgtctcgttatttaccgggaaatgttgttggaatgtttcaaagttttgtatctcaacgacaacgtcatccacttcaaagtcaagaacatgtccaccataagctctttcatcatccgcaaaatgtatatgaaaaccagcagaccctacgccatgaaataattctggtgtaaaaaatccaacaatggcaccacgaatatcttgtcttttttcctcaggttgtctgcgtgctgaatcaatcaaacgtgtatatggcggttgctgagca

SEQ ID NO: 3458 - DNA, 259 bp, Staphylococcus aureus
aaatacgatacgtggaacaccataagttgtagcctgacgccaaactgtttcagtttgaggttcaacacctgattgtgcatcaagtactgtaactgctccgtcaagtacacgtaatgaacgttcaacttctacagtgaagtctacgtgtccaggtgtatcgataatgtttacacggtgaccttcccaagctgctgttgttgcagcagatgtgatagtaataccacggtcttgttcttgctccatccagtccatttgtgaa

SEQ ID NO: 3459 - DNA, 216 bp, Staphylococcus aureus; identical to SEQ ID NO: 3456

SEQ ID NO: 3460 - DNA, 410 bp, Staphylococcus aureus
tgacgtctaatttcgtcagaattatcttgtctagaaggtctatgtttctgctccaccggttctgctttaggcactgtgattggtttctctgtcatcggttttgtttcttgttgttttttaggtgccataggttctacaacaggtttcgatttaggctcttcctttggaagttcatcgaataaaggtggtaacgtatcatcatattttcgtttcgatgatttcttttcttcttcatttaattcttcacttatttctttaaacgttcgctcaatttcttcaaaaaagccacctttttttggttcattatcggtagatgttttttgaggtggcttttgattttgtctatctttatgactattttcgcgcatagtagtaatgatagaaatgatcactgatatgacaaaaattag

SEQ ID NO: 3461 - DNA, 190 bp, Staphylococcus aureus
tctaatttttcttcttcaattttcttctgcaaaattgccattcgagtttcataatctggtggcgtaatatcaacaattagcccccattcaaagcgtgaacgtaatcggtcttctaattgtgcaatttcctttggtggtcgatcactcgaaataactatttgcttgttattctgatgcaattcattaaaag

SEQ ID NO: 3462 - DNA, 180 bp, Staphylococcus aureus; identical to SEQ ID NO: 3388

SEQ ID NO: 3463 - DNA, 181 bp, Staphylococcus aureus; identical to SEQ ID NO: 2612

SEQ ID NO: 3464 - DNA, 189 bp, Staphylococcus aureus
agaagataattgcaagtattagtaaaagtatcggattgactcccaagacgacacctgcactagttgcaacagctttgccaccttggaattttaaataaacaggataaacgtgtccaagtatagcgaataagccaacaattaaaccatttgtaaaaaaagtactaatagggccatctgcgtgaacttgta

SEQ ID NO: 3465 - DNA, 218 bp, Staphylococcus aureus; identical to SEQ ID NO: 2416

SEQ ID NO: 3466 - DNA, 369 bp, Staphylococcus aureus
tgtgcttgatcaggacgatggtgtcttgcaacatcgaaaataatgttgtgtaagaacgttgttctaccatatcctggacttccgattaacgcgatgtgcccagcttttttcaattgcaataccatcggtccttgatattgttcttctggtacgtctttaagtcctaatgttaattccacttcttttgcatcatctgaccataattttctgaaatctgtttctactaaatcttcttgatatacattttctggcaatggtggtagccatggacgcttaacttcttcgatttctaatcgtgttgtaatagattcgatatgatctatgaccgcttctaactcagtttgattttctttcgtttcttcatcttca

SEQ ID NO: 3467 - DNA, 369 bp, Staphylococcus aureus; identical to SEQ ID NO: 3466

SEQ ID NO: 3468 - DNA, 122 bp, Staphylococcus aureus; identical to SEQ ID NO: 2326

SEQ ID NO: 3469 - DNA, 410 bp, Staphylococcus aureus; identical to SEQ ID NO: 3460

SEQ ID NO: 3470 - DNA, 247 bp, Staphylococcus aureus
ttgttctaaagaagttcacaagggtttgaatcattagatcacctcgtgtgctccacctttagcatcaatagcttctgctgctgaagctgagaatttatgagctttcactgtcaatttcttatcaagtgaaccattacctagtattttgataccagatttttcattcttaacaacaccagattctactaataaagctggagttacttcagtaccatcttcaaatttattaagttggtctaagttaaca

SEQ ID NO: 3471 - DNA, 157 bp, Staphylococcus aureus
atttactaaacttgatttacctacgtttggtcgtccaataatggatagtcgaattgtatcttcatcataaggatcttcttcctcttcaccaaaatgagaaacaactgcatctaacaagtcaccaagacctaaaccatgtgaccctgatatcggatac

SEQ ID NO: 3472 - DNA, 173 bp, Staphylococcus aureus
ccttcgaatacttggatacgctcacgagtaccctcaatgatacgtacgtgtacacgtaaagtatcaccaggacggaaacttggtaagtctgtacgtaattgtgatttagttactgcttcgattaatttgtgatttgtcattataaattctcctcttcaacctatgttcttgcc

SEQ ID NO: 3473 - DNA, 173 bp, Staphylococcus aureus; identical to SEQ ID NO: 3472

SEQ ID NO: 3474 - DNA, 174 bp, Staphylococcus aureus
tcgttatagataatttcacgttgtttacgtaatacttcatcgtattctaagatacgtttacgcgcgtcgaagttattaccttctacacgtttttgtgctgattctacagctcttgataccatttttgattcaattggtgtagagtcatctaaacctagtcggctcatcattttc

SEQ ID NO: 3475 - DNA, 172 bp, Staphylococcus aureus
ctactgttacagggattaattcaccgttttctccgaatacttgtgtcatcccaatttttcttcctaagattcctttggtcatcgaaagtccacctcctaaaattgtctattataatttgatttcgatgtctacaccagatggtaagtttaagcccattaaagcgtcaactgt

SEQ ID NO: 3476 - DNA, 187 bp, Staphylococcus aureus
atgccgatgactacatcatatccattgtcttttaagttttgtgcatgcgcgtgaccttgtgatccataacctactactgcaatttttttgccttgtaaagcgtccgtttttacatcttgatcataataaactgttgtcataataaattcctccaaataattaaatattttgtgtttcgaaaattctg

SEQ ID NO: 3477 - DNA, 210 bp, Staphylococcus aureus
ttaacatggatttgtaacgcttgtgcctcaagtaattcaactgcttccaaagccttttctactggtacgtccgcaccaacattgctaaaaatcatgccttcaggattcatttttcgcgcaatcgtaaacgtctcagccatgcgtggatttctcaatgccgcatgtgttgatccaactgccatcgctaagccagtttctcttgcaactaca

SEQ ID NO: 3478 - DNA, 278 bp, Staphylococcus aureus
cgcctgtgtttaacactttacctgcagcgttaatacctgccatcaatccttgtcctgctgcttcttcataaccagatgtaccattaatttgacctgcagtatataagtttttaatcattttcgtttcaagtgtaggccataactgcgttggcacaatcgcatcatattcaattgcgtagccggcacgcatcatatctgctttttcaagacctggtatcgtctctaacatttgacgttgcacatgttcaggaagacttgtagacaatccttgcacatat

SEQ ID NO: 3479 - DNA, 434 bp, Staphylococcus aureus
caaaccaaaccgctaaatgcctctgtttaataaacagtatgattgtgacgataatggaaatcaacacgacacctttgacatctccaatttccgcactaaacgtcatatagtaattaaacaaattgttaacatactgacgttgtggctcaccgaaataatctgtaaaccatgttaatgatcccatatctatatttttaagccattcttgatttgtcactacactgtaaaacatacctataaatacaatcagcgcgattaaaaataaaggcactgtcattttcggtgatgttaattttttatctatcatcttacaatctcctcgtatcatcattttcattttacaaatgttatccataatatcaatgtgccacaaatttcactttaccgacaatatcaaaattataaagttcatattgttatgtatattgcaaata

SEQ ID NO: 3480 - DNA, 120 bp, Staphylococcus aureus
caatcataactgaaccctaattctttaatttgtcgtttaaaagtttggatatttttctttgtaaattcacgtgggtcgttgccagtgtctaaagcatattgctctgctggtaatccgaat

SEQ ID NO: 3481 - DNA, 259 bp, Staphylococcus aureus
cactatcatcatacaatattatggctttaaattatagatttttaatgtaatctttaataaagcttaatgattttgagatattttcaggttgtgtaccgccaccttgagccatatctggacgaccgccacctttaccaccaacgattggtgccatttgtttgataagatcaccggctttaacgttatttgttaaagatttagggacagttgcaaccatcgatactttatcatcaacattacttgcaagaatgataattgt

SEQ ID NO: 3482 - DNA, 173 bp, Staphylococcus aureus
tctttaccaggcttgttgttgtcttctttaccaggcttgttgttgtcttctttgccaggcttgttattgtcttctttgccaggcttgttattgtcttcctcttttggtgcttgagcatcgtttagctttttagcttctgctaaaatttctttgctcactgaaggatcgtcttt

SEQ ID NO: 3483 - DNA, 235 bp, Staphylococcus aureus
agcagcctttgtcgctttattgatgatgtctttatgctccgcttctatttctgccaaccaagcatcatcgataatgccagctgaaagcaactcttttttgaacttttcattgcagtctgcttttttaagcgtttcacgctcttctttcgtacgatattggtcgtcatcatctgatgaatgagctgtcatacgacttgttactgcttcaatcaaagttgaaccttgaccagaaata

SEQ ID NO: 3484 - DNA, 241 bp, Staphylococcus aureus
cgtccatccgcagcagcgaatttttgacgtccagtgtagaatggatgtgaatcagatgaaatatctaaacgaataactgggtattcttttccatcttcccactccatcatttctgaagatgtttttgtagaaccgcttaagaatttgaagtttgtagtagtatctaaaaagattacttggtgatactcaggatgaattccttgtttcattattttcagctcctttgccctgaaccatctgg

SEQ ID NO: 3485 - DNA, 795 bp, Staphylococcus aureus
tatttttctgatgaaccaccagagaaataattcacttcatatgcatttgcaaaataaacagccagaagcaaggtttagaattgggccgtccgttttgctcaattcacttgcattcaataattcatgctgatcatgatcaatttgcttatctaattctgcaattttcttcatttgcttatctgatttgttttctttcgccatcatttgatcacgacgattttctttgtcattcaattcctgttgcaactttaacacatattcatcaaggtcaatatatgctaatggtactaatactttatctccatatgtgtcaataaagttataaaaataatcatctgtttttgatacaaatccagcacgctcttcagtttcacgatataaatctaagaaaagattgaactcatcacgttcaaggaatctgactttaacaccatagtttatcgctttattaatattacgtttacgttgactatcaaatgtctttttcaatgtttcgggtgttttaccttcaaggtttaatacgcccatccatcgtacttggctcgatgtatcatactcagttgtaaagccatgatgctcgtaaccatgtgatttaaacaagtttactagggcatcatttttctcgcgaccttcaaatggcacgatatctttatcatatagatgatataaccaatacggatctaatttaacatataaacattgatgttgctgtaaatatttatctaactcttttaaataataatcaactaatcctaaatctgaaaaatccattactggaccacgattcgaatagta

SEQ ID NO: 3486 - DNA, 111 bp, Staphylococcus aureus
tccttcgattgttttattcggacttattactggccaaagcttatgtttacccatcattttaccaaacaagtaagcccctgtatctgtaagccaaacaattaaaaagtttaa

SEQ ID NO: 3487 - DNA, 180 bp, Staphylococcus aureus
taatttaggacttgggatagttaattgaatgtcattgactttgcattgatccgctaaagattgacgtaatcctttattactcgccacgccaccagcaacaattaatcgctgaacaccatattctttacaagcttgaatagctttaaacgtgagcacctctacaacactgttttgaaagct

SEQ ID NO: 3488 - DNA, 192 bp, Staphylococcus aureus; identical to SEQ ID NO: 2912

SEQ ID NO: 3489 - DNA, 551 bp, Staphylococcus aureus
gcacttggttataaaatgccgctaaaccacctgcaaatgtcgtcatcgtatcaccatgtacaagtaccatgtctggtttttctaattgaatcacttgttctaattgagtgattgatttagaagttatctcagaaagtgtctgtcctgatttcataatattcaaatcgtattttggtttgatttcaaaggtacttaatactgaatcaagcatttctctatgctgtgctgtaacaacaacaattggctcgagcattttttcttgttccaaagctttaactaaaggagccatctttatggcttcgggtcttgttccaaatatggtcataatctttttcatcaaactacttatctccgattcttctatttagtaccaaacaatctatctccagcgtcgcctaaccctggtgtgatatatgctttgtcatttagcttttcatcaagtgcagcaatataaatatctacatctggatgtgcttcatgcatcttttctacgccttctggtgctgcaattaaacacatgaagcgaatatttttagcgccacgtttcttca

SEQ ID NO: 3490 - DNA, 223 bp, Staphylococcus aureus
aacaatttcttgttgtctatcttttgctaatttaatatcttctacgacaccttcgatttccgtaattaccgcttgacctttagggttacgtgcttcgaaaatctcttgaatacgaggaagaccttgtgtgatatcgctacctgctaccccacctgtatggaatgtacgcattgtaagctgtgtacctggttcaccgatagattgggctgcaattgtaccaact

SEQ ID NO: 3491 - DNA, 119 bp, Staphylococcus aureus
ctaatactggcataatgttgttgattgcttcttcgaatacttctaatgcatcacgaccactgcgttgttcaactaggtcgaatgctgaataaagaattctttgtgctgttccacgttta

SEQ ID NO: 3492 - DNA, 91 bp, Staphylococcus aureus
ggtgctctacttcctgatccaaatatttttccaccttcttttcttgatttttcaccctgtgttcgttggtcgcctctcaaattaattatgt

SEQ ID NO: 3493 - DNA, 130 bp, Staphylococcus aureus
gtgacggataccacggtatgatgaaatttccattaaacgtttgatatttaagttagtttcacgacgtaagtcaccttcgactttataaccgtctacaacttcacggatgcgacctaattcgtcatcagtt

SEQ ID NO: 3494 - DNA, 162 bp, Staphylococcus aureus
gcttcgtcttttgcatgttgaacgttggcattaccatttaatgcttgttttgcagcattaacttgtttgattgcttgttcaacttcagcttgtgttgcattgccgccattagcttttgaaatgatattttcagcatttgtaacagcagtgttatatgcttgt

SEQ ID NO: 3495 - DNA, 90 bp, Staphylococcus aureus
gatactgttgcaattttaagctctgggtttaaaatttcaacatcactatcatgtgtaatgtcgcttgctgttacttcgccttcatcacgt

SEQ ID NO: 3496 - DNA, 139 bp, Staphylococcus aureus
gcatatacaactaaagcgatgtttgctgagcggtttggatcatattgaatagaatcaacttttgcattgataccatctttgttacgtttgaaatcgataacacggtattgacgtttgtgtccaccaccatggtgtctta

SEQ ID NO: 3497 - DNA, 176 bp, Staphylococcus aureus
gcttcaatttccgcttgtacttttgaaacgcgctcatctgtcaatgtttcttctgtgtctaaataatttaaacgtattgcaattgattttttacctttttctaaatgttcgccctgatatacatcaaagacaagtgtatcttttaatatattgccaccatgtgcatgaatcgttga

SEQ ID NO: 3498 - DNA, 115 bp, Staphylococcus aureus
acccaacctgattgtggaaaatattgcttaaactcacgttgtgctacccctgcaatttcccctttttgattgaataaaatcgctcttgagcttgttgttccttggtctatagata

SEQ ID NO: 3499 - DNA, 84 bp, Staphylococcus aureus
gttgctggacctgcaatatcgaaatgaatgtgaggtgtttgaccactaaaatgtgttacaaaacttgccgcaaatagcgcttta

SEQ ID NO: 3500 - DNA, 94 bp, Staphylococcus aureus
taaacctgcttgatcttgagtacgtgcattgaactctttacagaatcccatgatgttcacacctgcttgacctaatgctggaccaactggtggt

SEQ ID NO: 3501 - DNA, 97 bp, Staphylococcus aureus
acaacgtcaccttttttaacaacgccacctggtgttgcatttttaacagtacatacgataacatcgccgatgtttgctgttttacgaccagatccac

SEQ ID NO: 3502 - DNA, 127 bp, Staphylococcus aureus
agtgcttctttaggattagcagttgtacattgatcttcaaatgcgagctctgccattctatcaattgactcatttaattcttcttcagacacaccttgtgatttcaaattcatttcaattccgactg

SEQ ID NO: 3503 - DNA, 135 bp, Staphylococcus aureus
ctttaataagatggtaaatgggcacggaatctttcaataaatttctctccacgctcttcaaaagtactatattgatcccaactcgcacaagcaggtgacaataatacaacatcatttggttctataatatcttgt

SEQ ID NO: 3504 - DNA, 87 bp, Staphylococcus aureus
agattcctctgcagcttttttaccgatttcaggattagctcctgctcctaaaccacgtgttaatttttcaccgatttggattttaga

SEQ ID NO: 3505 - DNA, 132 bp, Staphylococcus aureus
ctgattcagcaccgtcaccgcgacgagggccttgtttaaggatacgagtgtaaccaccttgacgttctgtgtaacgctctgcgatttcaccaaataatttttgaagtgcagtttgtgtagtttcatcttcgt

SEQ ID NO: 3506 - DNA, 84 bp, Staphylococcus aureus; identical to SEQ ID NO: 3499

SEQ ID NO: 3507 - DNA, 104 bp, Staphylococcus aureus
ccattacaattagcatagcttctaattgacgtaattgtttatcgcctcgccattcttgtgccaattcaacagcagctctttctaagttaccactaaactgttgt

SEQ ID NO: 3508 - DNA, 125 bp, Staphylococcus aureus
gatgcacgtttaccaacaacaattcgcagtggtaaaccaattaaatcggcatcattaaatttaacacctgcacgttcctgacgatcatcgtacaacacatcaaatttagtattaaattcagcata

SEQ ID NO: 3509 - DNA, 111 bp, Staphylococcus aureus
cctcgtctacttttttcactgttttttgtaagtcgatgatataaataccatttctctcagtgaagatatattttttcatttttgggttccaacgacgtgtttggtgaccga

SEQ ID NO: 3510 - DNA, 71 bp, Staphylococcus aureus
aattgacgtaattgtttatcgcctcgccattcttgtgccaattcaacagcagctctttctaagttaccact

SEQ ID NO: 3511 - DNA, 99 bp, Staphylococcus aureus
acgatatctaataaacggtcatttggtataacgattaatgtatctactgcagctttcatagcttctactccagcagcagcttgagtttgacgtttacgt

SEQ ID NO: 3512 - DNA, 138 bp, Staphylococcus aureus
agttagctgaccactagtaactttatcgaagacaggtaacgttgatggaatatcgtcgtatccatatatacgtgcaacttcttcaattaaatcttctttaattgtaatatctttacgacgtgatggtactagcactgt

SEQ ID NO: 3513 - DNA, 175 bp, Staphylococcus aureus
ttaagacctggttttttacgttctttcatacgtgggtcacgagtaagtaatccagcgcgttttaaagaacctctgtattcaggatctgcttctaataatgcacgagcgattccgtgacggatagcttgagcttgtccagtgaaaccaccaccatgaacgttaactaaaacatcat

SEQ ID NO: 3514 - DNA, 100 bp, Staphylococcus aureus
taaccaccttgacgttctgtgtaacgctctgcgatttcaccaaataatttttgaagtgcagtttgtgtagtttcatcttcgtttaagatttcaacattac

SEQ ID NO: 3515 - DNA, 138 bp, Staphylococcus aureus; identical to SEQ ID NO: 3512

SEQ ID NO: 3516 - DNA, 162 bp, Staphylococcus aureus; identical to SEQ ID NO: 3494

SEQ ID NO: 3517 - DNA, 125 bp, Staphylococcus aureus; identical to SEQ ID NO: 3508

SEQ ID NO: 3518 - DNA, 132 bp, Staphylococcus aureus
tgctgttgacgtgcttgaaccttagcatcttctaaaatcttttgaacttcttcttgtgtttctttaagtttttgtttattttcttcttcaagtttctgtgcatttaacttagcttgttctgcgtcatcgata

SEQ ID NO: 3519 - DNA, 125 bp, Staphylococcus aureus; identical to SEQ ID NO: 3508

SEQ ID NO: 3520 - DNA, 119 bp, Staphylococcus aureus; identical to SEQ ID NO: 3491

SEQ ID NO: 3521 - DNA, 138 bp, Staphylococcus aureus; identical to SEQ ID NO: 3512

SEQ ID NO: 3522 - DNA, 213 bp, Staphylococcus aureus
tatatgcttttcttctaaataattacctacaccgatatgcatttctttgctattttcacctaattctaaaacatctcctaaaattagaatgcgacgccctgtcaaagtactcagtgtatcaatagctgctctcatacttgtaggacttgcattataggcatcatttatcacagtaatatcattttctaatgtatgttgttccatacgcatacc

SEQ ID NO: 3523 - DNA, 166 bp, Staphylococcus aureus
gttattatggcttagtgtaattactatttgttcttctggaattaagtcttcgtcctctaagtcttcaaatccacctaattgaatttctgtacgacgatcatcaccgaaacgatctctaatttcagtcaattcatctctaactaactgtaataacacttcttcatca

SEQ ID NO: 3524 - DNA, 83 bp, Staphylococcus aureus
tcacgacgttctgaacccagctcgcgtaccgctttaatgggcgaacagcccaacccttgggaccgactacagccccaggatgc

SEQ ID NO: 3525 - DNA, 102 bp, Staphylococcus aureus
tcttgcatccgatcttgcaacgctgtaaatgtttcgaagccatcctcttctaagaagtgccctccatcttccacgatttgcaagttcccctctaatgcattc

SEQ ID NO: 3526 - DNA, 100 bp, Staphylococcus aureus
attcacctttatttttcttgataatatcttcagcgattgattttggaacttcagcatagtgatcgaagtacatagtgtaagtaccgcgaccttgagtgtt

SEQ ID NO: 3527 - DNA, 84 bp, Staphylococcus aureus; identical to SEQ ID NO: 3499

SEQ ID NO: 3528 - DNA, 157 bp, Staphylococcus aureus
taaattaagtcgactgcatcattaccatcgtatgcacagtacacatcgtatccttctttttttaagttaaattctaaaatatcagcaatcggtttttcatcatcaactacaacaacttttctagccatttgcataaacctcttttcttaaatcatta

SEQ ID NO: 3529 - DNA, 155 bp, Staphylococcus aureus
tcttcttcaccaagagctggcatttctttaaagaacatttctgataaaggtacaatttcaccggcataactcatttctttttgataaagcgcaattaatttgcgtccccaagataaatcctcttctgacggcacctcaggaatcaaatttgcttt

SEQ ID NO: 3530 - DNA, 175 bp, Staphylococcus aureus; identical to SEQ ID NO: 3513

SEQ ID NO: 3531 - DNA, 139 bp, Staphylococcus aureus
gtaacctctacccttgttagcaactagacgaatttttaagtgaccacctttagatactgttgcaattttaagctctgggtttaaaatttcaacatcactatcatgtgtaatgtcgcttgctgttacttcgccttcatca

SEQ ID NO: 3532 - DNA, 110 bp, Staphylococcus aureus
taatgcttcctattgtttccatttattttcctcctttgtcaccgtctcaatttcaacattccttcgcatttccaagtcaatcatctcttcttccactttacgaatgccat

SEQ ID NO: 3533 - DNA, 134 bp, Staphylococcus aureus
aactagtaattgatcccatggaaaattcattaatgtccacctccatgatcatcattgtcttgatcttgcgcatcttttgaaattttcttcatttctttcgcatttttcgattcatctttcttgaactcattgtt

SEQ ID NO: 3534 - DNA, 106 bp, Staphylococcus aureus
aagaccttgtgtgatatcgctacctgctaccccacctgtatggaatgtacgcattgtaagctgtgtacctggttcaccgatagattgggctgcaattgtaccaact

SEQ ID NO: 3535 - DNA, 71 bp, Staphylococcus aureus; identical to SEQ ID NO: 3510

SEQ ID NO: 3536 - DNA, 121 bp, Staphylococcus aureus
ttcaactaaagttggttcaaatgcttgaataccaagtctatgaagtgttggtgcacggttaagtaatacaggatgttctctaattacttcttccaatacgtcccaaacttcatcatccata

SEQ ID NO: 3537 - DNA, 100 bp, Staphylococcus aureus; identical to SEQ ID NO: 3526

SEQ ID NO: 3538 - DNA, 130 bp, Staphylococcus aureus
taaggacgtttttctaattctttaccagtaccgcttaaagagatacctaaacgacgagattttttccagtttgaacctctgaatcgagccataataagactcctcctttaattcttttttgttgttatga

SEQ ID NO: 3539 - DNA, 121 bp, Staphylococcus aureus
taaaatagatatagctatcggtgctctacttcctgatccaaatatttttccaccttcttttcttgatttttcaccctgtgttcgttggtcgcctctcaaattaattatgtacagatagtta

SEQ ID NO: 3540 - DNA, 176 bp, Staphylococcus aureus; identical to SEQ ID NO: 3497

SEQ ID NO: 3541 - DNA, 185 bp, Staphylococcus aureus
gttaccaagtaccatatcttgtgatggtgtaactacaggtttaccatctttagggttcaagatgttttgtgctgctaacatcaacattcttgcttcagcttgtgcctcttttgataaaggaacgtgaaccgccatttggtcaccgtcaaagtcagcgttataagctgttgttacaagtggatgta

SEQ ID NO: 3542 - DNA, 139 bp, Staphylococcus aureus; identical to SEQ ID NO: 3496

SEQ ID NO: 3543 - DNA, 130 bp, Staphylococcus aureus; identical to SEQ ID NO: 3538

SEQ ID NO: 3544 - DNA, 119 bp, Staphylococcus aureus; identical to SEQ ID NO: 3491

SEQ ID NO: 3545 - DNA, 166 bp, Staphylococcus aureus; identical to SEQ ID NO: 3523

SEQ ID NO: 3546 - DNA, 130 bp, Staphylococcus aureus; identical to SEQ ID NO: 3493

SEQ ID NO: 3547 - DNA, 100 bp, Staphylococcus aureus; identical to SEQ ID NO: 3514

SEQ ID NO: 3548 - DNA, 160 bp, Staphylococcus aureus
acagataaatgtgccataaaacccctcatttgctgtttataacccaaaccatcttttctgtttataatcttgttgtggcattcgtttaggaatttttttatcatcaacaactaacttcgcattactaataaatccgttcatatcttcataataatcacgt

SEQ ID NO: 3549 - DNA, 131 bp, Staphylococcus aureus
tcaagatcaacttttttgatttcaattacgttgatgtgtacttttttatcagttaacgcatttaatttgttgcgtaatttttcgatttctgaaccgcctttaccaattaccataccaggtttaccagtatg

SEQ ID NO: 3550 - DNA, 104 bp, Staphylococcus aureus
tcaaggaaataataccttcttgcatacgtgcaccaccacttgcagagaaaagaataaatggtaaacggttctcagtgcagtaatcaatgatgcgacatatcttt

SEQ ID NO: 3551 - DNA, 155 bp, Staphylococcus aureus
tactaaatcactttgcatgtcatttgtttgtgtcataactacaactggcttcatatttaaacgtcactccattatttaatgttgttcatttaagcgttttataatttcataagcaccttgctcttttaatttgttactcactgttttgcctaact

SEQ ID NO: 3552 - DNA, 131 bp, Staphylococcus aureus; identical to SEQ ID NO: 3549

SEQ ID NO: 3553 - DNA, 116 bp, Staphylococcus aureus
cctgctaattcaagtacggcacgaacaggaccaccagcgataactcctgtaccaggtgcagccggtttcataaatacgcttcctgaaccgtaacggccagtaattgtgtgtggagt

SEQ ID NO: 3554 - DNA, 96 bp, Staphylococcus aureus
taatagacgccatagttttagattcattttgaatttgaacgccttccttcgcttcaatagcttggtgtaaaccttccgagaaacgacggcctggca

SEQ ID NO: 3555 - DNA, 134 bp, Staphylococcus aureus; identical to SEQ ID NO: 3533

SEQ ID NO: 3556 - DNA, 99 bp, Staphylococcus aureus
cctaacagtgcaatgcttccttctggtgaaatgtaatcgatcatttgatttatggctgattgactaccgcgaccacccacacactcaaatgcatgatca

SEQ ID NO: 3557 - DNA, 166 bp, Staphylococcus aureus; identical to SEQ ID NO: 3523

SEQ ID NO: 3558 - DNA, 110 bp, Staphylococcus aureus; identical to SEQ ID NO: 3532

SEQ ID NO: 3559 - DNA, 157 bp, Staphylococcus aureus; identical to SEQ ID NO: 3528

SEQ ID NO: 3560 - DNA, 83 bp, Staphylococcus aureus; identical to SEQ ID NO: 3524

SEQ ID NO: 3561 - DNA, 98 bp, Staphylococcus aureus
aataaacggtcatttggtataacgattaatgtatctactgcagctttcatagcttctactccagcagcagcttgagtttgacgtttacgtccttcaaa

SEQ ID NO: 3562 - DNA, 99 bp, Staphylococcus aureus
actcctgtaccaggtgcagccggtttcataaatacgcttcctgaaccgtaacggccagtaattgtgtgtggagttgtaccttcaacacgtggaacaact

SEQ ID NO: 3563 - DNA, 127 bp, Staphylococcus aureus
attgttcttctttaacatatggtaataatgccatatgacgagaacgtttgatagctgtagtcaacatacgttgatatttagctgaagtaccagttacacgacgtggtaaaattttaccgcgttctga

SEQ ID NO: 3564 - DNA, 96 bp, Staphylococcus aureus; identical to SEQ ID NO: 3554

SEQ ID NO: 3565 - DNA, 166 bp, Staphylococcus aureus; identical to SEQ ID NO: 3523

SEQ ID NO: 3566 - DNA, 151 bp, Staphylococcus aureus
gttgacgatctgcacgtaaatcttcgtcacggaagcattttacgatttggtagtatttgtcaaatccactaatcatcaataattgcttaaataattgtggtgattgtggtaatgcataaaattcaccatcatgaacacgagatggtactaa

SEQ ID NO: 3567 - DNA, 83 bp, Staphylococcus aureus; identical to SEQ ID NO: 3524

SEQ ID NO: 3568 - DNA, 125 bp, Staphylococcus aureus; identical to SEQ ID NO: 3508

SEQ ID NO: 3569 - DNA, 119 bp, Staphylococcus aureus; identical to SEQ ID NO: 3491

SEQ ID NO: 3570 - DNA, 104 bp, Staphylococcus aureus; identical to SEQ ID NO: 3507

SEQ ID NO: 3571 - DNA, 125 bp, Staphylococcus aureus
ttaagtgctaatgatgcagcaattttgaaggccatttcagatgaatcgacatcatggtatgaaccatcatataatttagctttaacatcaattaaaggataacctgctaaaacaccattttccat

SEQ ID NO: 3572 - DNA, 166 bp, Staphylococcus aureus; identical to SEQ ID NO: 3523

SEQ ID NO: 3573 - DNA, 139 bp, Staphylococcus aureus; identical to SEQ ID NO: 3531

SEQ ID NO: 3574 - DNA, 138 bp, Staphylococcus aureus; identical to SEQ ID NO: 3512

SEQ ID NO: 3575 - DNA, 158 bp, Staphylococcus aureus
acaataacttgatttgcaattgtagtttcattgaaacgacgtttaacaccaccaaacgtttctaatgcttctttaatatttgtaacatctagcttctctaaataactaatcgcaattacagctaatgcatttaaaactgtatggtcaccatattgtgg

SEQ ID NO: 3576 - DNA, 159 bp, Staphylococcus aureus
acgaccaacttgatcgcctttaacgattggtttcggtttcactttttctttaccatcttcagctgaaacgtgcttcgcttcaccaaactctgttgttttttcacgttcaatattatcttcaacttgtactacagattttaaaatgaatttacaagtatc

SEQ ID NO: 3577 - DNA, 157 bp, Staphylococcus aureus; identical to SEQ ID NO: 3528

SEQ ID NO: 3578 - DNA, 125 bp, Staphylococcus aureus; identical to SEQ ID NO: 3571

SEQ ID NO: 3579 - DNA, 83 bp, Staphylococcus aureus; identical to SEQ ID NO: 3524

SEQ ID NO: 3580 - DNA, 251 bp, Staphylococcus aureus
gatcgctaacagcaccagttacaataccttttgtagaatcttcgtcaaattcaactaggttagactcagtagtaacctgaccaccacctgggtttgtatcttcttcatattcaacaacatcagcatgatgttttgaattttcatgtgtcgattcttcaaagtctacatgaatagaatcttcttcagtttcaatggtaccttctgcatgaccttctgcaccttcaacagctgtatgatattcaaaatcaatt

SEQ ID NO: 3581 - DNA, 159 bp, Staphylococcus aureus; identical to SEQ ID NO: 3576

SEQ ID NO: 3582 - DNA, 100 bp, Staphylococcus aureus
tatatgcaatttccgcttcgctatccaatcttgggaaaataggtttaggttgcccagtaaccataattgactcattaagcacaccatattgctctaaact

SEQ ID NO: 3583 - DNA, 110 bp, Staphylococcus aureus; identical to SEQ ID NO: 3532

SEQ ID NO: 3584 - DNA, 139 bp, Staphylococcus aureus
taattctgtaccatcaggcgtgatatattttttccctaaaaattgatagcctccacaaatcgttaatcccggcataccatcttcaatcgcttctttaagtggtgtcttaattttacttaattcttttgttgctaatgct

SEQ ID NO: 3585 - DNA, 155 bp, Staphylococcus aureus; identical to SEQ ID NO: 3551

SEQ ID NO: 3586 - DNA, 157 bp, Staphylococcus aureus; identical to SEQ ID NO: 3528

SEQ ID NO: 3587 - DNA, 92 bp, Staphylococcus aureus
acattgtctgttgctgttgtcgataaacattcatatcgtagcggtctgcaaattctttaatgcgatatgccggcggtaccatgacaggtaat

SEQ ID NO: 3588 - DNA, 116 bp, Staphylococcus aureus
aataattcttcatcgtcaaccatgtcaactttgtttaagaatactactaatgctggtacaccaacgttacgtgataaaagaatgtgttcacgagtttgtggcattggaccgtcagc

SEQ ID NO: 3589 - DNA, 175 bp, Staphylococcus aureus; identical to SEQ ID NO: 3513

SEQ ID NO: 3590 - DNA, 146 bp, Staphylococcus aureus
tacagaaataatttctttgtctttgattgctgctggtacatttccttcaacgattgcctgtgctaaaccttcaacaatcgcagttttaccaacaccagcttctccaactaatataggattgtttttagttcgtctacttaaaactt

SEQ ID NO: 3591 - DNA, 121 bp, Staphylococcus aureus; identical to SEQ ID NO: 3539

SEQ ID NO: 3592 - DNA, 131 bp, Staphylococcus aureus; identical to SEQ ID NO: 3549

SEQ ID NO: 3593 - DNA, 215 bp, Staphylococcus aureus
ttcgtttcattttctcctgttttcatcatttcacgtagctcttgctcgatttctaaatcaagatctgttttacgataaccattcaaaccttgacgttcatcttcttcaggttgattttgttgctgtgtgtctttgttgtcagaagtcgctactgtttttttattatctgtttctttagtcataacaaacgcctccgttataaaacgctatattta

SEQ ID NO: 3594 - DNA, 163 bp, Staphylococcus aureus
taccgtaaatcttccacgccatataatttcaatgctttcacttgtaaatcacctcaaatttgatttaattcacaacttttttctttttaaaaatacctgtcgcaaaataacctgcaatgacaatggaattacttacgagtaaatgttccatataaaaatcagt

SEQ ID NO: 3595 - DNA, 96 bp, Staphylococcus aureus; identical to SEQ ID NO: 3554

SEQ ID NO: 3596 - DNA, 110 bp, Staphylococcus aureus; identical to SEQ ID NO: 3532

SEQ ID NO: 3597 - DNA, 135 bp, Staphylococcus aureus; identical to SEQ ID NO: 3503

SEQ ID NO: 3598 - DNA, 87 bp, Staphylococcus aureus; identical to SEQ ID NO: 3504

SEQ ID NO: 3599 - DNA, 113 bp, Staphylococcus aureus
aatgcttcagtgatttgaggtacgatttgtttttttcgagaaacgacaccagataagaaggccatgtcatcttctaattgaacattgaatgcttcgccaactttatctttttc

SEQ ID NO: 3600 - DNA, 90 bp, Staphylococcus aureus; identical to SEQ ID NO: 3495

SEQ ID NO: 3601 - DNA, 215 bp, Staphylococcus aureus; identical to SEQ ID NO: 3593

SEQ ID NO: 3602 - DNA, 132 bp, Staphylococcus aureus; identical to SEQ ID NO: 3518

SEQ ID NO: 3603 - DNA, 102 bp, Staphylococcus aureus; identical to SEQ ID NO: 3525

SEQ ID NO: 3604 - DNA, 119 bp, Staphylococcus aureus; identical to SEQ ID NO: 3491

SEQ ID NO: 3605 - DNA, 94 bp, Staphylococcus aureus
cctcctttaaataattatttacggaatggcataccgaagttagctaacaattcacgagcttcttcatcagtgttagcagtcgttacgataacaa

SEQ ID NO: 3606 - DNA, 108 bp, Staphylococcus aureus
tcttctttttctacaatcgagtctccttttacaggtccatattttgttacgctatcgaccggcggtctaactacgtctcctgtttctggattcttaattcctggttta

SEQ ID NO: 3607 - DNA, 83 bp, Staphylococcus aureus; identical to SEQ ID NO: 3524

SEQ ID NO: 3608 - DNA, 105 bp, Staphylococcus aureus
atgacttcacatggaagtgtgataaagatagatgtaccttgaccttctacactgtttgcccaaatacgaccattgtgcgcttccacaatctctttcgaaatggct

SEQ ID NO: 3609 - DNA, 121 bp, Staphylococcus aureus; identical to SEQ ID NO: 3536

SEQ ID NO: 3610 - DNA, 139 bp, Staphylococcus aureus; identical to SEQ ID NO: 3496

SEQ ID NO: 3611 - DNA, 139 bp, Staphylococcus aureus
cttgctcatccataacttttacatctaaacctaaactttgtaattctttcatcaatactcggaatgattctggaacacttggtctagagatgttttcacctttaacaatagcctcgtatgttttcacacgtcctactgt

SEQ ID NO: 3612 - DNA, 158 bp, Staphylococcus aureus
tcatgaccacttaattcaatatgtctaatatgttcacgtactgcaccttgtaatgctaatacacctattttcatatcttaccaaccacgctcttgcatacgttcttctaatgataattgattgatatctaaacctttcatagcagtgccaagttcact

SEQ ID NO: 3613 - DNA, 94 bp, Staphylococcus aureus; identical to SEQ ID NO: 3605

SEQ ID NO: 3614 - DNA, 87 bp, Staphylococcus aureus; identical to SEQ ID NO: 3504

SEQ ID NO: 3615 - DNA, 158 bp, Staphylococcus aureus; identical to SEQ ID NO: 3575

SEQ ID NO: 3616 - DNA, 106 bp, Staphylococcus aureus
aacgatagcgttttcgaattcgaaacctgcgcctgtttcgtttggtgtgaattcaatgtgaacatcaccgtattgaccacgaccaccagattgacgagagaattta

SEQ ID NO: 3617 - DNA, 175 bp, Staphylococcus aureus; identical to SEQ ID NO: 3513

SEQ ID NO: 3618 - DNA, 110 bp, Staphylococcus aureus; identical to SEQ ID NO: 3532

SEQ ID NO: 3619 - DNA, 119 bp, Staphylococcus aureus; identical to SEQ ID NO: 3491

SEQ ID NO: 3620 - DNA, 119 bp, Staphylococcus aureus; identical to SEQ ID NO: 3491

SEQ ID NO: 3621 - DNA, 102 bp, Staphylococcus aureus
ttagtaggaagaacttctccacgataaatccatactttaacgcctaatttaccgtaagtagtgtcagcttcagcgtgtgcataatcgatgtcagcacgtaac

SEQ ID NO: 3622 - DNA, 119 bp, Staphylococcus aureus; identical to SEQ ID NO: 3491

SEQ ID NO: 3623 - DNA, 97 bp, Staphylococcus aureus; identical to SEQ ID NO: 3501

SEQ ID NO: 3624 - DNA, 138 bp, Staphylococcus aureus; identical to SEQ ID NO: 3512

SEQ ID NO: 3625 - DNA, 192 bp, Staphylococcus aureus
acttttaatcctttaatatctttaccaatttcagatgtaaagtctacatcatcaactggtgcacttgtagagtcattaacatctgcaccagaaatagcttctaatacgattgcattatcttttacatttcgagtcaatggaccaatttggtctaatgaagatgcaaaagcaactaatccaaatcgagataca

SEQ ID NO: 3626 - DNA, 310 bp, Staphylococcus aureus
gatccgtctcaacatgaacatcagcagcaacaatgatacctgttgcattttcaatatcttgttcagttaaatggtttttaatgccgcttgaaccattcgtttctactttaattttaatacccattttatccgcttgctttttcaatgcatcacgtgccatatatgtgtgtgcaatacctgttggacaagcagttactgctaacacatatggctcattagattgtttagatgattgttctgcagttgcaacttgttgtgcttcagcttctgcctcttcttcttttgtcacttcatcatcagcctcatctat

SEQ ID NO: 3627 - DNA, 256 bp, Staphylococcus aureus
gatcttcaattgcgtctttcatttgagatacagcaactttactgtcatcatattgaacacttacttgaccattttcaaggttaacgtcagctgaagtgacaccgtcaatattatttaatgcagattcaacagcacttttgcagtgaccacagctcataccttcaacatttaaaatttcttgtgacatagcattcacctccttttagagccacttattatttataataattagtggctcttatgcagttggagcgaa

SEQ ID NO: 3628 - DNA, 214 bp, Staphylococcus aureus
gatcccttcagccggacttgggtattcctccattattataggtaaatcgctattaattataaaattaaatggcggtctcgacgggaatcgaacccgcgatctcctgcgtgacaggcaggcgtgttaaccgctacactacgagaccattagtaaaacggaggaagagggattcgaacccccgcgagccgttaagcccctgtcggttttcaagacc

SEQ ID NO: 3629 - DNA, 207 bp, Staphylococcus aureus
gatctcctgcgtgacaggcaggcgtgttaaccgctacactacgagacctataaaatattgcgggaggcggatttgaaccaccgaccttcgggttatgagcccgacgagctaccgaactgctccatcccgcgataataaaaaataatggcggaggaagagggattcgaacccccgcggcccgttaaggccctgtcggttttcaagacc

SEQ ID NO: 3630 - DNA, 352 bp, Staphylococcus aureus
gatccccacgctttcgcacatcagcgtcagttacagaccagaaagtcgccttcgccactggtgttcctccatatctctgcgcatttcaccgctacacatggaattccactttcctcttctgcactcaagttttccagtttccaatgaccctccacggttgagccgtgggctttcacatcagacttaaaaaaccgcctacgcgcgctttacgcccaataattccggataacgcttgccacctacgtattaccgcggctgctggcacgtagttagccgtggctttctgattaggtaccgtcaagatgtgcacagttacttacacatatgttcttccctaataacagagttttac

SEQ ID NO: 3631 - DNA, 417 bp, Staphylococcus aureus
gatcaaagcttacttacagctccccaaagcatatcgtcgttagtaacgtccttcatcggcttctagtgccaaggcatccaccgtgcgcccttaataacttaatctatgtttccatcctacaggaaacgcgttattaatcttgtgagtgttctttcgaacactagcgattatttcttatgaattcaagcttatttaaaactctttattcactcggttttgcttggtaaaatctatattttacttacttatctagttttcaatgtacaatttctttttagtcaagcgctcgcataagcaatatcactttaaccaaaaaatatttgaatgttaaataaacattcaaaactgaatacaatatgtcacattattccgcatcttctgaagaagatgttccgaatatatccttagaaaggaggt

SEQ ID NO: 3632 - DNA, 190 bp, Staphylococcus aureus
gatcgaaccctcgaatgtcggaaccacaatccgatgtgttaaccacttcaccacaaccgccatgaattaagaatggttcaggacagagtcgaactgccgacacatggagcttcaatccattgctctaccaactgagctactgaaccgtaatggtaataataatggcggtctcgacgggaatcgaacccgc

SEQ ID NO: 3633 - DNA, 157 bp, Staphylococcus aureus
taaacgtttgtgtgtacgttgttcgaattgttcacgtgaatctttatacttatgcacggcacggatgattgtgtaaactgatttctcagttggtaacggaattggtccagaaacatctgcaccagaacgtttcgctgtttctacaatcttctctgct

SEQ ID NO: 3634 - DNA, 310 bp, Staphylococcus aureus
tactacactacttgttaatgatattgcgccatcttcgtctaaagaactgacatcgcttaccgcatcatccattgttgtatctacatctaagaagtcttgaccctctattgcatctattacactttggatagatgacttttcattgtcataatcagctgttagatattcaatatcttttgtcatgtcatgcacctatccctcaatattatagtaaagcttggcaaattccgtaccccaatgttcatctgcttcaaagaacttttgtgctgaattcatgacgccaccaccgagtgtactcaatggacctttg

SEQ ID NO: 3635 - DNA, 453 bp, Staphylococcus aureus
acttgtacttgttgactggctttgtgacattgaatcacttaatgatgtagatgtgcttgttgagctcgagtcacttacacttgttgaacctgatattgagtcacttaaacttgtcgatgttgaaactgatacgcttccgctcattgagtcagatgttgaaagtgatgtactcgttgaatttgatccactgatgctagacgaatcacttgtagacattgagtcgctttctgatgcactgatgctcatagagtcaaattgactattacttgttgagcttgactgcgaatcgctcacacttgttgacgttgattctgatccactcatactttgcgagctactcaatgattttgaatcacttaatgaatccgaagtgctaagacttgtggaaccacttaaagatattgatccacttaatgagtcggagtcacttgtactagtagaatcactcattga

SEQ ID NO: 3636 - DNA, 705 bp, Staphylococcus aureus
gcaatccagtcactgtattcgtcaccgcatttccactgttatcttgcgtagcaattttaatcggggatattggtgaatacacttctgatgattgatctcctattggtgtcactgttggtgctgtcgtatccacaacatttattgtaaaagttgtcgtcgatttgttatttgcttggtcagtagacacaactgtcactgttgattgaccaatttttgttggtgtcccaatgattgaattcgttgcactatcgtaacttaatccgcttggtaatcctgtaactgtatttgtcacagtcccagtaccattatccgttgtagtcaatacaataggattcattgttttacccacttctatggtttgattgcctacagttacagttggtgcttttacatcagtaaaataatatgtcactgattgtccagcattcgtcatttttacagttttatttgtatcattataagttgacgcatatgaactatcgacggacgtgtagttatatcctttagcagtcaatgcagattgctgattatcgattgtcacgacttgatcaacatttcctgaatatgtttttggtggaataatatctttacctgttgttacatcaacgtatctcacttgtgtaacagcagactctgtatattcgaatgttccaaattgtacttgttgtaaatttgtcgcgccacctgttgaggctgtcattgata

SEQ ID NO: 3637 - DNA, 110 bp, Staphylococcus aureus
tatacgttgtcgcaacaccataactatctgttgttacaaatgcaccaaacgcacctccaccagctacattagatgggtcagcattcgcctttgcagctgaatttggttta

SEQ ID NO: 3638 - DNA, 156 bp, Staphylococcus aureus
cgcctccttcaacgatgtgaatacattttaaagtaagttattataaccctaaggtcagtcttacgtttgtctgaggtaagacttcgggatgtgttgagtggttaatgttttccttcccctaccctatccttacttaatctttttattaaaaacttt

SEQ ID NO: 3639 - DNA, 662 bp, Staphylococcus aureus
taaagcaatccataggcctgcaagctcaaaataagcagtttttttaccagtcaatagcaatttcccaagtaaaatatctctataaaaatgtattgaatcgtttaaatttctgactgaaaagcatatatgattaatagattttaacatctgcttcacttctttcttagaatttttataataaattatttttgtatcgatttttgaaatgacgtcattaatttttatacgatgatctgcgcaactgcataagaggctctaataacttaagttaaaggcaaaaggtatacagttgactacgcaactacataagaggcactaataacttaagttaaaggcaaaaggtatacagttgactgagcaactgcataagaggctctaataacttaagttaaaggaaaaaggtatacagttgactgagcaactgcataagaggctctaataacttaagttaaaggcaaaaggtatacagttgactgagcaactgcataagaggctctaataacttaagttaaaggcaaaaggtatacagttgactgagcaactgcataagaggctctaataacttaagttaaagagcctctaaaagtccatataaataatcttggcattgttgtacgaatgtatgtacttgttcggagtgtttgcgttttttatggtaattg

SEQ ID NO: 3640 - DNA, 507 bp, Staphylococcus aureus
gatcaatcagcttggaaatatcttctttattttttgttgtattctttttgttatttaaaatgtcatcaatcagtttgtctgagttttcttccattgaatcaatttgatgtaacacagctactttatcgtctttgaaactttccatgtcattgataacttggtcaaccatcatatcaattaaacgtttgttgtcgaatggtttatcttctctgccttttgtatctgtgtacattttataatgcgcatcaaacctagataatgcactcaattgctggcttaatgcatctttcgataagcgaccatcaaggttatgattcaatgttacatccacaacactcgttgctttcttatcatttggttcatcttgacgatttgcttgtccaaataacaattgtaaatgcattgttttatcttttaagaaatctttctcagcatcctttttcaatttagcaacgccattgacttcaactttatattccttgttagatgtatcgagttgaacacttt

SEQ ID NO: 3641 - DNA, 149 bp, Staphylococcus aureus
tcaatatcatcaatagggtctactcgaccagcaacatgagttacgttatcatcatcaaatgcacgaacgacctgacaaatcgcatctacttctctaatatgtgataagaatttattacctaacccttctccctttgaagcacctttcac

SEQ ID NO: 3642 - DNA, 436 bp, Staphylococcus aureus
atttttttaaaataataccaatctcatttttaaattctaaacttggtttcgtataatacgctcttaaatctttaaatttaggatttatttctgttggtacttgttttgtggttggcgattgtggtgtgtctgatttagtagattgcattggttgtggcgtgtttgttgatggaggtgttgtcactttagttgaaggcggtgttgtcgcatttgctgtttgttgcggtgcttctactttagttgagggcggtgttgtcgcgtttggttttgattgcggtgcttctattttagttgagggcggtgttgattgtggtgcttccactttagtggaagatagtgttgtcgcgtttgctgcttgcgttgtcgttgtgattacacctgttgttaaaaggcctagtgctaaacttgttttagcaatcgttgttattttcatagt

SEQ ID NO: 3643 - DNA, 234 bp, Staphylococcus aureus
tgcttgttttatggttggagattgtggtgtgtctgatttagtagattgcattggttgtggcgtgtttgttgatggaggtgttgtcactttagttttcggcgttgtggattcggttgtcgtttgtgattgttcttgtttaggcgctggcgttgctgatatattaagcgttttctgctcttcttgtttaggttgtgatattttttctattttggaagctgaggttttttcctcatt

SEQ ID NO: 3644 - DNA, 466 bp, Staphylococcus aureus
tctcataatttctgtagcagggatatgttggttgttgtattgcaacatcatggctgcggaaacaccttcacaccccatgaccatagggataggaaatagctgactgataggtttaactggtaatatttttcggttcataatatagtcctcgcattgattcaataaatatttaatataattatatagcgtcaatgcaaaatgtcctaaacatatgttttacatgagtgaataaaattaatggagtgataaaatggaatatcaattacaacaacttgcgtcgttaacgttagtaggtattaaagaaacgtatgaaaatggacgacaggctcagcaacatatagcagggttttggcaaagatgttatcaagagggagtaattgcggatttacagttaaaaaataatggtgatttagccgggatacttggcttatgtatacctgaattagacggtaagatgtcatatatg

SEQ ID NO: 3645 - DNA, 122 bp, Staphylococcus aureus
taccccaaaacacaaaaagccccgtaagcctatgcctacggggtttgacaataaattatatattattgttcttctttaacatatggtaataatgccatatgacgagaacgtttgatagctgt

SEQ ID NO: 3646 - DNA, 215 bp, Staphylococcus aureus
agtattcgtcagctccacatgtcaccatgcttccacctcgaacctattaacctcatcatctttgagggatcttataaccgaagttgggaaatctcatcttgaggggggcttcatgcttagatgctttcagcacttatcccgtccacacatagctacccagctatgccgttggcacgacaactggtacaccagaggtatgtccatcccggtcctct

SEQ ID NO: 3647 - DNA, 199 bp, Staphylococcus aureus
tcccaaccaatccaatacatttttcattggatctacgaatgtattgtagaaaaacccactacgtttttcaggtttagaatagtcacaaccagccaaaaagaccataatacctaaaaataatggtagtaacgcttttttcttcatttttccacctctatcattatattcacataggatttattctatcacattaatgagt

SEQ ID NO: 3648 - DNA, 123 bp, Staphylococcus aureus
tgtcgcttacgtcttaacttccgcttttcttcaagtgttaatggctttaattgtgttactttactttttcgttcttttttcgttactgtttcctcatcaatcgagtcgctattttgttcttta

SEQ ID NO: 3649 - DNA, 246 bp, Staphylococcus aureus
gatcatatctatagtatgcatttgtgttccgtttcactgaagtatatgtatcatcagttaagtataaaccgtcatccttcaatgttacttgataagcatatttccgtgctaaccaggcaatatctatataattttctcctgcgttttcataacttcttaaatcttcaatatgtgcactaacttcagggaaaatgattctaacaacactttcatcaacccaatatttgtcatgcatccatcgcactt

SEQ ID NO: 3650 - DNA, 175 bp, Staphylococcus aureus
ataattaatctacaatattttactgtaaatttatttgtgaaaaattgacattaattcattaattaggtactattatttttaacggattctcttatcctgagtggtggagggacatggacccaatgaaacccagcaacctcttttttataaaagaaaggtgccaaaccgtttgcag

SEQ ID NO: 3651 - DNA, 232 bp, Staphylococcus aureus
tgctccgtcaggctttcgcccattgcggaagattccctactgctgcctcccgtaggagtctggaccgtgtctcagttccagtgtggccgatcaccctctcaggtcggctatgcatcgttgccttggtaagccgttaccttaccaactagctaatgcagcgcggatccatctataagtgacagcaagaccgtctttcacttttgaaccatgcggttcaaaatattatccggta

SEQ ID NO: 3652 - DNA, 892 bp, Staphylococcus aureus
ccagctcgcgtaccgctttaatgggcgaacagcccaacccttgggaccgactacagccccaggatgcgatgagccgacatcgaggtgccaaacctccccgtcgatgtgaactcttgggggagataagcctgttatccccggggtagcttttatccgttgagcgatggcccttccatgcggaaccaccggatcactaagtccgtctttcgaccctgctcgacttgtaggtctcgcagtcaagctcccttatgcctttacactctatgaatgatttccaaccattctgagggaacctttgagcgcctccgttaccttttaggaggcgaccgccccagtcaaactgcccgcctgacactgtctcccaccacgataagtggtgcgggttagaaagccaacacagctagggtagtatcccaccagcgcctccacgtaagctagcgctcacgtttcaaaggctcctacctatcctgtacaagctgtgccgaatttcaatatcaggctacagtaaagctccacggggtctttccgtcctgtcgcgggtaacctgcatcttcacaggtactatgatttcaccgagtctctcgttgagacagtgcccaaatcgttacgcctttcgtgcgggtcggaacttacccgacaaggaatttcgctaccttaggaccgttatagttacggccgccgtttactggggcttcgattcgtagcttcgcagaagctaaccactcctcttaaccttccagcaccgggcaggcgtcagcccctatacatcaccttacggtttagcagagacctgtgtttttgataaacagtcgcttgggcctattcactgcggctcttctgggcgttaaccctaaagagcaccccttctcccgaagttacggggtcattttgc

SEQ ID NO: 3653 - DNA, 71 bp, Staphylococcus aureus
tttacgagtacgcgcgttgtttttcgttttttgaccacgaactggtaaaccacgacggtgacggataccac

SEQ ID NO: 3654 - DNA, 1019 bp, Staphylococcus aureus
tgccaaacctccccgtcgatgtgaactcttgggggagataagcctgttatccccggggtagcttttatccgttgagcgatggcccttccatgcggaaccaccggatcactaagtccgtctttcgaccctgctcgacttgtaggtctcgcagtcaagctcccttatgcctttacactctatgaatgatttccaaccattctgagggaacctttgagcgcctccgttaccttttaggaggcgaccgccccagtcaaactgcccgcctgacactgtctcccaccacgataagtggtgcgggttagaaagccaacacagctagggtagtatcccaccagcgcctccacgtaagctagcgctcacgtttcaaaggctcctacctatcctgtacaagctgtgccgaatttcaatatcaggctacagtaaagctccacggggtctttccgtcctgtcgcgggtaacctgcatcttcacaggtactatgatttcaccgagtctctcgttgagacagtgcccaaatcgttacgcctttcgtgcgggtcggaacttacccgacaaggaatttcgctaccttaggaccgttatagttacggccgccgtttactggggcttcgattcgtagcttcgcagaagctaaccactcctcttaaccttccagcaccgggcaggcgtcagcccctatacatcaccttacggtttagcagagacctgtgtttttgataaacagtcgcttgggcctattcactgcggctcttctgggcgttaaccctaaagagcaccccttctcccgaagttacggggtcattttgccgagttccttaacgagagttcgctcgctcaccttagaattctcatcttgactacctgtgtcggtttgcggtacgggcacctattttctatctagaggcttttctcggcagtgtgaaatcaacgactcgaagacacaatgtcttctccccatcacagctcagccttaacgagtaccggatttgcctaatactcagccttactgcttagacgtg

SEQ ID NO: 3655 - DNA, 224 bp, Staphylococcus aureus
ccaaatatgaatagggataagaataatacagtgaaaattgctgctgctgtttctgcatcaactgggtcaacctcaccattaactgttgttgacacatctgtagtcattacacctgatgctgctaaaaccatcaatagtaaactaaataccgttgctaaaccctgaacaacaattcctattattgtcattattttgatcgatttttccattgtcttactccttta

SEQ ID NO: 3656 - DNA, 288 bp, Staphylococcus aureus
tgatgatgttgagtcggattcactttcacttgtagaaccacttaatgatgtggatgtactaatggaatcagatttacttgtactgattgaatcacttgtcgacattgatgtacttaatgaatcagacttactatcacttgtggaatcacttaatgatgttgacaaacttgtagagtcagacaaacttgtactcgttgacatactcagtgatgttgaaacactctcgctcttaaacgttgacgttgattcactgatacttgtcgatgttgaaatggacgtactaccact

SEQ ID NO: 3657 - DNA, 441 bp, Staphylococcus aureus
cggttgcatatgcactcgtttcatatcccgctttttctaattttattaaggcatcaggtaattctcttttaaatagctctttacctgatgtcgggttataaatgattctagcacgtttcctcatatcttatccctctacttaaaattcatatattttaacttcatctttgtttcgtctaatagggagtgggacagaaataatatttaacaaaatttatttcgttctaccccaacttgcattgtctgtagaatttcctttcgaaattctctatgttggggccccaccccaacttgcacattattgtaagctgacagaaagtcagcttctttgtttgggggccccgccaacttgcacattattgtaagctgacagaaaatcagcttctatgttggggccccactagaattgaaaaaagcttgttacaagcgtattttctttca

SEQ ID NO: 3658 - DNA, 640 bp, Staphylococcus aureus
  misc_feature (1)...(640): n = A,T,C or G
gtaaataattaggggctcttatgcagttacttttataaatctttgctttaaaatacttatatttctcagcaccaattgtggtacagtttattctttaaacgctgcaactgtattcctttgtcccccttatagtttagtgattaggggctcttatacagttgcacatttagtataacgtctaaaattcccattttttaataacataatgaaaataataatgaaaaacattttataaaaagtaaaaaacaccagaagattcacttctggtgttaactagacaaaattattcagctactgcatatacagaaacttgttttttgtcgcgacctttacgttcgaatttaacaacgccgtcgattttagcgaataatgtatcatcgccaccacgacctacattttcaccagggtaaattttagtaccacgttggcgatataaaattgaaccacctgttacgaattgaccgtcagcacgtttagcacctaagcgttttgattcagagtcacgtccgttttttgtagaacttaccccttttttagatgcgaagaattgtaagtttaattttaacatcggaatgcacctcacttataatttaatataatattntcattatattcntcttcaatagtttgtaaagacaca

SEQ ID NO: 3659 - DNA, 288 bp, Staphylococcus aureus; identical to SEQ ID NO: 3656

SEQ ID NO: 3660 - DNA, 310 bp, Staphylococcus aureus; identical to SEQ ID NO: 3626

SEQ ID NO: 3661 - DNA, 310 bp, Staphylococcus aureus; identical to SEQ ID NO: 3626

SEQ ID NO: 3662 - DNA, 310 bp, Staphylococcus aureus; identical to SEQ ID NO: 3626

SEQ ID NO: 3663 - DNA, 310 bp, Staphylococcus aureus; identical to SEQ ID NO: 3626

SEQ ID NO: 3664 - DNA, 310 bp, Staphylococcus aureus; identical to SEQ ID NO: 3626

SEQ ID NO: 3665 - DNA, 258 bp, Staphylococcus aureus; identical to SEQ ID NO: 3389

SEQ ID NO: 3666 - DNA, 441 bp, Staphylococcus aureus; identical to SEQ ID NO: 3657

SEQ ID NO: 3667 - DNA, 138 bp, Staphylococcus aureus
tgtgcccatctgatttagctcgctattattttcatcaactgcttgtgtgtcatttaacaatactgaatgtggctgattagcgttatcattttctgagacatttacttggtttacatctaatgcgcccgccacactttc

SEQ ID NO: 3668 - DNA, 137 bp, Staphylococcus aureus
gcaaaccgctgcgcttcttccactggatgattcacacgaccaatcgttggcagtttgtccaaacgttcgcgattcgcgtgttcagaaatcatcggcatcgcgtcattcaatgattcatatgcatctaaagcaataga

SEQ ID NO: 3669 - DNA, 137 bp, Staphylococcus aureus; identical to SEQ ID NO: 3668

SEQ ID NO: 3670 - DNA, 137 bp, Staphylococcus aureus; identical to SEQ ID NO: 3668

SEQ ID NO: 3671 - DNA, 205 bp, Staphylococcus aureus; identical to SEQ ID NO: 1725

SEQ ID NO: 3672 - DNA, 341 bp, Staphylococcus aureus
cctttaccaccgtcaccgccagctggtccaccaaatggtacatatttttctcttctgtatgcggtaataccattaccaccatcaccggctttaagagatattttgacttgatcgacaaacatatatctcacctcttttacatataattttcattttcccaataattatagcatattagagccccttatatattgtaaataattaggggctcttatgcagttacttttataaatctttgctttaaaatacttatatttctcagcaccaattgtggtacagtttattctttaaacgctgcaactgtattcctttgtcccccttatagtttagtgattaggggc

SEQ ID NO: 3673 - DNA, 214 bp, Staphylococcus aureus
tactttatcgtttcgtcatttaatgtttcggatggtaggtcattatcaattttacgaacgactttacaagggtttccaaccgctaagctgtgtggcggaatatctttagtgacaacactaccagcaccaatcacactgccttctccaatcgtcacccctggtaacacggctacatgaccgccaaaccaagtattactgccaatatgaatgggtc

SEQ ID NO: 3674 - DNA, 279 bp, Staphylococcus aureus
caaatgtaaaagtatctccttcgtttacgtctaatttttcaacgaagatttcttgaccttcttctactttgatttgttttccacctgtttcaataatagcaaacatactttgcacctcctgtataataagtcacgccatacataggtgacatttcgttattgagtcaagcgtttgcactctgtgggaaaatcgctttcttcattaaaaatgttcttgaacctatatttgagcggttgtatgtagctacttataactactcaactattgcatcttaccat

SEQ ID NO: 3675 - DNA, 122 bp, Staphylococcus aureus; identical to SEQ ID NO: 3645

SEQ ID NO: 3676 - DNA, 123 bp, Staphylococcus aureus; identical to SEQ ID NO: 3648

SEQ ID NO: 3677 - DNA, 123 bp, Staphylococcus aureus; identical to SEQ ID NO: 3648

SEQ ID NO: 3678 - DNA, 122 bp, Staphylococcus aureus; identical to SEQ ID NO: 3645

SEQ ID NO: 3679 - DNA, 123 bp, Staphylococcus aureus; identical to SEQ ID NO: 3648

SEQ ID NO: 3680 - DNA, 484 bp, Salmonella typhimurium
aatttaaaacgtttggccttacttaacggagaaccattaagccttaggacgcttcacgccgtacttagaacgagcttgcttacggtctttaacgccggagcagtcaagcgcgccacgaacggtgtggtaacgaacacccgggaggtctttaacacgaccgccacggatcaggatcacggagtgctcctgcaggttgtgaccttcaccaccgatgtaggaagtcacttcaaaaccgttagtcagacgaacacggcaaactttacgcagtgcggagttcggttttttaggagtggtagtatatacacgagtacatacgccacgtttttgcgggcatgcttccagcgcaggcacgttgcttttcgcaactttgcgagcacgtggtttgcgtaccagctggttaactgttgccattaaatagctcctggttttagcttttgcttcgtaaacacgtaataaaacgccctcacacaatatgaggacgccg

SEQ ID NO: 3681 - DNA, 228 bp, Salmonella typhimurium
aattcatattccagctcggtgatgccgagcgtcgccagctctggcggcaacaggcgcagaatatcatcgccttgctgaataccgtcaacctgctccggcaccgttgcgggttcgcgtaccagtgtacgaaaggtttccatcggcgcgtcttttttcggtaccgatttggcttcccgcgaacgtcccagttgttccgccagttgcattagctccggctgggcggcgaga

SEQ ID NO: 3682 - DNA, 348 bp, Salmonella typhimurium
aatttggaacctttatcgaaaatgtgaccataacaggatgccccaggtcatcagggcaacgaaaatagacagtagcaccgcagccgatcccatatctttcgcacggccggaaagctcatggtattcagaaccgatgcggtccacgaccgcttcaatagcgctgttgaggatttcaacaatcatgataagtaaaacggaacctatcaataacacacgggtaatcgcatccacatccagccagcaggcgatgatgacgcccagcaataccgcgaggctttcctggcgaaacgccgcttcgtgagtccatgcggcgcgaaatcctttccaggaatatcctgccgctttgat

SEQ ID NO: 3683 - DNA, 432 bp, Salmonella typhimurium
aattacgcctgtttatggcaaaagcccaggacagtggaagccacttcacggaaatgaaatcagaaggcgtcggcgtcgacgcaggaggagtaaaaagagaagaatgtgaaacaggtcgcttgattacatgaaaacgcccgtaaaaaactgctgcttttgcgggcatatgcacaaagctaacacgattcagttactttacactgtgtacaggtcatgattttgcttactggcaacgcaagcaaacgaaaaggtaccctcccgtaggggggagggatttacctcaggaaagtaaagttccccagttttcaacccagggattggactggctctccggctccggatgttcgctggcgtcaatgaataacatctcccccacccgctgcgcgctttgctcttgcaacagggcatcaaactgtttgccgccattacaga

SEQ ID NO: 3684 - DNA, 432 bp, Salmonella typhimurium; identical to SEQ ID NO: 3683

SEQ ID NO: 3685 - DNA, 291 bp, Salmonella typhimurium
cgttgggttttacggctttgccgtttaatatagtgtgctattgtagctggtcttaaccgggagcaggaacagagaatctcccgtaaaacattttgaggaaagtcaaaacgtcatgacgcgcatgaaatatctggtggcagcagccacgttgagcctgttttggcgggttgctcgggttcaaaggaagaggtgcccgataatccgccgaatgaaatctacgcgactgctcagcaaaagctgcaggacggtaactggaaacaggcaataacgcaattggaagcgttagataat

SEQ ID NO: 3686 - DNA, 266 bp, Salmonella typhimurium
  misc_feature (1)...(266): n = A,T,C or G
attggtcacaacatcggcaagttgcgctaaccaatcttctcgcaatggggtatttagggttacaatatgcgccattttgtggcttagctaccagttaacaatttcagagggccttatggcgacttactatagcaacgattttcgttccggtcttaaaatcatgttggatggcgaaccttatgcggttgaatccagtgaattcgtgaaaccgggtaaaggccaggcgtttgcccgcnttaagctgcgccgtctgctgaccggcacgc

SEQ ID NO: 3687 - DNA, 270 bp, Salmonella typhimurium
accgtaaataaggagtaaccgatgatttgcccacgctgtgccgatgcacatattgaactcatggcgacttcgccggtaaaaggagtctggacggtatatcagtgtcagcattgtctgtatacctggcgcgataccgaaccgttacgccgtaccagccgcgaacactatccacaagcgtttcgcatgacgcaaaaagatattgatgacgcgccaatggtgccgagtatcccgccgctgctggcagaagacaaacggtaaaaaaaaggccag

SEQ ID NO: 3688 - DNA, 326 bp, Salmonella typhimurium
cgcatttttagcgattttctccagcattctggagaaataggcaaaacattggcagaaatgtgcattgagagacatccctcacaagaccacaatgatgaccatcaggcagacagccgcctgccctctttttacccacataagggaatgagcaatgaacaatttcaaattacatacccctacccgcattctgtttggtaaaggcgctatcgtcgatcttcgcgatcaaatcccgcaggacgcccgcgtgctgattacctatggcggcggtagcgtgaaaaagaccggcgtactggcgcaagttcaggaagcgttaaaaggactggatg

SEQ ID NO: 3689 - DNA, 564 bp, Salmonella typhimurium
  misc_feature (1)...(564): n = A,T,C or G
ggcccgcttnataaagcgctcagaattactatcacacgcccgaacttaaggcggaacagttcccgtggccggaagcgcttaattaaagccagcgcccgtttacaatgaggaaagaagatgatcgcggagtttgaatcacgcattctggcattaattgacgatatggtagagcacgccagcgacgatgagctttttgccagtggatacctgcgtggccacctgacgttagccattgccgagctggagagcggtgatgaccactccgttgaggcggtctatgccaacgttagccaaagtctggaaaaagcgatcggcgccggcgaactgtcgccgcgcgatcaggcgttagtcaaagcgatgtgggacaatttgttcgacaaggcaaaacaataacgccgtgggccggaaggcgacgcttgccgccttccgctattgactgacccattacttcaccgcttttccttcaataactttctcacccataaccgatttggatttaacgccgncagcgtaccggcattcagtggaatcggtngttactcatctgcgccgccagaattcttg

SEQ ID NO: 3690 - DNA, 380 bp, Salmonella typhimurium
ataatccggaacatttcggccaaagcctgatctaagcgttgaccgagttggttttcggagaccgttgcggtgagttgtactcgttgtgccatatacagcttcttcgtttaacgttgggttttacggctttgccgtttaatatagtgtgctattgtagctggtcttaaccgggagcaggaacagagaatctcccgtaaaacattttgaggaaagtcaaaacgtcatgacgcgcatgaaatatctggtggcagcagccacgttgagcctgtttctggcgggttgctcgggttcaaaggaagaggtgcccgataatccgccgaatgaaatctacgcgactgctcagcaaaagctgcaggacggtaactggaaacaggcaataa

SEQ ID NO: 3691 - DNA, 291 bp, Salmonella typhimurium; identical to SEQ ID NO: 3685

SEQ ID NO: 3692 - DNA, 413 bp, Salmonella typhimurium
actcgttgtgccatatacagcttcttcgtttaacgttgggttttacggctttgccgtttaatatagtgtgctattgtagctggtcttaaccgggagcaggaacagagaatctcccgtaaaacattttgaggaaagtcaaaacgtcatgacgcgcatgaaatatctggtggcagcagccacgttgagcctgtttctggcgggttgctcgggttcaaaggaagaggtgcccgataatccgccgaatgaaatctacgcgactgctcagcaaaagctgcaggacggtaactggaaacaggcaataacgcaattggaagcgttagataatcgttatccattcggaccgtattctcagcaggtgcagttggatcttatctacgcctattacaaaaacgccgatttgccgctagcgcagg

SEQ ID NO: 3693 - DNA, 388 bp, Salmonella typhimurium
ctcctgcgccgaatcacgcagataatgaccggaggtgtcgtcttcttcgccgcgtcggctggaaacagtaagaatagcgatgcgggtcgggataaattcagcgctgacctgactcatctgaaatctccttattaaggattaaccgccaatgtaagataaattttgcgtaataccagtattgctctggtgaagaaagtgggtctgctttttctcccgcaacgcgtcggaaatacgttcctcaagcgcgtattgctgcgcgtcatcctgtaacaggtcgcgtaaactcacgccgccgtcgccaaacagacataaatgcagcttaccgacggacgaaacacgcaggcggttacaggtggcgcagaaatctttttcatacggcataatgagg

SEQ ID NO: 3694 - DNA, 473 bp, Salmonella typhimurium
aatttttaacatcgaagattccgtatagacgtgtgtgggtaataatctccgtatgatacatattattcgtaatcgaagcagcacactttgcaaggtgatcgcagcttacggttatgctataacaagcccctatatgtgccccattgcgggctaaagcaccactctcttggaacaggatgcaaaaatggttactttccacactaatcacggcgatatcgtaatcaaaacctttgatgataaagcgcctgaaacagttaaaaacttcctggactactgccgcgaaggtttttacaacaacaccattttccaccgtgtgattaacggttttatgattcagggcggcggctttgagccgggcatgaaacagaaagccaccaaagaggcgatcaaaaacgaagccaacaatggtctgaaaaatacccgtggtacgctggcgatggcgcgtactcaggcaccacactcggctaccgcgc

SEQ ID NO: 3695 - DNA, 174 bp, Salmonella typhimurium
attaacagtaccgcaggaaacgttgaaaaactgaggattctgtcaatgtagaacgaccccataaacaccaatatcgccagtacgatattcagtgcgatcaggaaatcaaccagataggtaggtaatggaatgacgaacatagaaatgatcatcaccattagtaccagaatcagt

SEQ ID NO: 3696 - DNA, 473 bp, Salmonella typhimurium; identical to SEQ ID NO: 3694

SEQ ID NO: 3697 - DNA, 151 bp, Salmonella typhimurium
aattttattatcggcatcgacaaactcatagggcgcataggtggcggaggtgccaaaatgtaatgttctggcggaaacggaagcggcgtgaacggagaggctggctaacagcatgacaataagtttttttttcatcttgatccctgatatc

SEQ ID NO: 3698 - DNA, 230 bp, Salmonella typhimurium
aattcgaaggtaatacccttttcgagcagcagaacagagattttgcgcacaaaagggctggtgtagctaccgatgagtttcatgccgtgtcctttttgccaaccagtaaaaatcatagtatggctcaaataagacgaaaagagacacaaaaggaggttgctgaatgacataacgtgagaggactcgcgacaaaatgtttgtcggatcgtattgacgttacccgggcttaa

SEQ ID NO: 3699 - DNA, 473 bp, Salmonella typhimurium; identical to SEQ ID NO: 3694

SEQ ID NO: 3700 - DNA, 360 bp, Salmonella typhimurium
gatccagagcgaatcgggtagtgaaggcagtcaacaaaaaaggcagtttgaaggggatagagtgattaagggctaataaaaaagtaacatggggctgtatttccccctctggatgagggggctttttttatcgatgataaaaaatctcgccatcataggctttgatgatttttccatcggtatcgttaatcagtacatacgcgccgcccatataggtccagtgagtaccggcatctggcgcgggcagattacgtaatttccactgtttaatattatactcatcggtgcggtacatttgcggaacggtatcgccgggcttgaagtgggtgaagtcggcgataaagctttttaactcatatt

SEQ ID NO: 3701 - DNA, 126 bp, Salmonella typhimurium
gatcgataatgccagacgaaagagcgtggtaattaacagtaccgcaggaaacgttgaaaaactgaggattctgtcaatgtagaacgaccccataaacaccaatatcgccagtacgatattcagtgc

SEQ ID NO: 3702 - DNA, 275 bp, Salmonella typhimurium
gatccatatagttaaaaaagtaaagaataaaggccaaaggaatgattttcctttttacaatacgaattgcatcgtataaattttcttgtggactactcattttgcatcaccttttatgattcaatgaataagggtattgaccggaatcgatgttacgtaaaaaacaatacaattcaaaagctaatgtgtcatatctgatatatcagcaagcaaacttaatgaaatatacaataacaacaataaagtatgtaaattttcttatatctgatatatta

SEQ ID NO: 3703 - DNA, 179 bp, Salmonella typhimurium
gatcaaggctaaacaaagacagagcggaactcaccaccatgagaacaatgaataagccaaaggccataaataattttgaacgtattttaatgttatgcaaaaacatattttctccctgggattgcatatcctcatacaggaagatttatcggcaataatgttactaactttatgatatt

SEQ ID NO: 3704 - DNA, 389 bp, Salmonella typhimurium
cctcctgcgccgaatcacgcagataatgaccggaggtgtcgtcttcttcgccgcgtcggctggaaacagtaagaatagcgatgcgggtcgggataaattcagcgctgacctgactcatctgaaatctccttattaaggattaaccgccaatgtaagataaattttgcgtaataccagtattgctctggtgaagaaagtgggtctgctttttctcccgcaacgcgtcggaaatacgttcctcaagcgcgtattgctgcgcgtcatcctgtaacaggtcgcgtaaactcacgccgccgtcgccaaacagacataaatgcagcttaccgacggacgaaacacgcaggcggttacaggtggcgcagaaatctttttcatacggcataatgagg

SEQ ID NO: 3705 - DNA, 396 bp, Salmonella typhimurium
ccactcaccaacaatcgcgatgtcagcaaggggctgaaacgggaaagcccctcccgaggaaggggctttaataaggaaagggttatgatgcaccaggtcatcatactgattgttctgttactgataagtttcgcagcttactaacagacaatcagagggggggagagatcccctctcacccttattcctttactttaggtcgaaaaaaaagcagcgtcaaccgcgagatacgcgtcgaaacaaaatgtccgacgcgccttcaaaatcagcgcccgccgcgtctgtaacgcctgatgacgcggttttacttctcgctctcggtctggatctttttgatgatattggtcgtggaacaaccatcttcgaagttcagcaccatgacttcaccgccgttgg

SEQ ID NO: 3706 - DNA, 319 bp, Salmonella typhimurium
cctcctgcgccgaatcacgcagataatgaccggaggtgtcgtcttcttcgccgcgtcggctggaaacagtaagaatagcgatgcgggtcgggataaattcagcgctgacctgactcatctgaaatctccttattaaggattaaccgccaatgtaagataaattttgcgtaataccagtattgctctggtgaagaaagtgggtctgctttttctcccgcaacgcgtcggaaatacgttcctcaagcgcgtattgctgcgcgtcatcctgtaacaggtcgcgtaaactcacgccgccgtcgccaaacagacataaatgcag

SEQ ID NO: 3707 - DNA, 481 bp, Salmonella typhimurium
ccaaaataaggaaagggttatgatgaaggtagtcatcatactggtgatactcttagtgattagcctaccagcttactaagacaccagggggaggaggaatcctcccttaccctcactcctgacgttaagccacatcaagaataatgtcaatccatcagcgctgggcttgcgaggcgcttagcggaaaacgacctccgcccagcgcgccagtcctgcggtgacggagccgaaatcatcgccgccagcgacgggtatgcccggtaactgttcggaaagcgcttttttaatcaatggcgaacgggcgctgccgccggtcagatagatgacatccggtttttcctgcgcgctgtccagcgccagttgcacctgttccagaatgcgcgtcagcggttgatccagcgccgcttccagtccttgctggctgatagcgaccgccaggtcgtcgctgataaatggcagcctcgccgtaacatccgcctgg

SEQ ID NO: 3708 - DNA, 319 bp, Salmonella typhimurium; identical to SEQ ID NO: 3706

SEQ ID NO: 3709 - DNA, 389 bp, Salmonella typhimurium; identical to SEQ ID NO: 3704

SEQ ID NO: 3710 - DNA, 389 bp, Salmonella typhimurium; identical to SEQ ID NO: 3704

SEQ ID NO: 3711 - DNA, 570 bp, Salmonella typhimurium
ccggaatcctgcctgtgccagggcaacggcaaaataactataaaccaggctggaggaggtgaagccatgatagaacaccacacagggaagcggcacggcgcgtttcccttccgggaaggcatgtagtacgacgcctccggctaattgtcgtgtttcaatcgctatcattattctctcctttttatccggtatgccacggagaaatacttaacgcaagtttatggatagcgcaataattcataatgtttgagaactgggttacactttcgcaacgttttcattcgaaaatcgcgtgacaggtaacacttcgggaacattccccctaaagggaaatcaataaggcattacactatgattatcaggaaacgagatagagttatgcgtcggtttgcttcattgatagcagcgctgttattaagcgcgtgtagcgtgctgcagggtacgccgcaacctgcgccgcctgtcgccgatcacccgcaggaaatccgtcgcgatcaaacgcaaggactacagcggatggggaccgtaagcgcgctggttcggggctccccggatgatgcaatagatgaa

SEQ ID NO: 3712 - DNA, 292 bp, Salmonella typhimurium
cgttgggttttacggctttgccgtttaatatagtgtgctattgtagctggtcttaaccgggagcaggaacagagaatctcccgtaaaacattttgaggaaagtcaaaacgtcatgacgcgcatgaaatatctggtggcagcagccacgttgagcctgtttctggcgggttgctcgggttcaaaggaagaggtgcccgataatccgccgaatgaaatctacgcgactgctcagcaaaagctgcaggacggtaactggaaacaggcaataacgcaattggaagcgttagataat

SEQ ID NO: 3713 - DNA, 292 bp, Salmonella typhimurium; identical to SEQ ID NO: 3712

SEQ ID NO: 3714 - DNA, 278 bp, Salmonella typhimurium
agtatccctctgcaatcaaatttgatgtaaatggtgtgttaaatcgattgtaaataaccaccgcttccggcaggatacggtcgccctggtaaacataacacccttgccacgttccggcagggtacaaaacggcacgctacggtagtgccaataaataaatttggagaaccttgatggctattagcacaccgatgttggtgacattctgtgtctatatttttggcatgatattgattgggtttatcgcctggcgctcaaccaaaaactttgatgactat

SEQ ID NO: 3715 - DNA, 278 bp, Salmonella typhimurium; identical to SEQ ID NO: 3714

SEQ ID NO: 3716 - DNA, 278 bp, Salmonella typhimurium; identical to SEQ ID NO: 3714

SEQ ID NO: 3717 - DNA, 292 bp, Salmonella typhimurium; identical to SEQ ID NO: 3712

SEQ ID NO: 3718 - DNA, 278 bp, Salmonella typhimurium; identical to SEQ ID NO: 3714

SEQ ID NO: 3719 - DNA, 305 bp, Salmonella typhimurium
gtagttaaataccgcctttttgaaaaaacgcatttcatcggggcgatgacgattcataaaccattcgtcgtcgcgataaacgttagtcacgatgtccgggttcgcattcaccaccccgaacaggtcgctggcaatgtcgctgtccagattatgcgtaaaaaccaaattcccgtcggtatcgtgcactcgcgcgccgttggaggtgatcatgtaagacttgatttcaagattatcgcggatttgccctacatcgacatgatgacgaccagtggcaaagacaaaatggatgccgcgtgcggtcaaca

SEQ ID NO: 3720 - DNA, 571 bp, Salmonella typhimurium
  misc_feature (1)...(571): n = A,T,C or G
gcgaacggttgccattgcaacaaggcggctatntgacgcttacgcagttgggcgtggtcttctggcacgatctggcagcgccgatcattgctggcattatcgccagtgtgatcgtcaactggctacgtgacaggaagtaacgcgttttgagcgtctgtccgccgtaatggcaacatgcgcccgaaccaggccgcaggggaaaccttgcggcctttttcggtttactgcgggtaaggcacccagtcgccgccattcagacgaacgtagggcttaccctggtactgaatcaccaccgcattagcgttttctgaaaccggcgcggtttgcggcagattgctggtcagcttgttccagttcacactgtcttcggtaaagagcttaccgtccacggcgcgtacgaccagttcggaaatcgccaggtagctgctcggctgattaatatcaatcggcgcgccctcatgcggggctttcatgccaaaaaatttcacgcccgccgggacgttggtgatggaggggctgggaatatcgcgcaggcctgagatctgcattctgtcgcccttcagcgcgccgc

SEQ ID NO: 3721 - DNA, 725 bp, Salmonella typhimurium
gaaagtgggatcaactatcaaaactgaacgtgaaatcgaactggacggcgtgacatatccgtatgtcactattgatgtgtcatcaaaatcgcatcctttttataccggtagacagaaaacgtttgatagcgaaagtagcgccgcacgcttccagaaacgtttcggtcattttatcggcgctaaacgggggtaaatgaaatgcaggtgttaaactcacttcgcaatgcaaaacaacggcatccggattgccagatagtcaaacgcaaaggacgcttatacgtgatttgtaaaacaaatccgcgttttaaggcggttcaggggcgtaaaaaaagacgttaaaaaaccaacagttcagggaaagcagtgcgtaccagggagggtgcgcacttttttattaccggctggcttctgcgcgggccagcgtaaaaatatcgtagaaggaaagttcgcccttacgggcaaccattttttgcagctggactttatgttcattatccacctgtggagactgaagaatcgtctcaatgagcgtggggggaacaaagcgggtgttgtaccattcgccgttgtaacagacccggaggtccagcacatcgatgtcgttatagtgataacgcggggcgatgtcgaaaaagaagaagccattaaatgcgataaataacaccactaacagccacactgaccccaccagcgtttctgattgcagcatgaccgccagcgtcgca

SEQ ID NO: 3722 - DNA, 693 bp, Salmonella typhimurium
gcgtcggctccaggtcgccgccgaggattttcataaaagtggactttccgctaccgttggcgccgatcaggccgtaacggttgccgccgccaaatttgacggaaatgttttcgaacagcggcttactgccgaactgcatggtaacgttgctggaaactaacacaggcttatcctgaaaaaagatgtgacaaaccgcttattatgccacaagtctgaaataagatcgcgccctgtacaaagggctacactgaaccgtaagggaaaaaaacgtgatttcgtacacatctgaattccctgtttactggaatgcacctataatgcgctcccaacatgacagaattctcaacctactagcctgcttggcacagaatctcgcataacatgaatatgaaattaacaacgcttttcgcggcggctttcgctgtagttggtttttgtaaaacagcctcagcagtcacttacccgctgcctaccgatggtagccgtttaattgggcaaaatcaggtcatcaccgttccggagggcaatacccagccgctggagtattttgccgcggagtaccagatggggctctccaacatgctggaagccaaccctggcgtggataccttcctgccgaagggcggtaccgtgctgaatattccgcagcagctgatcctgccggataccgtacacgaaggcattatcatcaat

SEQ ID NO: 3723 - DNA, 405 bp, Salmonella typhimurium
ctatcgccaataacgaattgcccgaacgtggcgataatttcaccggcatcggcttcaatcaagataagacgactggtactgatcgataatgccagacgaaagagcgtggtaattaacagtaccgcaggaaacgttgaaaaactgaggattctgtcaatgtagaacgaccccataaacaccaatatcgccagtacgatattcagtgcgatcaggaaatcaaccagataggtaggtaatggaatgacgaacatagaaatgatcatcaccattagtaccagaatcagtaattcaggtcgtaaacgagcactgttaagtagagaaagcagcactataggtatcctgttaatattaaattaagacagcttttcaatagtacgacgctgttctgccatttcatgcttgtag

SEQ ID NO: 3724 - DNA, 161 bp, Salmonella typhimurium
cctgcgacactttcttaccgcgaatcaggtcagcaacaaggcgaaccttctgagcagaagaacgagcatggcgatgtttagcgatagtttccatctcttcctcctaccttatttcttcttcgcttttttatcagcagcgtggccgcgataagtacgagtcg

SEQ ID NO: 3725 - DNA, 270 bp, Salmonella typhimurium
gttctctttaacgatggctttcgccaccacttcatgcccggcctcctgcgccgaatcacgcagataatgaccggaggtgtcgtcttcttcgccgcgtcggctggaaacagtaagaatagcgatgcgggtcgggataaattcagcgctgacctgactcatctgaaatctccttattaaggattaaccgccaatgtaagataaattttgcgtaataccagtattgctctggtgaagaaagtgggtctgctttttctcccgcaacgcgtcgga

SEQ ID NO: 3726 - DNA, 405 bp, Salmonella typhimurium; identical to SEQ ID NO: 3723

SEQ ID NO: 3727 - DNA, 352 bp, Salmonella typhimurium
tataaaaataatatgaaagactaattgtttagtatttgttatgtaataacagaaagatgttgacgctggagacctcgaaaaacgaggaggaacaggggacgatgtaagaaaaaaatttttatcgcttaccaggacgagttgtaaatattaattttatgtgaaatatttacatttaatggaagtgaaaataagtaatttcttaaaaaatcttattcaccaaaacgttacttcgttaaaaaatgtcgtggaaagtaacgtttagctgctggatcagccgaagaaagctttgcctgtggggaaggttaaggagggtgataagttgtttaagccggtaaactacacgatgataagg

SEQ ID NO: 3728 - DNA, 342 bp, Salmonella typhimurium
gttctacactggcacaaagcgacaggaggaaaatgatgaaggtgaatgatcgggtaaccgttaaaacggacggcggtccccgccgaccgggcgtggtactggcagtggaagaatttagtgaaggcacaatgtacctggtttcgctggaggattacccgctcggcatctggttcttcaatgagtcaggtcaccaggatggtatttttgtcgagaaggcggagcaggactaattgagccggactggaggtacattgccagtccggatgtctcagcgcatgttaacaaaaatgccgttagtgacgttatctgtcagccgtactacgtgatagatcacttgtttat

SEQ ID NO: 3729 - DNA, 896 bp, Salmonella typhimurium
tacctactttttcagaggtgacttgtaagcgacgagccatctgggaagagaggcgcatcagaatatccgggttgacctggattaattggcgaaattttttgtaggaaatttcagcgacctcacatgcggttttcgcacgtacccaggcgctgcgttcctggccttcttcaaacaggcccagttcaccaataaaatcaccctgattcagataagaaaggatcatttctttcccttcttcatctttgatcagcactgccacggagcctttaacgatgtagtacagcgtttcttattgagctgcgggtctatgacctggaagatgaagataatcaccaggaatttacctgtcagtcggacatcagttgcgatgataaaggctgccacctttgcccacgtagcgccctgccgatgattaacggcggcaccaccttaaaatggcggctcaccgactctcacacccaatacggtattttgctggcgacgctgccctatggacgccatctcagccacgatcaacaacagttggtggacacgctggttgaacagcttaccgcgactctggcgctcgacaggcatcaggagcgccagcagcagttgattgtcatggaagagcgtgccaccattgcccgcgaactgcatgattctattgcccagtcgctctcttgtatgaagatgcaggtgagctgcctgcaaatgcagggcgacgtgttaccggaaagcagccgtgagttactcagccaaattcgcaatgagctaaactgctcctgggcgcaactgcgcgaactgttaaccactttccggttacagttgacggaacccgggctacgtccggcgctggaggcaagctgccaggagttcagcgcccggtttggctttacggtaaaactggattatca

SEQ ID NO: 3730 - DNA, 485 bp, Salmonella typhimurium
ctcccgctggtgcagggcattgacgatgtaaaacaccgaaacaaaggcgattaagagccaaatgagtaacgctaacgctctgaataagtagcgcgagactttcagcgtagttcgaaaggaagcaaggtatttcaaaggggcgaagctccgcctcaggatgtaaatagagtgtgactaaggtagcggtaaatgacgtagcccgcaacggcaaagaaaaagggccggatatccggccctcgcacagcaataacattactcgtcagcgtcatccgcaacgtcgtcatcgctttccgcttccggggcgatatcctcatccccttccgccacgctgccgtcgatagcgtcgagttcttcgtcatctaccggttcagcaacgcgttgcagacccaccacgttttcatcttccgccgtgcggataaggataacgccctgggtattacgtcccactacgctgatctcggacacacgggtacgcaccagagtac

SEQ ID NO: 3731 - DNA, 176 bp, Salmonella typhimurium
caatagcattcggtattgatagtcgttttgcaacctggtaaatccaggtttctaccgcagccgcaccacgaggaggaattgaaaatataggagtaacagtaaatatgatttttttaatcataatagctataatccagaatagttaactttatagaaaaagaaatgttataaaaaaa

SEQ ID NO: 3732 - DNA, 241 bp, Salmonella typhimurium
accagggcagcatgataataacggcgatagaaagaagaaagttaaggagtagtcgtgaaaagattttagataacacggaaccatgccagacaaatatcaggcgaatccagtgctgttgtggtctaacgatcatgattatcttcagctggtgaaaaagcactgtcattaaacgtgatccagatcaaggttgcaagcttctggtgatacacgggttccctgccctgtagaacatttttttgca

SEQ ID NO: 3733 - DNA, 285 bp, Salmonella typhimurium
atttcaccggcatcggcttcaatcaagataagacgactggtactgatcgataatgccagacgaaagagcgtggtaattaacagtaccgcaggaaacgttgaaaaactgaggattctgtcaatgtagaacgaccccataaacaccaatatcgccagtacgatattcagtgcgatcaggaaatcaaccagataggtaggtaatggaatgacgaacatagaaatgatcatcaccattagtaccagaatcagtaattcaggtcgtaaacgagcactgttaagtagagaa

SEQ ID NO: 3734 - DNA, 319 bp, Salmonella typhimurium
tactggcatcgatcatcacaggtgaaccacatgcatatatatcgaagaactctagagaatcaaaatcatccatcacggcatgatggacaaatccctttcttcccccccattcggcgtcatcaccagaaacaacagggatataatgaacgttgtcgtgctgttcactccactgctgcggtaatgcagagtaaaaatctttactatattgcattccccagtaaatgtagatctcacgacgacattttccctgaatgagatgctcaaccattgatttaactggagcgaatccagtaccgcctgcaaggaagattataggtct

SEQ ID NO: 3735 - DNA, 165 bp, Salmonella typhimurium
caccggcatcggcttcaatcaagataagacgactggtactgatcgataatgccagacgaaagagcgtggtaattaacagtaccgcaggaaacgttgaaaaactgaggattctgtcaatgtagaacgaccccataaacaccaatatcgccagtacgatattcagtg

SEQ ID NO: 3736 - DNA, 833 bp, Salmonella typhimurium
gagtagttaaataccgcctctttgaaaaaacgcatttcatcggggcgatgacgattcataaaccattcgtcgtcgcgataaacgttagtcacgatgtccgggttcgcattcaccaccccgaacaggtcgctggcaatgtcgctgtccagattatgcgtaaaaaccaaattcccgtcggtatcgtgcactcgcgcgccgttggaggtgatcatgtaagacttgatttcaagattatcgcggatttgccctacatcgacatgatgacgaccagtggcaaagacaaaatggatgccgcgtgcggtcaacagcttcagagtctctttggcataaggggacaacgtatggtcgggggagagcagcgtgccatctaaatcagacgcaacaacctgatacataataaaatttaacctctaagcaaagcgatttccgctggataaattaggcttgttgaaaaattcaacaatggcgttaagcgcgactgagcgcatggcgtccttttcaaaaaggatctcatggtacgcgcctttgataaccagcggttttccccttcacaagggtatcccgccgcggcgcgaatttcacaaaaacgatcgtgggtgcggttatccactacccgctcttcttccgcctgaatcagtagcgtaggcgtcgtgtcatcgctcgccccagccagtacctgctcacccgcgtcagcctgcaggtagccagtggtgctgaagctgtccgggcactggcggtacagttgcccggtctccggcagaaactgaacgacggctggtatcaggtacgcatagccggagacgatgttacggctgataccctgacaaccagcc

SEQ ID NO: 3737 - DNA, 166 bp, Salmonella typhimurium
atagcattcggtattgatagtcgttttgcaacctggtaaatccaggtttctaccgcagccgcaccacgaggaggaattgaaaatataggagtaacagtaaatatgatttttttaatcataatagctataatccagaatagttaactttatagaaaaagaaatgtta

SEQ ID NO: 3738 - DNA, 161 bp, Salmonella typhimurium
tgtttaaacgtaaatccgttacgacgaagaacggagccagactgagacatgtaaaaacaaccttgcaaaaaaacggcgacagcgccgggtgaaaacaatacctgagaagggatatccatacaaacagatgaagattgcggccgtaacgtctataatcagcg

SEQ ID NO: 3739 - DNA, 288 bp, Salmonella typhimurium
taccatccagagaaaatcgggccgcgacttccgcgacacgttctgaacctttggtaataacgataaactggaccacggtgacaatagagaagacaacaaaacccaccgccaggctatcgccaataacgaattgcccgaacgtggcgataatttcaccggcatcggcttcaatcaagataagacgactggtactgatcgataatgccagacgaaagagcgtggtaattaacagtaccgcaggaaacgttgaaaaactgaggattctgtcaatgtagaacgaccccataa

SEQ ID NO: 3740 - DNA, 330 bp, Salmonella typhimurium
aatagaaatgttctacagagagatttttcatcataaagtcctttttactggcatcgatcatcacaggtgaaccacatgcatatatatcgaagaactctagagaatcaaaatcatccatcacggcatgatggacaaatccctttcttcccccccattcggcgtcatcaccagaaacaacagggatataatgaacgttgtcgtgctgttcactccactgctgcggtaatgcagagtaaaaatctttactatattgcattccccagtaaatgtagatctcacgacgacattttccctgaatgagatgctcaaccattgatttaactggagcga

SEQ ID NO: 3741 - DNA, 473 bp, Salmonella typhimurium
caccacagcaggaaatagtatgaaaataaataatggccccgtattatgcccccattgtggctgcctgagcgcttattatgaaatagatcggctggcggcgataagagaaaaagtgaataaagaaggcggatcagcggcgtgggattcaacattgcaggcgcataaaaaaaaggccttttgcctgatgtgccataaatccattgatgaggtcgtcatcgggcagtcagatgcgcctgagtctacgaagtaattttgcacagcctacagaacaggtctgcagactgtgcaaagtctgtgttgctaacgctcgccttagcctttgatgtttagcacccggcgggctttttctacaatattttccacggtaaagccaaaatacgggaacagtttgtcagccggagcggattcaccgtatcccgtcatgccgataattgcgccttttaggccaacatatttataccagtagtcggcta

SEQ ID NO: 3742 - DNA, 209 bp, Salmonella typhimurium
tcatagcctacccacgcggagtcaaacagaatgtaatcgcagagatgcccgattttatccaccacctgacgggcgttgtaaatagtgccgtcataggtacccagctgaatgatcgccaggcggaacggacgcgacgcatcggcgctttccggcatcacgtcacgaatctggtcgcgcaggtacgtttcatcaaaacagtgcgcatcaat

SEQ ID NO: 3743 - DNA, 473 bp, Salmonella typhimurium; identical to SEQ ID NO: 3741

SEQ ID NO: 3744 - DNA, 268 bp, Salmonella typhimurium
tctgaaatctccttattaaggattaaccgccaatgtaagataaattttgcgtaataccagtattgctctggtgaagaaagtgggtctgctttttctcccgcaacgcgtcggaaatacgttcctcaagcgcgtattgctgcgcgtcatcctgtaacaggtcgcgtaaactcacgccgccgtcgccaaacagacataaatgcagcttaccgacggacgaaacacgcaggcggttacaggtggcgcagaaatctttttcatacggcataat

SEQ ID NO: 3745 - DNA, 440 bp, Salmonella typhimurium
aatagagaagacaacaaaacccaccgccaggctatcgccaataacgaattgcccgaacgtggcgataatttcaccggcatcggcttcaatcaagataagacgactggtactgatcgataatgccagacgaaagagcgtggtaattaacagtaccgcaggaaacgttgaaaaactgaggattctgtcaatgtagaacgaccccataaacaccaatatcgccagtacgatattcagtgcgatcaggaaatcaaccagataggtaggtaatggaatgacgaacatagaaatgatcatcaccattagtaccagaatcagtaattcaggtcgtaaacgagcactgttaagtagagaaagcagcactataggtatcctgttaatattaaattaagacagcttttcaatagtacgacgctgttctgccatttcatgcttgtaggcaa

SEQ ID NO: 3746 - DNA, 258 bp, Salmonella typhimurium
tgacaatccagatagagctggcaggggaggcatgtaaatcagtcgcaatggttggcagcgcgacattagcgattgcgccatccagaaccgccatcgaaataccgataataatcgtcaggatagcgccgtatctctgcgggaggggcaggccatcggcccgtgttttttccataagtattttgtaataaggggagttatgagctgaataataatgttagcattaatactgagttgttatgtcgcagatttgtaacgaag

SEQ ID NO: 3747 - DNA, 146 bp, Salmonella typhimurium
gtcgtcttcttcgccgcgtcggctggaaacagtaagaatagcgatgcgggtcgggataaattcagcgctgacctgactcatctgaaatctccttattaaggattaaccgccaatgtaagataaattttgcgtaataccagtattgc

SEQ ID NO: 3748 - DNA, 330 bp, Salmonella typhimurium; identical to SEQ ID NO: 3740

SEQ ID NO: 3749 - DNA, 352 bp, Salmonella typhimurium; identical to SEQ ID NO: 3727

SEQ ID NO: 3750 - DNA, 136 bp, Salmonella typhimurium
cgccgttggaggtgatcatgtaagacttgatttcaagattatcgcggatttgccctacatcgacatgatgacgaccagtggcaaagacaaaatggatgccgcgtgcggtcaacagcttcagagtctctttggcata

SEQ ID NO: 3751 - DNA, 571 bp, Salmonella typhimurium
ggctaacgttacccgcatcatctgcgattgcgccttcacccgaataggcccggccaaggccagaggaagaaaattcgtttaactgaaagcctgcagaccaggcctgggtggagatgattgccactgcgactgcgagagcagactttgtaaacagggttttctggctcatgaccataacctcattgattatttttatacaaactatgttacatgctgtaacaggagcgcgaagtgtagggtctgcggtacgacttagaaatcagaccagtggcgagagtataggtctgaccagctagaatgttgcaagtatgtttataagttttttcaattgtgatcttagaaacgagatctggctggcaaaatcggcgggcttaacggtcacccgatcgcgcgatttttgttttagatcatttttaagtgtgatttcggtcacttaacgcgtttcccaccattaacgactggagaggcgaatgccgggagcgtaaaatatccccatcgtttatctggcaccctgggtgcaaatacagaggaaatctacaatgagtaaatgcagtgctgatgaaaccccggt

SEQ ID NO: 3752 - DNA, 720 bp, Salmonella typhimurium
gagccccaattcctgggcgggttccgccggaatagacttgctttttaccagtatgcttaatggtaaattcagtaatttgtagtaaattcgtggccagccggacataaacgatgtaaagcctctggttaataatgcaaatgcggtgcaaggatatcagaaagtttagcgaatttctgttgtatcccgtcatacttcgcgctgcgttacggcagtccgaatcgtgcagggcaaccgtataatgtcattgacgttaataatgtaaaaaggttcttttgatggccaataataccactggattcaccagaattatcaaagcggcaggatattcctggaaaggatttcgcgccgcatggactcacgaagcggcgtttcgccaggaaagcctcgcggtattgctgggcgtcatcatcgcctgctggctggatgtggatgcgattacccgtgtgttattgataggttccgttttacttatcatgattgttgaaatcctcaacagcgctattgaagcggtcgtggaccgcatcggttctgaataccatgagctttccggccgtgcgaaagatatgggatcggctgcggtgctactgtctattttcgttgccctgatgacctggggcatcctgttatggtcacattttcgataaaacgcagacgaatcgtgctactgctgttaatgactaacgggcgtgccgacaaggtatgcgggaacatcggcaccag

SEQ ID NO: 3753 - DNA, 188 bp, Salmonella typhimurium
agagcctgcgacactttcttaccgcgaatcaggtcagcaacaaggcgaaccttctgagcagaagaacgagcatggcgatgtttagcgatagtttccatctcttcctcctaccttatttcttcttcgcttttttatcagcagcgtggccgcgataagtacgagtcggtgcgaattcacccagtttgtga

SEQ ID NO: 3754 - DNA, 339 bp, Salmonella typhimurium
accgtacccaacgccactaaatccagcagctccgccagattcggcggcgcgatgttgcgctcgtcgaaccatcctttgtcgcgcaaaaatgttcgcaacgccagcatcaggtaaaacgccacgccgacgcccgccagcgacttagacgggaattcgcagtcgcgcagattgggattaataatcgcttcggcatccggcaacgtgtcgcctggcaggtggtgatcggtcacgatcaccggaatccccaacgtctttgcatgcgctacgccggcgtgggatgaaatgccgttgtctacggtgacgataagctgcgcgccgcgcgccttcgcctgatcgacc

SEQ ID NO: 3755 - DNA, 188 bp, Salmonella typhimurium; identical to SEQ ID NO: 3753

SEQ ID NO: 3756 - DNA, 188 bp, Salmonella typhimurium
gtgtgcgacaaaaaactgtttaaacgtaaatccgttacgacgaagaacggagccagactgagacatgtaaaaacaaccttgcaaaaaaacggcgacagcgccgggtgaaaacaatacctgagaagggatatccatacaaacagatgaagattgcggccgtaacgtctataatcagcgccccacacaga

SEQ ID NO: 3757 - DNA, 319 bp, Salmonella typhimurium
tgatcgataatgccagacgaaagagcgtggtaattaacagtaccgcaggaaacgttgaaaaactgaggattctgtcaatgtagaacgaccccataaacaccaatatcgccagtacgatattcagtgcgatcaggaaatcaaccagataggtaggtaatggaatgacgaacatagaaatgatcatcaccattagtaccagaatcagtaattcaggtcgtaaacgagcactgttaagtagagaaagcagcactataggtatcctgttaatattaaattaagacagcttttcaatagtacgacgctgttctgccatttcatg

SEQ ID NO: 3758 - DNA, 439 bp, Salmonella typhimurium
gccagttatcgcttgtaacaacttcagctgcgtggcttaaaaaactgaatgccagcgttgaggccataacagcagcggtaactttgcgcatcgcttgctcccaaaatcttttctgtcgcgattcaacgagagacagtttacgattcgggctgcaaacatgcgtcagggggtgtaaaacaacgtaaagtcatggattagcgacgcctgatgacgtaatttctgcctcggaggtacgtaaacaatgaataaaatcctgttagttgatgatgaccgagagctgacttccctgttaaaagagctcctcgaaatggaaggttttaatgtcctggtggcccacgacggcgagcaggcgcttgagcttttggatgacagcatcgatttacttttgcttgacgtcatgatgccgaagaaaaacggtatcgatacgttgaaagcgctt

SEQ ID NO: 3759 - DNA, 393 bp, Salmonella typhimurium
tgaagcatgcaacatgaaggcgttgttcaggcgtttgtgcgggcaaaaacgcgcctggccgcgaatatggttatcttttttgtggatctgcgaggtttgtgagaaccccgcctgttgcttatgtaccgattgggtcacaaagatcccagggtcgttttcattaagctccagccgcaacggcgaggtatccgccatcatattgataaactgctcatagcctacccacgcggagtcaaacagaatgtaatcgcagagatgcccgattttatccaccacctgacgggcgttgtaaatagtgccgtcataggtacccagctgaatgatcgccaggcggaacggacgcgacgcatcggcgctttccggcatcacgtcacgaatctggtcgcgcaggta

SEQ ID NO: 3760 - DNA, 442 bp, Salmonella typhimurium
atgacgattcataaaccattcgtcgtcgcgataaacgttagtcacgatgtccgggttcgcattcaccaccccgaacaggtcgctggcaatgtcgctgtccagattatgcgtaaaaaccaaattcccgtcggtatcgtgcactcgcgcgccgttggaggtgatcatgtaagacttgatttcaagattatcgcggatttgccctacatcgacatgatgacgaccagtggcaaagacaaaatggatgccgcgtgcggtcaacagcttcagagtctctttggcataaggggacaacgtatggtcgggggagagcagcgtgccatctaaatcagacgcaacaacctgatacataataaaatttaacctctaagcaaagcgatttccgctggataaattaggcttgttgaaaaattcaacaatggcgttaagcgcgactgagcgcatg

SEQ ID NO: 3761 - DNA, 236 bp, Salmonella typhimurium
agatttcgcagtagtggtaatggtaatatccaaaccacgaacgcggtcgactttatcgtagtcgatttctgggaagatgatctgctcacggacacccatgctgtagttaccacgaccgtcgaatgacttagcggacaagccacggaagtcacggatacgaggaacagcaatagtgatcaggcgctcaaagaactcccacatgcgttcgccacgcagagttactttacagccgatcg

SEQ ID NO: 3762 - DNA, 297 bp, Salmonella typhimurium
tacaataataagtgaccgggatgacaatctttctgcaataaattttaatgtggtatgcggtagtttcaaaagggcgagatccagagcgaatcgggtagtgaaggcagtcaacaaaaaaggcagtttgaaggggatagagtgattaagggctaataaaaaagtaacatggggctgtatttccccctctggatgagggggctttttttatcgatgataaaaaatctcgccatcataggctttgatgatttttccatcggtatcgttaatcagtacatacgcgccgcccatataggtcca

SEQ ID NO: 3763 - DNA, 393 bp, Salmonella typhimurium
tgctaatcctgttaccagtggctgctgccagtggcgataagtcgtgtcttaccgggttggactcaagacgatagttaccggataaggcgcagcggtcgggctgaacggggggttcgtgcacacagcccagcttggagcgaacgacctacaccgaactgagatacctacagcgtgagctatgagaaagcgccacgcttcccgaagggagaaaggcggacaggtatccggtaagcggcagggtcggaacaggagagcgcacgagggagcttccagggggaaacgcctggtatctttatagtcctgtcgggtttcgccacctctgacttgagcgtcgatttttgtgatgctcgtcaggggggcggagcctatggaaaaacgccagcaacgcggcct

SEQ ID NO: 3764 - DNA, 356 bp, Salmonella typhimurium
cgaatcgcgtaacggttctctttaacgatggctttcgccaccacttcatgcccggcctcctgcgccgaatcacgcagataatgaccggaggtgtcgtcttcttcgccgcgtcggctggaaacagtaagaatagcgatgcgggtcgggataaattcagcgctgacctgactcatctgaaatctccttattaaggattaaccgccaatgtaagataaattttgcgtaataccagtattgctctggtgaagaaagtgggtctgctttttctcccgcaacgcgtcggaaatacgttcctcaagcgcgtattgctgcgcgtcatcctgtaacaggtcgcgtaaactcacgccgccgtcgcc

SEQ ID NO: 3765 - DNA, 225 bp, Salmonella typhimurium
ctctttgaaaaaacgcatttcatcggggcgatgacgattcataaaccattcgtcgtcgcgataaacgttagtcacgatgtccgggttcgcattcaccaccccgaacaggtcgctggcaatgtcgctgtccagattatgcgtaaaaaccaaattcccgtcggtatcgtgcactcgcgcgccgttggaggtgatcatgtaagacttgatttcaagattatcgcggat

SEQ ID NO: 3766 - DNA, 590 bp, Salmonella typhimurium
tgccaggttggaactgacaatcatgggcaacatttccggcgtcaaccccaccgcaactgccagcgcgaacagcgaagcctctacccagtctcccttactgaacccattgatcagcaggacaaccggcaccatgatcagcataaagcgtatcaacagccagctcacgctgttgactccgcgatcgaaagccgtctgggtacgcgtacccacaatggatttcgccagcgagccgaaccaggtacggcttcccgtcgcaaccacgaccccgtaaaggagtgaagcatgaaacgatatatactggctaccgtgatagcatctcttgttgcagccccggcaatggcgctggccgctggcaacaatattctcagcgtacatattctcgatcagcaaacaggtaaaccggcgcccggcgtggaggtggtactggagcagaaaaaggataacggatggacgcaattaaacaccgggcataccgaccaggatggacgtattaaagcactgtggcccgcaacggcttgtgagcgtcgcgggttattgtggtgttccattgctgcgttgctcgccagcctgaacatcttccaggtagtgtt

SEQ ID NO: 3767 - DNA, 154 bp, Salmonella typhimurium
tgtgcattgagagacatccctcacaagaccacaatgatgaccatcaggcagacagccgcctgccctctttttacccacataagggaatgagcaatgaacaatttcaaattacatacccctacccgcattctgtttggtaaaggcgctatcgtcg

SEQ ID NO: 3768 - DNA, 453 bp, Salmonella typhimurium
cacagcaggaaatagtatgaaaataaataatggccccgtattatgcccccattgtggctgcctgagcgcttattatgaaatagatcggctggcggcgataagagaaaaagtgaataaagaaggcggatcagcggcgtgggattcaacattgcaggcgcataaaaaaaaggccttttgcctgatgtgccataaatccattgatgaggtcgtcatcgggcagtcagatgcgcctgagtctacgaagtaattttgcacagcctacagaacaggtctgcagactgtgcaaagtctgtgttgctaacgctcgccttagcctttgatgtttagcacccggcgggctttttctacaatattttccacggtaaagccaaaatacgggaacagtttgtcagccggagcggattcaccgtatcccgtcatgccgataattgcgccttttaggccaacatattt

SEQ ID NO: 3769 - DNA, 607 bp, Salmonella typhimurium
agtgtgtttgcacgtttagcctatgatgattaaacaggttcttcagtatgaatttatcccgtcaggaacaacgtaccttacacgttctcgccaaaggcggacgcattacgcacatccgcgatgcgtcaggccgcgtcaccgccgttgagtgctatagccggcgaagggctgttgctcgccgattgcacgctcgctgtattcaaaaaactcaaaaccaaaaagctgatcaaatccgttaacggtcagccctaccgcattaatacaaccgggctgaacaacgttcgcgcccagcctgacaatcgctaaggagatgatgatggatatcagcgccgttatttttgcaacgcatcgcattcggctattacccgatgaaggcaaaatcccctgggacgagccagccttcagccaacgcatgctggaaaatcatctgtcgcaggaccacgactgggccagccgccggctaaccgtgattgagcaacaggtaacatggattacccgtcagttacccgctggcgcccgcattctggatctcggctgtggccccggtttttataccccgcctgttagcggagcgtgggtttcactgcacaggcgtagatttctctcc

SEQ ID NO: 3770 - DNA, 577 bp, Salmonella typhimurium
agggagatgaaaatggcgtctattaacgaaatacattacctgataaccaccgcccaggccgaacaccctgtagcgtcctcggcgattgccgagtttatccagacgtataagcaggcaagagaagacagcgacgacgctatccgcgagtccgccgcgtttatcgcccgcgcgcttcaggaacatgctcgcggctggctggacgacgacgatatgattattctgctggaaggacagcgggacctcgccaggctacgcgccaataatgcgcaaatcgccctcggcagccgtatccggtctacggtcatccgcctcattgatatcgccctggcgttgttggtcggcgcgctataatcaggactgcggcaactgcttgcgtttatcttccgacagcgcatttaccgcctgttgataagaggcatcgaccagataatagagttgtgaatccggcagcgagccgtccagatagaccgtgctccagtgcgctttattaaggtgccgactcggtcgtacatcgctgtgctgctgacgtaacaactctgccagttccgggctggttttgagagaggctgccgggcgt

SEQ ID NO: 3771 - DNA, 120 bp, Salmonella typhimurium
atgctcaacttctttacgtgtcggagaataagcctgatgtaacagctcaatctgacgtgggttcactaaggacttaccgttaaaaccaagccctttcgccaactgcacttccttcaggaa

SEQ ID NO: 3772 - DNA, 405 bp, Salmonella typhimurium
cctgcacctgaccgctttgttcttcaattttgacgtgtagatcgccggataccgtttcattaatatcctgaatgcgaaacggcccagccgggacctgcgactcataaatcacccgcccgcgctgggtcacggtgactttggcgttggtgcgcgccacgcctgatatatccggggcgtagccgcgcagattaggcggtaacatctgatcgtcggtgataaggctgccgccaacatagttaaagccgtcgaaaatatcggattccagcgatccttcgcccagcgttagctgcgcccggagctgcgggatcgcccgccaggcgtaatagcggttccagtcccagttctgttcggaactggagccaaagttgtctttatcttcgctgtcattttcgtgacgatagttag

SEQ ID NO: 3773 - DNA, 478 bp, Salmonella typhimurium
aattcgtcaactggcgcagggcgcgccgcagtataaggaacaactgatgacaatagcggaatggctggaagaaaaaggccgaacggaagggttgcaaaagggcctgcaaaaaggccttgagcaagggttagcacaaggccgtgaggccgaagcgcgcgctattgcccgcaaaatgcttgccaacgggctggaacccgggctcatcgccagcgtcaccggcattacgccggaagagctttctacgctttcgcattagcggcgccgcgcgcactcataaagcgcgcggcccaccgccttttagcttgccgtaggtgccagatcgccgccgttgagatcgcgcttcacttcagtgacttcgtcgcccttcgcgttatgcagatgcacctcaagctggttaaaggcgatattgatatcattttcacggcacagtcgatcgatcgcgcggttcagttcatccaccgtatggctacgatcgcgc

SEQ ID NO: 3774 - DNA, 473 bp, Salmonella typhimurium; identical to SEQ ID NO: 3694

SEQ ID NO: 3775 - DNA, 265 bp, Salmonella typhimurium
ccgcttcatattgcgccgtcaggcgctgcgcctgcgcaaactggctacgatgaacgttaccggcgctcaaacaataaaactggtgcgtggcgtcaatgactgcctgtggctttaatgccgtggcggcgctatcgagataaacacccgcatcggctagcgcgggaaactgcgcgcgaaactgcgtgggattaaaagcgttcatgatattcctcggttcagtttaccgatcgtggcgtaaaagcgcggctgatacaaggtttgtcct

SEQ ID NO: 3776 - DNA, 156 bp, Salmonella typhimurium
aatttctgaatacttggccaggaggagatgatcaatgagacgataataccgcccaacatcaatagcacaatcagcgcagccagttttaccagcgcgctgaaaatcatgtcgccttttttacccggcgggttaaaagcaggcttggttgcagccata

SEQ ID NO: 3777 - DNA, 156 bp, Salmonella typhimurium; identical to SEQ ID NO: 3776

SEQ ID NO: 3778 - DNA, 362 bp, Salmonella typhimurium
ccggtgttgatggcggtggcgtcgccatcggcatcggtggaacccgccaccattcctgagctggtgagatagagcgatgatggctgccagtagctggtgctggtgatgttattttcatcgtccagcgtcgggacaaggccatccagatagatattgccttcgtttagtgctttacctcggctggcggtaacgccatatacacctgccccctgcaaatggatcgtggcgccctcatcgttaacgacatcgccataatccgaagccatcatggcgtaaaaggtgtgggtgtaccatttcaatgggtatacttcaataccgccactgccctgcggcgtctgatcagaaatgagggtgatatcgcc

SEQ ID NO: 3779 - DNA, 362 bp, Salmonella typhimurium; identical to SEQ ID NO: 3778

SEQ ID NO: 3780 - DNA, 252 bp, Salmonella typhimurium
cgaataaaatttccgccccctgacactgacggaggtgatgaattatccggttcatttaaaataacgccagagaggttggctttgtgacgtataagcgtattttttaatgttgtatcaataaacgagggctgttgttgtgtagtaattgaatactgtaaaaacacttcattcatgtctgaattactaaatttcgtattactgcagactacatcactcagtgtcgaataagtgaatcggcattcgtcaaaatgt

SEQ ID NO: 3781 - DNA, 657 bp, Salmonella typhimurium
  misc_feature (1)...(657): n = A,T,C or G
cgatcaccgcatcaaactttttgaagcgtaggctggggatcagactatcaaagctctggttagtgaatgagcactccgcttgcatctctttgcagaccgcgttggcgacatcaatatcgaaaccaacaattttattatcggcatcgacaaactcatagggcgcataggtggcggaggtgccaaaatgtaatgttctggcggaaacggaagcggcgtgaacggagaggctggctaacagcatgacaataagtttttttttcatcttgatccctgatatcaattggatgttgtggtcaccgtgctattctttttttggcgcagggtgctattctgattctgtgcctttaggcgtggcgtgaaaagttttttgttgcatagcgcacgctttgctcgttttttgtcttgtttggtgatttaatcagcattcaaacaaaaatcgcgaaaaaatgcgttcaggggcttgcagctaaatggatttctcgtataatgcgcctcccgtaacgacgcagaaatgcgaattacgacagcaacaaatttgcgggaatagctcagttggtagagcacgaccttgccaaggtcggggtccgcgagtncgagtctcgttnnccgctccacaatttgaaagtacttgttaagtacaaaccaccaatcgcagga

SEQ ID NO: 3782 - DNA, 495 bp, Salmonella typhimurium
tattaaggattaaccgccaatgtaagataaattttgcgtaataccagtattgctctggtgaagaaagtgggtctgctttttctcccgcaacgcgtcggaaatacgttcctcaagcgcgtattgctgcgcgtcatcctgtaacaggtcgcgtaaactcacgccgccgtcgccaaacagacataaatgcagcttaccgacggacgaaacacgcaggcggttacaggtggcgcagaaatctttttcatacggcataatgaggccgatctcaccggcgtaatcgggatgacaaaaaacctgcgccgggccatcgctgcgctggcggagctggtggatccaaccgcgcttaatcagctcgtcgcgtaatacctgacccgaaatatgatgtttgcggaagagatcgctcccctcgcccgtctccataagttcaatgaagcgtagctgaatggggcgaggctgaatccaggcaaggaaggtatccaactgatggtgattcac

SEQ ID NO: 3783 - DNA, 241 bp, Salmonella typhimurium; identical to SEQ ID NO: 3732

SEQ ID NO: 3784 - DNA, 531 bp, Salmonella typhimurium
aatattagcgatggcccgctgcggggccactggagaaaacgatgagcaaaaaaattagagactttgaattgatgagcacccgcgaaatttgctgccagctcaggatttcttccaggacgctggagcgttaccgtaagcgaccaagcgacaacaacccattcccggagcctgactgttcatatatgggtggctccaacaaatggcttaaaaccaaagtcaatgagtggcaggtcagggaaatgtcacgaccaacacgccgtccaatgtcgcatctgaatctgccccgtgacaacaaaggtcgactcatccggtctgacgtggcgtgaactccagaacatcgggctcgatgatgctcatcagtcgggcccaccatttactataagcttctctcatttcttcgatataggtgtatttgtcgtacaccgaccacactccaggcagtttgtgcccgagcatcatctcagcaatatgtggttcagtcagctcggagaaattcgttcgcgcagttctgcgtagatcatggatcgtaaa

SEQ ID NO: 3785 - DNA, 657 bp, Salmonella typhimurium
cacattgtaaggataacttatgaacaagactcaactgattgatgtaattgcagacaaagcagaactgtccaaaacccaggctaaagctgctctggaatccactctggctgctattactgagtctctgaaagaaggcgatgctgtacaactggttggtttcggtaccttcaaagtgaaccaccgtgctggttacggatagccgtttttaatgcttcgacgcgttccatattaatgtcgctgacgcctggctgcatgagcttcgcttgcgcgtcgcttaacgttacgctggcgctcgtcgcggcggacgttttttcctgacgcgttttttgtaccggcgtgtcgctggtttcgcgcgtctggacagtgctaacgggtttcaaaggtgaggtacggtcaatgctcatttatttatcctcatcgagggttacgttgtagcggccaggaagcaagcctcggtgataacaaaccggctgacgatctgctgaatctggaaggattagatcgcgatatggctttcaaactggcggctcgtggtgtttgtacgctggaagatctcgccgaccagggcattgatgatctggctgatatcgaagggttgaccgacgaaaaagccggtgagctgattatggctgcccgtaatatttgctggttcggcga

SEQ ID NO: 3786 - DNA, 334 bp, Salmonella typhimurium
cacccattcttcgagagattgtatccgacgactaaatgcgggttgagtcacatatcttgaggcagacgcttttgagaaattcaacgtttcttttagagccagacagtcttcgagccatgttagttcgaggtgatgccgatattgcataagctgcaaccttattagcattggatgagtttcatttatataagtagcattatacacagacagattttaagaggaaattatttgattaaacagaaacaaaagcagtaagaatatgttatgcctttgtcgggtaagtgttgttatttatgtgagtgtattctttctcaatagaaattaattagatgta

SEQ ID NO: 3787 - DNA, 622 bp, Salmonella typhimurium
taatttgtttggtcgggggatttatacgcaaaatggcccgaaatatgtccgaattaaaacgtaaaaagtgataactaattgaatctattagaatcaaaaataacatattccaatcgttaaaatcacttaattaatatgtaacattatgaatttaaagagaaatatcaatggttgccgtaagcgggaatcgtattcggtctctttttttcttataaatcagttgcttatgatcaataatccgaaatttccgaaatttccgaaattttccagaatttctgtattccgggctttttcgttatatcagatccaaatccagtttaacatttcttttacagcaaaatcagagcatcacgtaagctttattatcgcgttcatcgagatagagtttcgtggtgttctctgaagtatgtcccaggagtttctgagcaaacccttcgccgtaagcgtctttatacagtcgtccggataagctgcggatctcgtgaaacggcggtgggttttcactgaaatttattccggtcaattttcgtgccgcaacaaattttttagtcaggctattaggatgaatactcccgttcgggctgtttttgcgtatgccagcgctgataaggtattcgctacg

SEQ ID NO: 3788 - DNA, 176 bp, Salmonella typhimurium; identical to SEQ ID NO: 3731

SEQ ID NO: 3789 - DNA, 152 bp, Salmonella typhimurium
cgggataaattcagcgctgacctgactcatctgaaatctccttattaaggattaaccgccaatgtaagataaattttgcgtaataccagtattgctctggtgaagaaagtgggtctgctttttctcccgcaacgcgtcggaaatacgttcct

SEQ ID NO: 3790 - DNA, 649 bp, Salmonella typhimurium
ctttccgccgtctcgcaaacgggcgctggcttcaggagaggataacccatggccgtaagcgcaggcacaccgtagtgcctgctatcacggcattatcgccagcggtgctgccgtgatgcggtcttcgcaaggaccgcaacatgaaggtacgatgcttttgtgtcgtgcttcttgtttctggcacgttgtgtcttcacgcagacagaagctacccaggtaattctgttcccgtaacgctcaacgtccagagcaggtaagccaggaggccgccctgttgggcggctttcttttcttcagatgatgcggttctgtttaaaatcgcgcaggaacccgccccagcggcgctcgtagaacggcgcgatatgctcggtgataaagtggctgataccctgctcgcccttcctcacctgacaaatatcgatcggttcgtcacccggtaacgtgtcggtcgccacattgcccgctgcgtgaatgatctcttcaatttcgccgtcagcctcaatgccaatcagcagattgggttgggcgtccgcatgttctttaatcgcgcagagaaacgcgcgtttcaccggtttgatggttttaaacagcgtagtgagggaatcaatcatctgcgacggcggctcggccacttcggatagaataagcg

SEQ ID NO: 3791 - DNA, 447 bp, Salmonella typhimurium
tcctggctatcaaacatcccaacggggacgacccaggtggcgatactggttaaaatggcgacaaaaaagatgatgaccagcgtatcgggcattgcccattttctggctgtttttgattctgtaacgacagacatgacagactatccctgttgcaaagcaaagaggctaagtatgagaagaagggaatagttattcattgatgcagcgcagttaagcaaaaaattccgctttgcagggtaaatagcagaatgccggatggcgatgctaacgcgtcttatccggcctacaacggtatctcacctgtaggccggacaaggcgttcacgccgccatccggcattagcttttactgttactgctgctgctgagaagcctggatcgccgtcagggcgatggtgtagacgatatcgtcaaccagcgcgccacgggacaggtcgttcaccggctt

SEQ ID NO: 3792 - DNA, 194 bp, Salmonella typhimurium
attttgccgttgagtgaaacgacgcccagaccgcgagactcagcctcttcagcggcggcaatcacctcatacgcatgctcaacttctttacgtgtcggagaataagcctgatgtaacagctcaatctgacgtgggttcactaaggacttaccgttaaaaccaagccctttcgccaactgcacttccttcaggaa

SEQ ID NO: 3793 - DNA, 260 bp, Salmonella typhimurium
aggctaaaggggtagccgagcgcgaggttaatcagcagcgactgtaaaaagtagaggcccgcccacgggcttacagcccgacgacgggccagaagtgaatcgataagggttgaattcatatgccactattgcaaaaacgccatgtgctaaccctggcgcgaagggtcattacctgcctgattatgcgtaaaaaaggtattgggttcgcaacggcgagtcgcaaaatattcagggctgccagaagatagagcgtgcgggta

SEQ ID NO: 3794 - DNA, 154 bp, Salmonella typhimurium
aagatgatctgctcacggacacccatgctgtagttaccacgaccgtcgaatgacttagcggacaagccacggaagtcacggatacgaggaacagcaatagtgatcaggcgctcaaagaactcccacatgcgttcgccacgcagagttactttac

SEQ ID NO: 3795 - DNA, 852 bp, Salmonella typhimurium
  misc_feature (1)...(852): n = A,T,C or G
ctccggctaatcattcccattatcagttttttacggctaacggtacgtttacggtacctgatggggtgactcaggtctttgtggaaatgttaggaggcggtggaggtggtggaggtggagggcatacgagtaatacagatggtcttctctattgttcaggtggtaatgctggcaaaagtggagagccagagattgctattgtccccgttattgcgggaaataattatccagtaaccgtgggggctgggggcgctagtggggctggtggtgtattacctaatagcaaccctactggaaacgtggtgcaagtaggacaggctgggaattctgggatcaacggtggaaactcaatttttatagatgttgtcgccaacgggggggcaggaggagcgggaggcattgttcagtcaagaatacctttaagcggttttaaccagttggactctatatcaggtggtaatgctgaaactactttctttgggaaaggaggaactggcgcagttttatctaacgnaagcaatgcgagtggctacggagctggaggtggtggtggagcgtcggttaacagcttaaatatagccttatcaggatacgctggtggacgcggttctagcggttttgtaaaaatctcatggtgaatatatgactcaatatgcatattaccatccggcaacctttgaggttatagactggattgatacttcttcattaaacgtagtgttacctgactcagtaatttctatagatgatgagcagtggcgactaagagataaaaattgttgggtgtgccttaaccctcttgaatttattactacaccgccacccggaaaattttaccgattacagggaaac

SEQ ID NO: 3796 - DNA, 537 bp, Staphylococcus aureus
  CDS (1)...(537)
atgacaaaaacgatgattcgactcgcaagtgaacaagatgcagaaaaattgcaacaactcatgcatgaagcatttacgcctctaagagaactaggtattgattggccttcggttaatgctaatttagatgctgttaaagaaaatatagataaaaatactacatttgtcatgacaattgatgatgaaattatatctacgattacggttagatatccttggggaagtgtgaaaagtatttcgggttatccttttgtctggtggtttgcgacaaatcctgagtatgaagggaaaggctatggtagccaattacttacttatgttgaagaagcatttttgcgagatacgttaaagtcagcggcagttactttaggtacatctgcaagattgcatccgtggttacttaaaatttatgaaaaaagaggttatgaaatatacagcgaacatgaaaatgatgatggcgatttaggtgtgatcatgcgcaaagtattgatacccgagcgctttgacgaaacaatattaggccaaccaccattttaa

SEQ ID NO: 3797 - DNA, 771 bp, Staphylococcus aureus
  CDS (1)...(771)
atgatttggtatacaatacgtgtgaaagggttggtaaatgtgaatgggaatatcattgttgcacatggcatgaggcacggacgacagaatcaagcgttagaagcatttatttctgaattagtaaaagatgatatacatcactatgatattgcgtttttagaaagtgagcatcaggatttagagacggtaatgacgacgttgattcaaagtggggttgaccattttaaaattgtaccattgctaatctttagtgcaatgcattatctcaaggatataccgaatatcgttcatgaaatgaaacgacggtatccagacataaaggtagaagtaagcgagccacttggcacacatcctttaatgagacgattaattgaacaacgtatttgtgacgcattagcaggtgacgaacaacaagttggagttatggttgttgcacacggcaatattaatggaaagtttactaaggcacacgaagagttacaaatatgcgctcaaaatttgcaaattagcaagccgacatatgcgagaacgctatatggagagattagttttacacatgatttagaaagcatctcgaaacggtatcaaaaattgattgtcgtaccattatttttatatgacggaagacttgttaacaaagtgaagcagcaaatgaatgacatggttattaatacagatatacacttcacaccttcaattaacttcgacccaattttaaagcaaatcattaacgatagattagaaagcttaatgattccaatgaaaatataa

SEQ ID NO: 3798 - DNA, 2406 bp, Staphylococcus aureus
  CDS (1)...(2406)
atggcaaagcaaaaactagtaatgattggtaacggtatggcgggcattcgaacaatcgaagaaatattagagcgcgccaacgatttatatgatattacggtaataggtaaagaaccttatccaaactataaccgcatcatgctttcaaatattttacaaaataaaatgacagttgaagaaacaattatgaatccatatgagtggtatgaggaacatggtatcgagttaattacaaatgatcctgtaattgaagtagatagagcaaatcaatcagttactactgcaaatggtattgaagtatcatacgataaattgatttttgcgacaggttctaaagcattcgtcattccagttccaggttcgacattaccgagtgtaattggttggagaacgattgatgatactgaacaaatgatgaacattgctaagactaaaaagaaagcaattgtaattggtggaggattactaggtttagagtgtgcacgtggtttattagatcaaggtatggaagtaacggtgttacatttagctgaatggttgatggaaatgcaactagaccgtaaagctggaaatatgcttaaagcagatctagaaaagcaaggtatgaagtttgaaatgcaagccaacacaactgaaatcttaggagaagatgatgttgagggtgttaaattggctgatggacgcgagattccggcagacttagttgttatggcagtaggtatacgaccatacacagaagtagccaaagaatcaggtctagatgttaatcgtggtattgttgtcaatgatgtgatgcaaacaagtgatagcaatgtatatgcagttggtgaatgtgcagaacataacggcaaagtttatggactcgttgcaccactatatgaacaaggtaaagtattagctgatcatttaacaaataaagaaacgaacggatacaagggatcaacaacatttacgtcattaaaagtttctgggtgtgacttgtatagtgctggtcaaattgtagaaaatgcagaaattaaaggtattgaaatatttaatagtgttgataataactataaaaaaatctttttaaaagacggtaatgtagttggtgcagtactatatggtgatatcgatgatggttcacgcttttataacatgatgaaaaaaggtgaatccactgaagattacacacttgtatcattgcttactaaaggtggagaagaggcatcgctatcaattgctgatatggctgatgatgaaacaatttgtggttgtaatggtgttgataaaggtactatagtaaatgcgattacggaaaatggctttacaacagttgaagaagtaacggctaaaacaaaagcggggaattcatgtggtaaatgtaaaccgcaaattgctcaaatattgcagcacaccttaggagatgactttgttgccgcaaaacctgctggtatatgtggttgtactgatttgacacgcgatcaaatagtaacgcaaataagagcgaaaggtttaaaaacatctaaagaagttcgacatgttttaaactttaaaaataaaggtggatgtccaaaatgtcgaccagcaatcaactattatttaaacatggtttatccacatgatcatgaagatgaaagagaatcaagatttgctaacgaacgttaccatgcgaatattcaaaatgatggtacattttctgttatacctcaaatgcgtgggggtgttacagatgcagaccaactgattcgtctaggagaagtggctaagaaatatcatgtgccactagttaaagtgacaggttcacaacgtgttggtttgtatggagttaaaaaagaagaattaccaaatatatgggaagacctaggtatgcgttcagcatcagcttatggtaagaaaacacgctcagttaaaagctgtgttggtaaagagttttgtcgatttggtacgcaatacacgacacgacttggcattcgtttagaaaaaacatttgaatacatcgatacacctcataaattcaaaatgggtgtatcaggctgcccaagaagttgtgttgaatcaggtgttaaagattttggtattatctcagttgaaaatggattccaaatctatatcggtggtaatggtggtacagaagttgaaaaagctgaatttttaacaactgtagaaacagaagatgaagtaatcaaattatgtggtgctttgatgcaatattatcgcgaaacaggtatatatgctgaaagaacagcgccatggttaagaagacttggatttgaaaatgtaaaagaagtcttacttgacccagaaagacaaaatgaactatttgaacgcattatggatgctaaaaaagcagtcgaagctgaaccttgggaagcaataactagcaatgcgcaagcacgtagaatttttgaagtggagaaggtgtaa

SEQ ID NO: 3799 - DNA, 315 bp, Staphylococcus aureus
  CDS (1)...(315)
atggaaacaaaagaaaaaattaaagtgacaactatagatgaattaacacccctaattggaaaaaaggttattgtcaaaggcaaagaggtagggttgtttttaacagaaagtggcaaaattcatgcgattcacaatatctgtccacacaaacaaggaccattgtctgaagggacagtgagtggggaatatgtattttgcccgctccacgatcaaaaaattgatttaaatacaggtattgttcaagaacctgatgaaggttgtgtagatgtttatgaggtagaagttacagacgggaacgtatatatatgtctgtag

SEQ ID NO: 3800 - DNA, 978 bp, Staphylococcus aureus
  CDS (1)...(978)
atgtctgtagaggaatatggcaaggtttacttgataggtgcgggtccaggtaatccgaattatttgacgaaaaaggctgagcgtttaatacgtgaagcggatgtcattctatatgatcgattagtgaatccgttaattttacaatatgcgaatttgactactgaaattatcgatgttggtaaaaagccgtatgcaaaacatattcagcaagaaaaaataaatgactgtatcgtggaagcagcgcgtcgatataacaaggttgttagacttaaaggtggcgatccagcgatatttggtcgtgtgcaagaagaagtcgacacactaaatgaacatcatattgcgtttgaaattgtaccaggggtgacatcagcgagcgcagcagttgctactatgcagacaggtttgacaatgcgtacagttgctaaaagtgtgacattttctacaggtcactttaaagattcagaagaaaatgaagtggatgtcaattccttagtgaatggtggcacgttagcaatttatatgggggtaaaacgtttagggaaaattatcacacagatacaacaatacacagatattgattacccgatagcgattgtctttcaagcatcgtgttttaacgagtttgttgttaaggggcgtttaagtaatattatttcaaaattgcaacactattcaattgaggcgaaaccaggtatatgtattataggggaagttgttgattatactgaaaacactcctaaatcatatgatcctatgaagcaattttatgtagtaagtggttctaaacatgacgcccttatgctctgtgaacatttatatgacgaaggttatggctgtttgctaaacccaaatgatacatcgaatggcacatatcattcgtcgcaatatgattactatgatgcatttattaagcagcaagaaaatgtaacatatatttcaaccgatcgtgcagatgctaatacagtgttatgtcactaa

SEQ ID NO: 3801 - protein, 178 aa, Staphylococcus aureus
MTKTMIRLASEQDAEKLQQLMHEAFTPLRELGIDWPSVNANLDAVKENIDKNTTFVMTIDDEIISTITVRYPWGSVKSISGYPFVWWFATNPEYEGKGYGSQLLTYVEEAFLRDTLKSAAVTLGTSARLHPWLLKIYEKRGYEIYSEHENDDGDLGVIMRKVLIPERFDETILGQPPF

SEQ ID NO: 3802 - protein, 256 aa, Staphylococcus aureus
MIWYTIRVKGLVNVNGNIIVAHGMRHGRQNQALEAFISELVKDDIHHYDIAFLESEHQDLETVMTTLIQSGVDHFKIVPLLIFSAMHYLKDIPNIVHEMKRRYPDIKVEVSEPLGTHPLMRRLIEQRICDALAGDEQQVGVMVVAHGNINGKFTKAHEELQICAQNLQISKPTYARTLYGEISFTHDLESISKRYQKLIVVPLFLYDGRLVNKVKQQMNDMVINTDIHFTPSINFDPILKQIINDRLESLMIPMKI

SEQ ID NO: 3803 - protein, 801 aa, Staphylococcus aureus
MAKQKLVMIGNGMAGIRTIEEILERANDLYDITVIGKEPYPNYNRIMLSNILQNKMTVEETIMNPYEWYEEHGIELITNDPVIEVDRANQSVTTANGIEVSYDKLIFATGSKAFVIPVPGSTLPSVIGWRTIDDTEQMMNIAKTKKKAIVIGGGLLGLECARGLLDQGMEVTVLHLAEWLMEMQLDRKAGNMLKADLEKQGMKFEMQANTTEILGEDDVEGVKLADGREIPADLVVMAVGIRPYTEVAKESGLDVNRGIVVNDVMQTSDSNVYAVGECAEHNGKVYGLVAPLYEQGKVLADHLTNKETNGYKGSTTFTSLKVSGCDLYSAGQIVENAEIKGIEIFNSVDNNYKKIFLKDGNVVGAVLYGDIDDGSRFYNMMKKGESTEDYTLVSLLTKGGEEASLSIADMADDETICGCNGVDKGTIVNAITENGFTTVEEVTAKTKAGNSCGKCKPQIAQILQHTLGDDFVAAKPAGICGCTDLTRDQIVTQIRAKGLKTSKEVRHVLNFKNKGGCPKCRPAINYYLNMVYPHDHEDERESRFANERYHANIQNDGTFSVIPQMRGGVTDADQLIRLGEVAKKYHVPLVKVTGSQRVGLYGVKKEELPNIWEDLGMRSASAYGKKTRSVKSCVGKEFCRFGTQYTTRLGIRLEKTFEYIDTPHKFKMGVSGCPRSCVESGVKDFGIISVENGFQIYIGGNGGTEVEKAEFLTTVETEDEVIKLCGALMQYYRETGIYAERTAPWLRRLGFENVKEVLLDPERQNELFERIMDAKKAVEAEPWEAITSNAQARRIFEVEKV

SEQ ID NO: 3804 - protein, 104 aa, Staphylococcus aureus
METKEKIKVTTIDELTPLIGKKVIVKGKEVGLFLTESGKIHAIHNICPHKQGPLSEGTVSGEYVFCPLHDQKIDLNTGIVQEPDEGCVDVYEVEVTDGNVYICL

SEQ ID NO: 3805 - protein, 325 aa, Staphylococcus aureus
MSVEEYGKVYLIGAGPGNPNYLTKKAERLIREADVILYDRLVNPLILQYANLTTEIIDVGKKPYAKHIQQEKINDCIVEAARRYNKVVRLKGGDPAIFGRVQEEVDTLNEHHIAFEIVPGVTSASAAVATMQTGLTMRTVAKSVTFSTGHFKDSEENEVDVNSLVNGGTLAIYMGVKRLGKIITQIQQYTDIDYPIAIVFQASCFNEFVVKGRLSNIISKLQHYSIEAKPGICIIGEVVDYTENTPKSYDPMKQFYVVSGSKHDALMLCEHLYDEGYGCLLNPNDTSNGTYHSSQYDYYDAFIKQQENVTYISTDRADANTVLCH

SEQ ID NO: 3806 - DNA, 849 bp, Enterococcus faecalis
  misc_feature (1)...(849): n = A,T,C or G
ttattagtagatgaaccattaaaaaacgtaacctttaccaaaacaaagnggccagctgatgtgttggccttacccaaaacaaaaaaagaagtcgaagagattgtggcgtattgccgagaacaaggactttcatggttagtattaggcaatgctagcaacttgattgttcgtgatggcggtattcgcgatgtcgtgattatgctaacagaaatgaaagaaatcaaagtagccggtaccaccatgattgtggatgctggtgccaagctgattgatacaacctacgaagccttagcagctgatttaactggttttgaatttgcttgtggcattccgggaagtgtcggtggtgctgtttatatgaatgctggagcatacggcggggaaattaaagatgttttccaatctgcagaagtgctgttggcagatggaactatccaaacaatgacgaaagaagacctgaatttccgttatcgtcatagtgaaattcaagaattacattgtattgtcttgcaagcaacgtttgctttagaaaaaggaaaccatgcagaaattaaagcccaaatggatgaattaacggaacttcgtgaactgaagcaaccgctagagtatccctcttgtggcagtgtctttaaacgccctgttggtcattttacaggaaaattaatccaagacgctggcttacaaggcttaaaatggggcggtgctcaaatttccgaaaagcatgcgggatttattgttaacatcgatcatgcaaccgcaacagattatgtggaattaattgcacatatccaagaagtgattaaagaaaaatttgatgttgaattacaaacggaagttcgaattattggt

SEQ ID NO: 3807 - DNA, 1086 bp, Enterococcus faecalis
aaggataactggggttctgaaattgttggggtttatgaaaaggatacattagtcgcatcaagtttagttttaatcaaaccattaccagccggttttacgatgttatatacaccaagaggtccagtaatggactatacaaatgaacgtttggtcagctactttatggctgaattgaaaaaatttggcaagaaaaaacgagctttatttataaaaatggatccagcggttcactatcaagattttcatttgggagaagaacatcaaccgcatgctgaagcgacagctattattgagaccttgaaagaagcaggggccaaatatcaaggactgacaatggatatgggggccaccatccagccccgcttccaagcgaatatttatcgtgaagattttagtgaggaacaattgtcaaaaagcaccaagaaaatgattaaaacagctgaaaaaaaaggggtcgttgtgcagcaagggcatgttgactttgttgatgaatttgaaaaagtcattcaatcaaccatggaacgccaacatatttctttacggaatagtgattactttaagaagctgttgaacatttacccagaagactcctttattatgctggcgcaagtcaatttaaaggaacgcttagatagcacgcgacaacgctatgacaaaaatcaaaaagacttgagtaatttgaaagaaaatcaagtgaaaaagcgccataatttagaagaattagatgcttccttgactcgggaactaaaagaattagaagaaaatatcgcagaagctggtgaaatcgtcacggttgctggcgctttggctgtgacatttggtccaacaagtgaaatcctttatgctggcttagatgatcgttataaacgctacatgccaacatatgtgacttggcgagatgccattcaagaatgttttaaccgtggctgcgaaagctgtaatatgggcggcttagaaggtagtttaaatgatggcttaattaagtttaaagcgaacttcaacccaacgattaatgaatttattggggaattcgatttaccggttaataaattattatttaaagccagtgaatatgcctataaatta

SEQ ID NO: 3808 - DNA, 1299 bp, Enterococcus faecalis
atggaacaaattattgttcatggtggtaatacaaaattagaaggaactgtaaaaattgaaggcgccaaaaacgctgttttaccaattttagcagctactcttttagctgaagaaggcgttactactttaaaaaatgtaccaattttatctgatgtatttacaatgaatcaagtaattaagcatttgaatgtagccattgattttgatgaagacgcgaatgaagtaacaatagacgcaacacaacctttagggatcgaagcaaactatgagtacgttagtaaaatgcgtgcttctatcgttgtaatgggacctttattggctcgtaatggtcatgccaaagtggcaatgccaggtggctgtgccattggcaaacgaccaattgatttacacttaaaaggcttccaagcattaggtgcaaaaatcatccaaaaaaatggttacattgaagcaattgcggatgaactaatcggtaacactatttacttagacttcccaagtgtcggcgctacgcaaaacattatgatggctgctgttcgtgcgaaaggaacaaccatcattgaaaacgttgctcgtgaacctgaaatcgttgacttagcaaacattttaaacaaaatgggtgccaatgttatcggtgctggaacagaaacgatgcgtatcgaaggcgtcgataaattacatgccgtagagcattcaatcgttcaagatcgaattgaagcaggtacgttcatggtagctgcagcaatgactgagggcaatgttttaattgaagaagcaatttctgaacataatcgtccgctaatttctaaattaactgaaatgggtgcaatcattgaagaagaagaaaacggcatccgtgtaattggaccaaaacatctaaaaccaacagatgttaagacaatgccgcatcctggtttcccaacagacatgcaagcgcaaatgacagcgatccaaatgtttgctgaaggaacaagcatcgtgacagaaacagtctttgaaaatcgttaccaacacttagaggaaatgcgtcgaatgaacgctgacttaaaaattgacggcaacattgccgttattaatggtggcaacgagttacaaggagcagcagtggaagccactgatttacgggcagctgccgcattgattttagtagggttacgtgcaaatggcattacacgtgtctctaatttgaaatatttagatcgtggctattatgagttccataaaaaacttcaaaaattaggcgcgaacgttgaacgtgtcaatgatgaaaaaattgaagaaaaacaagcaacgacagtaatc

SEQ ID NO: 3809 - DNA, 1227 bp, Enterococcus faecalis
aaaagagtggtcataaccggcatgggtgccgtaacaccattaggcaataccgtaaaagaattttggcataatctagtggatggcaaactaggaattggcaaaattactaaatttgattctgaagatactggggtagctttggctggcgaagtgaaagagtttgacccaagtgctgttttagaacgcaaagagcaaaaaagaatggacttattttctcaatatggcttggtcgctgctttagaagcgtgggaaatgagtggtttaacagaagcaacgattgacccgactcgtttaggtgtgattgtcggtagtgggattggcgggatgactaccttacaagaccaagtacgggtaatggataaaaaaggcgcaaaacgcgtaacaccatttttcgtgcccatggtaattgctaatatggcagcgggaaatatttcgattcgtctaggtgcaaaaggaccttctcaaactatcgtgactgcttgtgcttctgcgacgaatgcgattggtgaagcttttcgcacgattaaatatggtttagcggacatgatggtaactggggggacagaagccacagtatgtgaaattgggattgcaggctttgcagcattgaatgctttaaatacaacagaagatgcgactcgggcttcgattccttttgataaagaacgaaaaggttttgtgatgggtgaaggcgcaggaatgctggttttagaagaactcgagcatgcacagaaacgtggcgcaactatctacggcgaaattgttggctatggcagcaactgtgatgctagccacatgaccgctcctttaaaagacggtagtggcgcggcggctgcgatggaaatggcgattgcagaagcagggattacaccggaacaaattgggtatatcaatgctcatggtacgtcaaccccggcgaatgacgctgcggaaacaacggccatcaaacgtgtctttggtgagcgagcatcgcaaattccaatttcaagtacaaagagtatgactggacatttattgggcgcggctggcggtatcgaagcgattgcttgtgtacaaacattgcaagaaggaaaagctcatccgacagtaggctaccaagttgctgatccagattgtgatttagattatgtcacagaaggtgcacgtgacattacagcggactatacaattagtaattcgtttggctttggtggccataatggtgtaatttgcttgaagaaatgggag

SEQ ID NO: 3810 - DNA, 1650 bp, Enterococcus faecalis
ataaaaaataacgaaactggcgtttttgcaatcggtggtttaggcgaaattggaaaaaacacatatggggtacaattccaagatgaaattatcattattgatgctgggatcaaattcccagaagatgatttacttgggattgactacgtgattccagattatagctacatcgttcaaaatttgcataaagtcaaagcactcgttattacccacggtcatgaagaccatattggtggcgttccttatcttttacgtcaagcgaatatcccaatctatgcgggaccactagccttggctttaattaccaacaaactagatgaacatggtttattgcgagaagcggaattacacgaaattaatgaagatacggtgattcgttttagaaaaacagcgattagttttttccggacgactcacagtattcctgatgccttgggcgttgtggttaaaacgccttctggtaacattgtcgcaacaggtgactttaagtttgactttacacccgttggtgagccagccaacttacacagaatggcgaaattaggtgaagaaggcgtcctttgtcttctttcagacagtaccaatgctgaaatacccacctttacaaaatccgaaaaaacaattgggacctctattttaaaaatctttgaaaaaattgatggtcggattatctttgccagttttgcttcaaacattttccgtttacaacaagctgctgatgcagccgtgaaaacaggtcgcaaaattgctgtttttggtcgtagcatggaaaatgccattgtcaatggcgaacgcttaggctacatcaaagtgccaaaaggaacgtttgtcgatgcggcggaactgaatcaattgccagcaaatgaaacaatgattttatgtactggctctcaaggagaacctatggccgcgcttagtcggattgctaacggtacacatcgccaaattagtattcaaccaggcgatacggttgttttctcaagttcaccaattcctgggaatacgacaagcgttaaccgtttaatcaacttattatctgaagccggtgcagaagttatccacggaaaaatcaataatatccatacttctggtcacggtggacaagaagagcaaaaattaatgcttcgtttgatgaagcctaaatatttcatgcctgttcatggtgaatttagaatgttaaaaatccatgcttcgctcgctcaagatacaggggttcctgaagaaaattgctttatcatgggcaacggcgatgtcttagctttaacggctgatagcgcacgtcctgctggtcacttcaacgctaacgacgtgtacgttgatggaaatggtgtcggtgatatcgggaatgttgttttacgggatcgtcgtatcttatctgaagaaggtttagttttagcggtagcaacggttgatattaaaaataaagaaattatggctggtccagacattctttcccgtggttttgtctacatgcgtgagtctggtgatatgattcatgaaggccaacgtcttttattcaatgctctacgtgaagcaatgaaagataaaaactgtaccgaagcaaaattaggcgaagccatgacgaccgctttacagcctttcttgtttgaacaaacagaacgtcatccaatgattctgccaatgattatg

SEQ ID NO: 3811 - DNA, 1089 bp, Enterococcus faecalis
atgaagatactagtaactggtggtggcacaggtgggcatatctatcctgcgttatccttcgtcgaacacgtcaaaaaagaagcacctgcaacagaattcttgtatgtgggaacagaaaatggtctagaaagtcaaattgtgccaaaggcgaaaattccatttaaaacgattaaaattcaaggattcaagcgttcgctaagtcctcaaaattttaaaacaatttatttatttttaacaagcattaataaagcaaaaaaaattattcgtgaatttcaaccagatgtggtcattggtacaggcggttatgtttctggtgcagtagtttatgcggcccaccaattgaaaataccgacaattattcatgaacaaaatagtatccccggaatgacaaataaatttttaagtcgttatgtggataaaattgcgatttgtttttcagatgtcgctagttttttcccgaaagaaaaaacaattttaacagggaacccgcggggacaagaagtcgtaacggtggaaaagtcagctattttatcagagtttggcttggatccagcaaagaaaacggtggttttatttggcggaagtcgtggcgccttgaaaatcaatcaagcgtttgaacaggcctttcctttgtttgaagagagagagtatcaagttttatacgcttcaggagaaagatattatcaggaacttcaagaaagtctaaagctttctgaaaagaaattgacaaacataagtgtgcaaccgtatattgataaaatggttgaagtgatggctaataccgatttaatggtgggacgtgcaggagcaacctcaattgcggagttcaccgcattaggattaccagcaattttaattccgagtccttacgtcacgaatgatcatcaaacgaaaaacgcgcaaagcttagtaaaagttggtgctgttgaaatgattccagatgcagaattgaccggcgctcgtttagttgcggcaatagatgatattttattaaacaatgaaaaaagacaacagatggcaacggcgtccaaaggggaaggcatcccagatgcaagtgatcgtttgtatcaagttgtgaaaacgttagtc

SEQ ID NO: 3812 - DNA, 468 bp, Enterococcus faecalis
atgcctcgtaaaggtcctgttgcaaaacgtgatgttttaccagatccaatttataactcaaaattagtaactcgcttaatcaaccgtgtaatggttgacggtaaacgcgggattgctgctaacattatctataattcatttgatatcatcaaagaatctacaggtaacgatccattggaagtttttgaacaagcaatgaaaaacgttatgcctgttcttgaagttaaagcacgtcgtgttgggggttctaactaccaagtaccagttgaagttcgtccagaacgtcgtacaactttaggtttacgttgggtagttaactacgcacgtctacgtggtgaacacacaatggaagaacgtctagcgaaagaaatcatggatgctgctaacaacactggcgcttctgttaaaaaacgcgaagacacacacaaaatggcagacgcaaaccgcgcatttgctcattatcgttgg

SEQ ID NO: 3813 - DNA, 384 bp, Enterococcus faecalis
gcagcaaaaaaagttagtcgtaaacgccgtgtcaaaaagaatatagaatcaggtgtagcacatatccattctacattcaacaatacaatcgtaatgattactgatacacatggtaatgcattagcatggtcatcagcaggatcattaggctttaaaggaagcaaaaaatcaactccttttgccgctcaaatggctgcagaagccgcaactaaagtggcaatggaacatggacttaaaactgtagacgtaacagttaaaggacctggttctggacgtgaagcagcaattcgttcattacaagcaacaggtttagaagtgactgcaattcgtgacgtgactccagttcctcataatggatgccgccctccaaaacgccgtcgtgtt

SEQ ID NO: 3814 - DNA, 855 bp, Enterococcus faecalis
aatttacaactggttattattacaggaatgagtggcgctggaaaaacagtcgctgttcaaagctttgaagacatgggctatttctgtatcgacaatttaccaccaagcttaatcccaaaattttgggaattaattaaagaatctggaaaagttaccaagattgcgttagtgatcgatttacgttcacggaccttctttagagaaattcaggatatgttagtcgaacttgaaaatactaattttattgatacaacgattttatttttagatgccaccgatgaagagttagtttctcgttataaagagacacggcgtgcgcatccaatggcgatggatggtttagtgacagaaggtattcgtaaagaacgtgcaatgctggaagaaatcaaggcggatgctcagttggttattgataccacggacttgtcccctcgtcaattgcgggaacgtttgaataaagaactagcaacgagagagacacacgaatttcgagtggaaatggtgtccttcggctttaaatatggtttgccgattgatgcagatatcgttatggatgttcgctttttacctaatccccattatattgatgaactacggccgttaactggaatggatcaacctgtttatgattatgtgatgggcttcccagaaacagatgaattttataccaaatttatcgatttactgcgaacagtcttacctggatataaaaaagaaggtaaaagtagcgtcaccattgcaattggctgtactggcggacaacatcgctctgttgcattgacagaacgtgttggcgctgaattaaaagaggaagattaccatgtaaatattacccaccgcgaccgcttaaaaaga

SEQ ID NO: 3815 - DNA, 405 bp, Enterococcus faecalis
atgttagtacctaaacgtgtaaaacaccgtcgtgaattccgcggaaaaatgcgcggtgaagctaaaggtggaaaagaagtagcatttggtgaatggggtttacaagcaactgaatctcactggattactaaccgtcaaatcgaagcagcccgtattgcaatgactcgttacatgaaacgtggcgggaaagtatggattaaaattttccctcacaagtcttacacaagtaaagctatcggcgtacgtatgggtaaaggtaaaggggcaccagaaggctgggtatcaccagttaaacgtggtaaaatcatgtttgaaatcgcaggcgttcctgaagaagtagctcgtgaagctcttcgtcttgcatctcacaaattgccggtaaaaactaagatcgtaaaacgtgag

SEQ ID NO: 3816 - DNA, 180 bp, Enterococcus faecalis
atgaaggttaaagaaatcagagaattaaccactgccgaaatgctagataaagaaaaacaattaaaagaagaattgttcaacttaagattccaattagcaacaggtcaattagaaaacactgcacgtattaaagaagtacgtcaatcgattgcacgcatcaaaacagtattgcgtgaacaa

SEQ ID NO: 3817 - DNA, 1338 bp, Enterococcus faecalis
tttgtaataaaaggaacaggtttttctagtaaaaatttgcaagagattaaagtttatgaagaaacacttttttgtatagatgaggccggagtaattcaggaaataattgaaccagatgctgaagcgtatgaaactgtgctagcagaacaaaaagaggcgcaacgttttcaagaattgccccaagattcttatcttttacctggctttgttgatttacatgtccatgcacctcagtgggcacaatctgggaccgccttggatattccattgtatgaatggctgaatacgtacacgtttcctttggagtccaaatttgcagatttaacatttgcccaacaagtctatgatgaattggtaacccaattgttagctaatgggacaacaacagccctttattttgcaaccattcattatgaagctagccgtcgtttggcagagatttgtgcggaaaaagggcagcgtggcttaattggtaaagttgtaatggatgatcttaatgagaatccagaatactatcgtgatcaaacaacgcaacaagcattagaagaaacggaacggtttattcaagaaattcaaacattagcgcagcaaacaaaacaaggcgtgtatcccgttgtaactccgcgtttcattccaagttgtacagaggaagcacttaaaggattaggagaattagcagcgaaatatcaagtccatgttcaaagtcattgtagtgagagtgattgggaacatcaatttgttcaagaacgttttggaaaaaatgatactcaagcattgaatgattttggtttattgacagaaaaagcagtgatggcacatgcaggctttttagaagaagcagatatgaatttattccatgaaacagggacggctgtggcgcactgcccaatctctaatgcttattttggtaatgcagtaacaccgattgcaaaattagtacatcaacatcaagtagaagttggtttaggtagtgatctttcaggtggtttttcaccaagtctttttgacaatttaaagcaagcggttatttcttctagaatgttagaagatggcgtcgatgctacaaaaaaaccagaagtacgaggtgttaaaacagcacggattacagtaaatgaagcgttttatttagctactgctggtggtggtcaagcgctaagtttgccaattggaaaattagaaaaagggtatgcttgggatgttcaaattattaatacaagcttgtcacaagcacgaatccctaaaaatccaggggaatcattgcttgatattttccaaaaaatcttatatttagcacgaccagaaaatattcgagaagtctgggtacaaggtgaaaaagta

SEQ ID NO: 3818 - DNA, 384 bp, Enterococcus faecalis
gtaatgactgcaacagaaattatggaaatgattcctaatcgctatccgatttgttatattgattatgtggatgaaattattccaaatgaaaagattattgcaacaaaaaatgtaacaattaacgaagaatttttccaaggacatttccctggaaatccaacaatgccaggcgttttgattattgaagcattggcacaagtaggttcgattttaatcttaaaaatggatcaatttgaaggtgaaacagcctatattggcggtatcaacaaagccaaattccgtcaaaaagtggtccctggtgatgtcttgaaattacattttgaaatcgtcaaattacgtgactttgtcggcatcggcaaagcgactgcttacgtggaagataaa

SEQ ID NO: 3819 - DNA, 264 bp, Enterococcus faecalis
aaaacacataaaattactattattgaaccacgtgtgtattcagaagcaatgagcattgcgaaacatttatttgctgaagaagctgtgctagttaattttacattagtagaagaagaccaagcacgacgcatcgttgatttcttaactggtactgtgtatgctttagacggagatattcagcgcgttggcaatgaaatcttcttatgcacaccagcgaatatggaaattgatagtgcgacagcacaatctttagccaacaaacaa

SEQ ID NO: 3820 - DNA, 1071 bp, Enterococcus faecalis
atgaaaactaaaaagatagttgtcgggttattttgttcaatgattattttaatggggtgccaaccagatcaacgaactgaaaaaatgaaagaaagtactgaagcagaagcagtccaagtaacgagtggtgcctcggcagccactaatgccacttctgtaaagcaggaggagcagacaaacacgaatgatcaaccgaaggagagtgctgccaaagtgagttatgagcgtaatggacatacctttgaagttgatgctgtttctggcgctacagtagaagctaataatggacaatcaggaattagtccagaagaaaaagcccagaagatgtattggtcaggtcgtccagaaatcggggaagttcaaggggattattatcatcatgaagtcgtgtttgatggcggctatacggctttaattgatgtcgttgttaaggatcaacaaattcagttagtggaatttgatgaacgtggacctaaaaactattattctgaagaatgggcaggagtgacaaaacgtttatccggctatgcaaattttcaagcgaacaacgcccgaaccgatcaatcgttagtgaccgttgttaatacgatgacttttttagaaaatcaaatggttgctgaaaatcgcctagatggcgcattccagacagccaaaggtcaatccaatagcgctaataatggctatcttcctgctgctagggctttagccaaggaaatcaaagaaccttcaaaagaacattatacaagtctaacagaagattttggggaggggctttctggacgtttaactgttattacgttaaaagattcagggaaaataaccgatcttcgttatgatgaatattttgcagatacagaagaagagattaaagacgcaaaactgaaggcttattctcgccaatcaaaatatttttctaaagattatgctcaaaaatcgggggaaaatttcaaaaaagaagtggatgacttaagaaaaaaagcaatcgaggagaataaattagtcagtccgacaaatgaggaagcctggtcggaaaattatcaaagtcttgtaaaaaaaataacgtcacaataa

SEQ ID NO: 3821 - DNA, 2631 bp, Enterococcus faecalis
tcagaagaaaaaaacttaccaacgaaatatcaaccgacagaaatcgaagctggccgttatcaaaaatggctagatcaagatttatttaaaccaagtggcgacaaaaaagcgaagccctattcaattgttattccaccacctaatgtaacagggaagctacacttagggcatgcttgggatacaacattacaagatatgattatccgccaaaaaagaatgcaaggctttgatacgttatggctgccaggaatggaccatgctggaattgccacgcaagcaaaagtagaagagaaactagcacaacaaggaatttcacgttacgacttaggtcgtgaaaaatttgttgatcaagtgtgggaatggaaagaagaatatgcttctcacattcgtgaacagtgggcaaaaatgggtctttctttagattacagccgtgaacgttttactttagatgaagggctatctgaggccgttcgtaaagtgtttgtctctctttacgagaaagatttgatttaccgtggtgaatatatcattaactgggatccaaaagcgaaaacagcattgtctgatattgaagtaatccataaagatattgaaggagctttttaccacatgagctacccattatcagatggttctggtgttgttgaaattgcgacaacgcgtcctgaaacaatgttgggagatacggcgattgcggtccatccagaagatgaacggtatcaggaacttattggtaagacagttgtcttgccattagtagataaagaaattccaattattgcagatgactatgtagatatggaatttggaacaggggttgtaaaaatcacacctgcccatgatccaaatgactttgaagtcggtaatcgtcatgacttacctcgagtaaatgttatgaacgaagacggcacgatgaatgaactggctggaaaatacgaaggaatggatcgttttgctgcacgtaaagcgattgtctctgacttgaaagaactaggtcgcttaattaagatcgaaacaatgaatcacagcgtgggccattcagaacgaacaggcgttgtcgtggaaccacgtttatcgacccaatggtttgtaaaaatgggaccattagctgaaaaagcaatgaaaaatcaagaaacagaagacgctgttgaattttatccaccacgcttcaatcaaacatttttacgttggatggaaaatgtacatgactgggttatttcgcgacaattatggtggggccaccaaattcctgcttggtatcacaaagaaacgggcgagatgtatgttgggatggaagcgccagccgacagtgaaaattgggttcaagatagtgacgtcttagatacatggtttagttctgctttatggccattttcaacgatgggttggccagatgaagcaagcgaagattatcaacgttacttcccaacaagcacattagttactggctatgacatcatcttcttctgggtaagtcgtatgattttccaaagcttagagtttacaggtgaacgtcccttccaaaatgtcttaattcacggcttaattcgtgatgagcaaggacgcaaaatgagtaaatcattggggaatgggattgatccaatggatgtcatcgaaaaatatggcgcagatgcgttacgttggttcttatcaaatggttcagctccaggtcaagatgttcgttttagttatgaaaaaatggatgcttcttggaactttatcaataagatctggaatgcaagtcgcttcgttatcatgaatgtagaaggtatgactgctgcagatattgactttagtggtgaaaagactgtcgctgatcgttggattttaacgcgcttaaacgaaacagtcgcccgtgtgacagaattatttgatcgttttgaatttggtgaagcaggtcgccaattatacaacttcatctgggatgatttctgtgattggtatattgaaatgagtaaagaaattctttacggagacaatgaagcagctaaacaaacaacgcggagcatcttggtgtacacattggatcaaatcttacgcttattgcatccaattatgccgtttgtaacagaagaaatttgggaaaaaattccgcatcaaggtgagtcattggttgtggcagagtacccagttgttcatgaagaatttaacgatgaagcagcagctcgaggaatggaagttctgaaagaagttattcgttcggttcggaatattcgagcagaagtgaatacaccactttctaaaccaattactttgttaattaaaacaaacgatacagaagtagaagaatttttaacagctaatactagctacttggaacgcttctgtaacccagaggaattagtcatcagtcgtgaaatagaagcgccagaattagccatgtccgctgtattaacaggcgcagaactattcctaccattagctgggttgattaatatcgaggaagaaattgctcgcttagaaaaagaattagacaaatggacaaaagaagtcaaacgtgtgcaaggcaaactttcaaatgaacgttttgtgtcaaatgcaccagatgaggtcgtggaagcagaacgtgcaaaagaaaaggactaccttgaaaaacaagaggctgtcaaagaacggattgcccaattacgt

SEQ ID NO: 3822 - DNA, 1362 bp, Enterococcus faecalis
atgaaattaaccttctgggaagtagcgcaagcggttgaagccagtaatgattggcaacaatggcctgattttcctttaacaggcattgaatttgatagtcgtaaaattgtgaaaggaaatctctttgttcctttacaaggtgaaaatgatggtcatcgttttattgagagtgccatggctaatggctgtcaggccgctttttggggacaggatttagtcgatgcgccgcaacaattgcctgttttgcatgttactgatccactggttgctatgcaaaaattagctacctattatttaaataaaatgcaaccgaatgtcatcgctgtgactggcagtaatggaaaaaccaccactaaagatttaattgctgctgtgttatctgaaaagtttgtgacttacaaaacgcaaggcaattacaataatcaaattggcttaccctatactattttacacatgcctgatgaaacagaaaaactgattttagaaatgggcatggatcatgctcaggaaatttctttcctttccaatctggctcagccagaagttgccgccatcacaatgattggcgaagcccatgtggaaaatttaggctcacgagcaggcattgcacaagcaaaaatggaaatcgtagatggtttagccaaagacggtagtttatttgtgccaagcgatgaacctttgctagaaccattggtggaaaaagtcactcaacaagtgattacttttggttttagccaggaaagtcaacttcaaggaatcgtcacaaatgaagccaaagagcaaacctcattcaaaatcagtgatacacaaatgacgtttacgattccagtgccaggaacctataatgtcaccaatgcattaatcgcaattggcattggtcgttatttccaattaacggatagtgagattcaaaaagggttggctacagcggaactaacaaagaatcggacagaatggctgaaagcagcgaatggtgctgaaattttaagtgacgtgtacaatgccaatccgacagctatgggtcttgttctggacagttttagcaaaatgtccaaagtaggaaaacgaattgctgttttaggagacatgctagaattaggtcctgattctgctgccatgcatcaagcaatggcgcagcatttagccccagatgcgattgaagaagtctttttatatggttctgaaatggcttatttagctgataaattgcaagaaacctatgcaccagctaacattcattcttttaaaaaagaagaaaaaaatgagttgattgaagctgtcaaaaaagttttacagccagaagatatggtggttttaaagggaagtaacgggatgggacttcgtgaagtcatcgatgcactt

SEQ ID NO: 3823 - DNA, 1158 bp, Enterococcus faecalis
agacatttatttacatcagaatccgtttcagaaggacatccagataaggtagctgaccaagtcagtgatgcaattttagatgcgattttggagaaagatccgatggcccgcgtggcatgtgaaacatccgtaacaactggtttagtcctagtatttggagaaatttctacaacagcttatgtagatatccaaaaaattgttcgtcaaactgtgaaagatattggttatacacgagcaaaatatggatttgatggagagactgtcgcagttcttgtagcaatcgatgagcaatcacctgatatcgctcaaggggttgacgcagccttagaagtgcgtgatcaagatgaaaaagacgatattggcgctggtgaccaaggcttactgtttggttttgccgttgacgaaacaccagaattaatgccattaccgatcgcgttaagtcatcgtttggttcgccgtttagcagaattgcggaaggaaaaagtcttaccttacttacgtcctgatgcaaaatctcaagtaacagtggaatatgatgatcaaggtcaaccacaacgtgtggatacgattgtcatcagtacacaacatgatgatgaaacaaccttagaacaaatcgaaaaagacattaaagaacaagtaatcaatgaggtgattcctcatgaacttttagatgatgaaacaaaatactttatcaacccaactggtcgctttgtaatcggtggccctcaaggagatgccggcttaactggtcgtaaaattatcgttgatacttatggcggttatgctcgtcatggcggcggtgctttttctggaaaagatgcaaccaaagttgaccgctctgctagttatgctgcgcgttatatcgcgaaaaacattgttgctgctggtttggcgaaaaaagtagaagtccaattagcttatgcaattggcgtggcgcaaccagtgtctatttctattaatacgtttggtacgagtgctcttccagaaagtaaattaatcgaagcagttcgtaaaaactttgatttacgtccagcaggtattattgaaatgctagatttacgtcgcccaatttataaacaaactgcggcttatggtcattttggtcgaacagatattgatttaccgtgggaacaaacagataaagttgaagcgttaaaa

SEQ ID NO: 3824 - DNA, 2405 bp, Enterococcus faecalis
gttcaagaattaacccttgaagaagtaatgggcgatcgttttggaagatattccaaatacatcattcaagaacgggccctaccagatattcgagatgggctaaaaccagtacaacgccgcattctcttttcaatgaataaagatggcaatacctttgataaaggctttcgtaaatcagcaaaatctgtcggaaacattatggggaattatcatccccatggcgacagcagtatttatgaagcgatggtccgtctaagtcaagactggaaattacgggaagtactaattgaaatgcacggaaacaacggaagtatggatggcgacccgccagcggcgatgcgttatacagaagctcgtttatcacagttaagtggtgagttgttaaaagatatcgacaaaaataccgtcgatttcgtctggaattttgacgatacagaaaaagaacccactgttttaccagccaaatatcctaatttattggtaaacggctcaacggggatttcagcaggctatgcaacagaaattcctacgcataatttagcggaaattattgatggaaccgtgtatttaattgatcatcctaatgcaagtttagagaaattaatggaatacattccaggaccagattttccaacaggtgggatcctacaaggaaaagcagaaattaaaaaagcctacgaaaccggccgtggtaaagtaattttacgtgcgaagacaaagattgagcccttaaaaggcggcaaacaacaaattgtcatttctgaaattccttatgaagtcaataaagcaacgctagtgaagaagatggatgaaatccgtttaaataaaaaagtagacggcattgccgaagttcgtgacgaaagtgacagaactggcttgcaaattgttgttgaactaaaaaaagatgtcaatgcagaaggtattttaaattatctatttaaaaacactgaattgcaaatcaattacaactttaacatggtagccatcgacaacatgaccccgcaacaagtgggactaaaacggattttagaaagttacattacgcaccgcaaatcagttatcattaaccgttgtcaatttgagttggacaaagctcgcaaacgtgagcacattgttgctggtttaattaaagcattgtctatcttagataaagtgattgcaacaattcgtggcagtaaagataaaaaagatgcgaagaagaacttagtatccgactacgcgtttactgaagaacaagcagaagcaatcgttactttacagctataccgtttgaccaatacggatattactgatttacaagaagaagcgaaaactttagaacaacaaattgctgagttattgaacattttaaacaatgaaaaagaactattctcagtcatgaaaaaagaacttcgcgaagttaaaaagcaatatggaaatccgcgcttaactcaaattgaagaggaaatccaagaaatcaagattgaaacagccgtgttagttgcgcaggaagacgtggtcgtaaccgtgacgcacgaaggctatatcaagcggagtagtattcgttcttatacagcatcaaaaccagaagaaatcggcatgaaagaaggcgactttttactatatgctggcgaagtcaatacattagatcatcttttactagtaacaaataaaggaaatatgatctatcgccccgtccatgagttgccagatttacgctggaaagaaattggcgaacatatttctcaaaccattttaaatcttgctatcgatgaatcgattattgctgtatatccttataaagagttaagtccgacaaaaacctttgttttcattacaaaagctggcatgattaaacaaaccaaaatggctgattttgagccttggcgcacttataagagccgcccgacatcttgtatgaaattaaaatcagaccaagatgaaattaccaatgtttatttaacaaatgatcaagacttattggatgttttcctcgttagcaatcgcggttttggttacgctatccattatatgaagtaccagtcgtgggtagtaaagcggctggagttaaatcaatgaacctcaaagaagacgattatgtcgttaatggtttactggttcattctgaaggggatacaccaattgtcatcgttacccaacgtggcggtgttaaacgcatgttagcccaagaattaacacaattaggacgagcaaaacgtggactaatggtcttgcgggaattgaagaaaaatccacatcgtgttgtctttatgtctgaaagtaccgatttagatttattagttactacgcaaaaaggcacacaagaagttattcagtcgaaaaactatccaatcagtgaacgaacatccaacggttcctttgtcatcgatgaacaaaaagatggccaagtaatggaagtccacgag

SEQ ID NO: 3825 - DNA, 762 bp, Enterococcus faecalis
atgaaagaaattacatcaacgaaaaataaccaattaaaagaatggaaaaaattatacaaaaagaagtaccgagaagaactgaaccaatatataatagaaggatttcatttagttgaagaagctgtgaaggccaatgccgatgtccagtggattttgtttaaccaaagaggtcaacaagaatggggaacttggttagctgaacaagaaacagaaaaattaatttttgttagtgatgaggttttaaatagcttgtcggagctgccaacttcacaaggaattttggcaattgtcaccttggaaacgcaacaagagcagtcgctttcttttaaaggtggttggttacttttagataatatccaagaccctggtaatgttggtacgatgattcgcacagctgatgcagcgggtttagcaggcgtgattttaggtaagggcacagcagatatttacaatacaaaagtgttgcgctcaatgcagggaagccactatcatttaccagttctccaacgagagttgactgaagtggttcaggcattcaagaagcaaggtctaccagttttcggtacagaactaaatgaagctgcgattgcttattatgaacaagaggcagtggaaaattatgcgttgattttaggcaatgaaggtagcggggtttcgccagaattgttagcagaaaccacgaaaaatctttatattccaatgaaaggtcaagcagaatcattgaatgtcgctatcgcagcgggcgtgttaatgttttacttt

SEQ ID NO: 3826 - DNA, 1308 bp, Enterococcus faecalis
atgtttttagatcaagtgacgattgatgtcaaagctggtaaaggcggcgacggaatggttgctttccgtagagaaaaatatgtaccagacgggggtcccgctggtggtgatggcggtcgcggtggcgacgttgttttagttgttgaagaaggattacgcacattaatggatttccggtttaatcgtcattttaaggcgacacctggagaaaatggtatgagtaaaggaatgcacggtcgtggttcagaagatttacttgtcaaagttccaccaggtacaacagttcgtgatgcagaaactggagccttaattggggatttaattgagaatggtcagaccttagtagtagcaaaaggcggacgcggtggtcgtgggaatattcgctttgcttccccaagaaaccctgcaccagaaattgccgaaaacggcgaaccgggccaagaacgtaaaattgaattagaattaaaagttttagcagatgttggcttagttgggtttccttctgtagggaaatcaacgttactctctgttatctcgtccgctcgtccgaaaattggtgcctatcattttacgacgttagttccaaacttaggaatggtgactactagtgacggtcgaagcttcgctgcagcagatttgccaggcttaattgaaggagcttctcaaggtgtcggcttaggaacacagttcttacgccatattgaacggacgcgtgttattttacatgtcattgatatgagtggcatggaaggacgcgatccttacgaagattatttggcaatcaataaagaattggcttcacacaatttacgtttgatggaacgacctcaaattattgttgccaataaaatggacatgcctgaagcagaagagaatttagcgaaatttaaagagcaacttgcgaaggaacgcaccgatgagtatgccgatgagctacctattttcccaatttctggggttactcgtaaaggtattgaacctttattaaatgcaacagctgacttgttggaagtaacgcctgaattcccattatatgaagatgaagtggtagaggaagaaaccgttcgttatggattccaaccagaaggtccagaatttacgattgatcgtgaaccagatgcttcatgggttttatctggtgaaaaattagaaaaattatttgaaatgacgaatttcgatcatgatgaaacagtaatgcgttttgcacgtcaattacgtggtatgggtgtcgatgaggcattacgagcacgtggcgcgaaagatggcgacattgttcggattggtaattttgaatttgaatttgtcgaa

SEQ ID NO: 3827 - DNA, 2391 bp, Enterococcus faecalis
atgggaaaaaaaagaatttatgaactagcaaaagaaatgaataaagcaagcaaagacgttgtcgataaagcgcatcaattaggtatggatgttaaaaaccatatgggcgcaattagttccgagcaagaaacaaagcttcgtcaagcattcggaggaggaagtaccgtaaatactcaatcaaaagcaacaaacaaccaaaagcaacaaacaacacaaaataaaccagccaataagaaaccaatgaacaataaacctggtgaacaaagaaataaccaaaatcgtccaaacaatcaatcaacgaatggacaacaaagaaacaacaacaaccaaaatcgtcacggccaaagcaacacacaaaaccgtagcaatcaaacaaatacaaacaatcaaaaccgcaatacccaaaacaataacggttctacaacgaatcaaaatcggaccagccaaaataacaatggcgggaacaaccaaaaccgtggcggccaaaaccgtaacaacaattttggtggcggtcaaaatcgtaataaccggaataactttaataaccaaaaccgcaatcgtttcaacaaaaaagggaaaaaaggcaaacatcaacaagaatcagcgaagccagcagtaccagcacgtaaattccgtgaattaccagatgttttagaatatacagaaggtatgaacgtggcagatattgcgaaaaaaatccaccgcgaaccagcggaaatcatcaaaaaattatttatgatgggtgtcatggttaaccaaaaccaagccttagataaagatacaattgaattattagctgtggactatggcatggaaccgcaagaaaaagtccaagttgatattgcggacattgataaattcttcgaaccggaagcagttgttgaagaaaacttaactacacgtccccctgttgtcacaatcatgggacacgtagaccacgggaaaacgacattattagatacattgcgccattctcgtgtgacttcaggtgaagcgggcggtatcacgcagcatattggtgcctatcagttagatattgatggcaaaccaattacgttcttagatacaccaggacatgcggcctttacaagtatgcgcgcacgtggtgccagcatcactgatattaccatcttagttgttgcagcggacgatggagtaatgccacaaacaatcgaggcgattaaccatgcgaaagcggcaaaagtgccgattattgtagcagttaacaaaattgataagcctggtgcaaatcctgatcatgtgaaacaagaattaagtgaacatgaattaattcctgaagaatggggtggagatacgattttcgtcaatatttcagcgaaattcaatcaaaacattgatgagctattggaaaatattttattgattgctgaagtagaagacttaaaagctgatccaacgcaaaaagcaattggaacagtgattgaagcgcgcttagataaaggtaaaggtccggttgcgacattactcgttcaacaaggaactttacatgttggtgatccaatcgttgttggtaatacttacggacgtgttcgtgtgatgaccaatgacatgggccgccgtgataaagaagcaggacccgcaactcctgtagaaattaccggattaaatgatgttcctcaagcgggtgatcgttttgtggtctttgaagatgaaaaaacagcacgtcaagcaggggaagaacgggctaaacgtgcgttgcttgaacaacgttcagcaagtagccgtgtgacattggataacttatttgaaagcctaaaagaaggcgaattaaaagaagttaatatcattgtcaaagcagacgtacaaggatctgccgaagccgtttcagcaagtttacaaaaaattgatgtagaaggcgttcgtgtgaaaattgttcacgcggcagttggggccatcaatgaaagcgacgtaactttagccgcagcaagtaatgcgattattatcggctttaacgttcgcccaacaccacaagcgaaacaacaagcagaacaagaagaagttgatattcgtttacaccgtattatctataaagccctagaagaaatcgaaacagcgatgaaagggttattagatccagaatttgaagaaaaaattacgggtcaaatgacggttcgtgaattgtacaaagtatctaaagttggcacaatcgctggctgttatgttacagaaggctttattcgccgcgatagtggcgtgcgtgtcattcgtgatggtattgttatttatgaaggtaaattagcaagcttgaaacgctttaaagatgacgtgaaagaagtcaaacttggttttgaatgtggcgctatgattgaaaacttcaatgatttacgtgtagatgatgcgattgaaggcttcattatggaagaaatcaaa

SEQ ID NO: 3828 - DNA, 888 bp, Enterococcus faecalis
atgaaaaaagctagagtgatttataatccaacgtcaggaaaagagttaatcaaaaagaacttagccgatattttatctattttagaagaatgtggttatgaagccagtgcatttgcgaccacaccagaagaaaattcagcacgcaatgaagcacatcgtgctgcgcgtgcaggatttgatttactagtagccgcaggtggagatgggaccattaatgaagtcgtgaatgggattgctccgttgaagcggcgccctaaaatggccattattcctgctggaacgacgaatgactatgcacgggccttgaagattcctcgtgataatatcgttaaggcagcagaagtgattaaaaaaaatcaaactgtcaaaatggatattggccaagccggcaaaaattactttatcaatattgcggcgggtggtcatttaacggaactgacttatgaggttccgtcagagttgaaaagtatttttggttatttagcgtacttagccaaaggagccgaaatgttgccacgagtgaagccgattaaaatgcgcatgacgtatgatgaaggtgtgtacgaaggcaatgcatcaatgtttttcctagggctgactaactcggtgggtggttttgagcaaatcgtaccagatgctaaattagacgatggtaagttttcattaatcattgtaaaaacagccaatatttttgagattcttcatttagttgcgttaatgttaaatggtggaaagcatgttgaagatcatcgactaatctatacaaagaccagctatttacatgcagaaacgttagaaaagaacaataaaatgatgattaatttagatggtgaatatggaggcgatgctccaatgacctttaaaaatatgcatcaacacattgaaatt

SEQ ID NO: 3829 - DNA, 1428 bp, Enterococcus faecalis
atgaactttgaaactgtcattggattagaagtccacgtagaattgaaaaccaactctaaaattttctcctctgcgccagcgcatttcggagcagaaccaaatagcaacacaaatgtggttgactggagttacccaggtgttttgcctgtcatgaataaaggtgccttagaatttggcatgaaagcagcacttgccttgaactgtgaaatttcaaaagaaacacattttgaccgtaaaaactatttttacccagataacccgaaagcataccaaatttctcaatttgatcaaccaatcggacatgatggttggattgaaattgaagtcgaaggcaaaaagaaaaaaattcgcattgaacgggtgcatttagaagaagatgctgggaaaaatattcacggcacagatggctattcttatgtagacttgaatcgtcaaggtacgcctttaattgaaatcgtttctgaagcagacatgcgctcaccagaagaagcgtatgcttatttagaagcgttgcgttcaattatccaatttacagaagtttctgatgtgaaaatggaagaaggttctatgcgttgtgatgccaatatttctttacgtccgtatggtcaagaagaatttggtactaaagcggaattaaagaacttgaactctatgaactttgtaaaaaaaggtttagcttatgaagaaaaacgccaggccaaagtcctattatctggtggcgaaattcaacaagaaacacgccgctttgatgaagcaactagtacaacgttgcttatgcgtgttaaagaaggctcaagtgactaccgttacttcccagagccagatgttcctcgtttttcaattgatgatgaatggattgaaaaagttcgcgctagtttgccagaaatgccagcctcacgtcgtgcccgttatatcagtgaattagggttacctgaatacgacgcaatggtcttaactttaacgaaagaaatgtcagatttctttgaagcaactttagcaaacggtgcagatgcgaaacaagcatcaaactggttaatgggcgaagtttctgcttacttaaacagtgaaaaagttgaattagccgatactaaactaacaccagaaaatctagcgggtatgattactttgattaacgatggcacaatcagctcgaaaattgcgaagaaagtgttcaaagagttaattgaaaacggtggagacgctaaagaagttgtcgaagcaaaaggtttggttcaattatctgatccagcgcaattattaccaatgattaacgaagttttagacaacaaccaacaatcaattgatgactttaaaaacggaaaagaccgtgcagttggtttccttgttggacaaattatgaaagcaactcgtggacaagcaaacccaggtgtggttaacaagttattgcaagaagagctttcaaaacga

SEQ ID NO: 3830 - DNA, 1188 bp, Enterococcus faecalis
ttaagcatggctttttatgattatccacaaaataaattaaaactgattggctttactggaaccaaaggtaaaacaacagcggcttatttcaccaaatatattttagatgttgctacacaacaaaaaacagccttgctttctaccatgaattcgacattagatggcaaaacattctttaaatctgcattgactacacccgaatctttggacttgtatcgaatgatggcaaccgctgttgctaacgggatgactcattttattatggaagtttcttcccaagcctacaaaactaatcgtgtctacaagttattttttgatgtcggcatttttttaaacattacccccgaccatatcagtccaattgaacatccaacctttgacgattacttttattgcaaacgtcaattgattacacattctaaagtcattgtgttgaatcacgaagctgattattttccattacttaaagaaaccgcacaacagcaaaaagtccctgccattgtctatggcagtcagccagctccagaagttgactattcattcgctgtttcttcagaggattccttacgttttatcgttgaaagtcctgcagatgcgttaggattggccggctcttatcaccttcgtttaggtggtgattttaacaaaggtaatgcgttaagtgcggcgattgctagtgtccttgtgggagcttcaaaagaagagtgtcaacaagggatcgcagcaaccaccgtccctggccggatggaatctttaacgaataccaacggtgcaaccgtctatgttgattacgctcataactatgacagtttgaagaatcttttaacctttgtccgtgaagaacatcctgacggccgcttaattgttcttgttggtagcacgggagacaaagcgatttctcgccgcaaagactttggtacggttctttctgaattggctgatgttgcagtcctaacaaccgatgacccagccagtgaagatccagcaaaaatttgccaagaaattcaagcccatattaccaaagaaatgcctgtttacaccgttttagatcgtggcgaagcaattgctcacgcattatctttaagcacaacggctgatgatgcgattgtcttagctggtaaaggcgccgacctttatcaaaaagtaaacggcgtagatgaaccttacgcaggagactttgcccttgcg

SEQ ID NO: 3831 - DNA, 3741 bp, Enterococcus faecalis
cgtccagccaatgagcaattcaccgacagtcaatggcaagcggtgtttgatggcgatgaaaatatcttagtttctgcttcggctggctcaggaaaaaccaccgttttagtccgccgtgtcattgaaaaagtcaaaagcggcgtcgatatcgatcgtctcttgattgtgacgtacactgaagccgccgcccgtgagatgaaagaacgtatccaagtggctttacaaaaggcaatgaatgaagaacaagatccagaaagaagacggcatttttctcgtcaaattgctcttttgccaacagccaatatcagcacgttacatgccttttgtttaactgttattcgtcgtttttattatttaattgacatagatccagtttttcggatgttaacagatgaaacagaaacattgttattaaaagaagatgtttgggatgcattacgtgaacaattttatgcggaaaatcaagaagcgttttaccaattaacagcgaatttttccaatgaccgtagtgatgacggactcactaacttaattttttctttttatgaatttgccaaagccaatcctgatccagaggcgtggattaatggcttaacacaagcctacgaagtaggggatcagctaggcgaatcaacgttatttcagacgtatttaaaaccgctagccgttgagacgttacaacgaactcttcagcgttacgaagaaatggtgaccttaacagagggcgaagagaaacttcaaaagatttggtatttagctcaaaatgaaaaggaacaaacaaaacaatttttacaatttttagagagaaatgatttagaaagcgcctataatttgactgaattgttaagctttgaccgctacccaacggttcgtgccgaagagttgaaaccaaccgcggaacaagccaaacagttacgagaacaaaataaaaaagcgttaaatgatttgaaaaagcaactgtttacactttctccagatgccatgaaacaagtcttgaaagaggccacgcccattgttcaagaaatggctcacgtggggaaacaatttatggaggcctatggcgcagaaaaacggcttaaaaatttagtggattttaacgatttagaacattatacgttagctattttagcgaaaaatcaggcagatggctggcatgcatcagaagcctcggtttactatcgcgaaaaatttgatgaagtgttagtcgatgaataccaagatatcaatcaattacaagaatctattttgtattggttgcgccgtccgcttagcacagaaggaaacctttttatggtaggagatgtgaaacagtctatttattctttccgcttggcagatcctacattgtttattgaaaaatacaatcagtatgggcaaggcaaagagggtaaacgaatcattctagctgaaaattttcgttcccgcaaagacgttttagactttacgaatttagtatttagtcaattaatggatgagcgagtgggccaaattgcttacgatgagtcagctgctttggttcatggttttgatcaattttcggaggcggctgattattcaactgaattgctaatttatgaaaaaaaagcaacagaatcagttgaatttccagaattacaatcccctgagttgttgattgaagataagacagaaggggaactttacgttactgctttgaaaattcgtgaattaattgaccaaaatttcttaatttatgataaaaagctgaaaacggatcgaccgattacttatcaagatattgtcttattaacgcctacaaagaaaaataatttaactattttagatgtttttaaatcattagaaattccagttcaagtcaatgatgctcaaaattatttccaagcaacggaaattcgtacaatgattgccttgcttcaattgattgataatccctatcaagacattcctttggcagctgtgttacgttcaccaattgttggattaaaagaaaacgaattagtgcttattcgtttggctaataaggaaaccagttactacgaagcatttttaacgtttaatcaaaagatggaaccaaccatggaggaagcagttgttcaggaaaaaactatacgttttgctgaatcattagaaaaatggcgggaacaggctcgacgcaaccagattagcaccttgctgtggacgatttatcgggaaacggcctaccttgattatgttggcgggttgcctgttggtaaacaacgccaagccaatttatatgcgttggttgatcgggccgcggcgtatgaaaaaacaaccttccgcggattatttcaatttgttcgcttcatcgaaaaaatgcaagaaaaagacaaagatttagcagaaccagtcgttttaagtgaagagaatgccgtacgcgtcatgacgattcacgctagtaaagggttagaatttccggtggtattcgttttagatatgaccaaagaatttaatgtcagtgatttgaatgaacgctatatctttgaagaaaatttaggggtaggcattcgttatttacaacctgaagaacgagttatgtacgatactttaccatttttggcgattaaacaagtacgattaagaaaattactatccgaagaaatgcggaagttatatgtggcgttgacacgtgcagaacagaaactttttctggtgggctcctataaagaccaagcggcgatgtggaaagagtggctgaaagttggcgatgtagaaacactggtgctaccagctgaaaatcgcttgcaaagtaaaagtagtttaatgaattgggttgggatgacattggtacgccatcaaaaagccgatgaatatcagcaagaagtagtagtaagtaacgttccgcaagtcaaaaagcacccagctaactttcatattcagtggttcaacgaagaacaactacgagcagccattcagcaattacaattgccagaaagacaagcagaggatttagccgaaaaagcgcaattatctgctgacaaaatcaatcgtggccttgcacggttaagtttcaattatccgtttgaagtggctactcggaccaccagttatcagtctgtttctgaaatcaagcgagtatttgatgaccccgataacaaagaaattggtaaaattgaggttcgggaagacaatactattcaagcgcaaccgttgattgtcaatcgaatgattgaaggagatttaagtaagcctaaatttttagatacggttcaagcgccctcagcagctgaaattgggacagcaacccattatttattacaactaattgatttaagtaagcaaccttcttacgaggaagtgcgagctgttcaagaacgcttagtggaaaataaattgattttaccagcaattgctgaaaaaatgaatctggaacaaatcgtggccttctttgacaccgccttaggaaaacaattgattcaacaccatcaaaccgttagaagggaacaacctttttctatgctgattgaagcagaagagctcattcaaaattatccagaaacgacacaagatgatttattaattcatgggattattgatggctatatcgaattagacaatcaatgcattttgtatgactataaaaccgatcatgtaaaaagcacctctccccaagcgatttctgaaattgtcgaacggtatcgcggacagatgaatctttatcgtagagcactacaagaggcaacgcataaagaggtgtcgcacgtctatttaattttattaaatggaggagtaattattgacatg

SEQ ID NO: 3832 - DNA, 1185 bp, Enterococcus faecalis
atggcaaaagaaaaatttgaccgttctaaatcccatgttaacattggtactatcggacacgttgaccatggtaaaactacattaacagctgcaattgctactgtattatcaaaacacggtggcggggaagcacaaagctacgattctatcgataacgctccagaagaaaaagaacgtggaatcacaatcaacacttctcatatcgaatatgaaactgaaactcgtcactatgcacacgttgactgcccaggacacgcggactacgttaaaaacatgatcactggtgctgctcaaatggacggagctatcttagtagtttctgctgctgatggtcctatgcctcaaacacgtgaacatatcttattatcacgtaacgttggtgtaccatacatcgttgtattcttaaacaaaatggatatggttgatgacgaagaattattagaattagtagaaatggaagttcgtgacttattatcagaatacgatttcccaggcgatgatgttccagttatcgcaggttctgctttgaaagctttagaaggcgacgagtcttatgaagaaaaaatcttagaattaatggctgcagttgacgaatatatcccaactccagaacgtgatactgacaaaccattcatgatgccagtcgaagacgtattctcaatcactggacgtggtactgttgctacaggacgtgttgaacgtggtgaagttcgcgttggtgacgaagttgaaatcgttggtattaaagacgaaacatctaaaacaactgttacaggtgttgaaatgttccgtaaattattagactacgctgaagcaggcgacaacatcggtgctttattacgtggtgtagcacgtgaagatatcgaacgtggacaagtattagctaaaccagctacaatcactccacacacaaaattcaaagctgaagtatacgtattatcaaaagaagaaggcggacgtcacactccattcttcactaactaccgtcctcaattctacttccgtacaacagacgttactggtgttgtagaattgccagaaggtactgaaatggtaatgcctggtgataacgttgctatggacgttgaattaattcacccaatcgctatcgaagacggaactcgtttctctattcgtgaaggcggacgtactgtaggttcaggcgttgttactgaaatcgttaaa

SEQ ID NO: 3833 - DNA, 216 bp, Enterococcus faecalis
gtggcaaaagaagatatgattgaagtcgaaggtacagtcgtcgaaactttgccgaatgcaatgtttaaagtcgaactagaaaatggacaccaagttcttgctactgtttcaggtaaaatccgtatgcactacatccgtatcttacctggtgacaaagtaacagttgaattatcaccgtatgatttaacgcgtggccgtattacttatcgctttaaa

SEQ ID NO: 3834 - DNA, 639 bp, Enterococcus faecalis
atgaacctcattttaatgggattacctggagcaggtaaaggcacccaagcagaaaaaatcattgatacgtatggcattccacatatttctactggagatatgttccgtgcagcaatgaaaaatgaaactgccttgggcctagaagcgaaatcttatatcgataaaggtgaactggttcctgacgaagtaacaaacggaattgttaaagaacgccttgctgaaccagacacagacaaaggattcctattagatggtttcccacgtacactggatcaagcaaaagcattagatacaatgcttaaagaattaaacaaaaaaattgatgctgtcattgacatccatgtagaagaagatgtattaatcgagcgtttagctggacgattcatctgtcgcacatgtggcgcaacgtatcataaattattcaacccgccaaaagttgaaggcacttgtgatcgctgtggcggacatgaattctaccaaagagaagatgataagcccgaaacggttaaaaatcgtttggcagtcaacattgaaagtagcgcaccaatcttagctttctataaagaacaaggcttgatgcatacaatcgatggcaatcgcgaaatcgatactgttttttctgatgtgaaaaaaatcatt

SEQ ID NO: 3835 - DNA, 1293 bp, Enterococcus faecalis
ttgttcaagctattaaagaacgcctttaaagtcaaagacattagatcaaaaatcttatttacagttttaatcttgtttgtatttcgcctaggtgcgcacattactgtgcccggggtgaatgcaaagggattgtctgatttaagtagcttaccctttttgaatatgttgaatatggtgagtggtagtgccatgcaaaacttctctatcttctcgatgggggtttcgccatacattacagcctctattattattcaactattgcaaatggatattgtacctagatttgtagaatggtcaaaacaaggggaagttgggcgtaagaaattaaatcaagctacaagatatctaacgattgtcttgggtgtggctcagtcaatggggatcactgctggttttaatagcttaagtcaaactgggattgtaaacaatccaaccttaggtacctttgtgatgattgcagttattttaactgctgggacgatgtttgtgacttggatgggtgaacaaattacagaaaaaggaatcggaaatggtgtttcaatgattatctttgccgggattatttctcgtttgccaggagcagtcaaagaaatctatgaagattacttcgtcaatatcgagtcttctcgtatttggcaatctgttattttcattgcaatcttagttattgctattttggtgattgttacagtcgtaacgttcttccaacaagcagagcgtaagattccaatccaatatacaaaacgtgtttctggtgcaccaacaagtagttatttaccgttaaaagtaaatgctgctggggttattccagttatctttgccagctcgttaattgcaacaccaaatgccattttacaagctttctcatcaaaattcgctggtgaaaattggtatgacattatgacaaaaatcttcagttataacacagttccaggggcaatcatctatactgtcctaatcgttgcgtttacgttcttctatgcatttgttcaagtaaaccctgagaaattagcggaaaacttacaaaaacaaggaagctacattccaagcgtgcgaccaggtaaaggtacagaagaatatgtatctggcgtgttaatgagattaagtgttgtcggctcaattttcctaggacttgttgctttacttccaatcattgcgcaaatggtttggaacttacctcaatcaatcggtttaggtggaacaagtttactaatcgttatcggggttgcattagaaacaacgaaacaattagaaggattaatgatgaaacgtcaatatgtcggctttatcaat

SEQ ID NO: 3836 - DNA, 438 bp, Enterococcus faecalis
atgaaacttcatgaattaaaacctgctgagggctcacgccaagtacgtaaccgtgttggacgtggtacttcatctggtaatggtaaaacagctggccgtggacaaaaagggcaaaaagcccgttcaggcggtggtgttcgtttaggatttgaagggggtcaaactccattattccgtcgtttaccaaaacgtgggtttacaaacattaatcgtaaagattacgctgttgtgaacttagatactttaaaccgttttgaagatggaacagaagtaactcctgttgtcctaaaagaagcaggaatcgttaaaaacgaaaaagcgggaatcaaagttcttgcagatggtgagttaacgaaaaaattaactgtgaaagcagctaaattctcgaaatcagcacaagaagctatcgaagctgctggtggttcaatcgaggtgatc

SEQ ID NO: 3837 - DNA, 888 bp, Enterococcus faecalis
atggaagaacaattagtcgattatttacactatttacaaatagagcggggcttatcaaataacacacgacggagttacgaacgagatttaaaaaaatacgtagcctttttacaagaacaaggcctgcattcttgggacgaagttgaccgttacatgattacagaatttttgcaatcccttcacgaagaacagcaagcttcagcaagtgtgattcggatgatttctagtttgagaggatttcatcaatttttacgtcaagaacgcttaagcgaacataatccgatgcaacatattgactcccccaagaaagttcaaaaattgccaagtacattatctgttgacgaagtgactcgattaattgaaacgcctgatacaagtaaaccactaggtatgcggaatcgtgctattttagaagtgatgtatgcaacgggcctgcgagttagtgaactaattgaaataaaattaggggatctgcatttatccattggtttattgcaaacaatcggaaaaggggacaaagaacgaattatccctttaggcgattatgcgattcaatggattgagcgctatatgaacgaagccagacctcaattgattaaaaaccatccgaatgaaacacacctgttcgttaatcatcatggtgaaccgttatctagacagggcatttggaaaaatttaaaacagattgttcgagaagcccagatagagaaaaatattaccccgcatacattacggcatagttttgcgacacatttgttggaaaatggcgcagaccttagaatcgttcaagaattattaggacatgcagatatctccacgacacaaatttatacacatattaccaaacaacgaatggcagatgtttataaggaacattttcctcgggct

SEQ ID NO: 3838 - DNA, 2348 bp, Enterococcus faecalis
aagaaaaagaccaaaaaacaacagcaacaacaagaacgtttaaattatatgtttcttggcctgatttttattttattcggtgtctttggactctttcgcttagggtttttaggcacgttattagcgaattgtttacgcttagttgtaggtaatacctttccatttgcagcgattttactaatcctgtatggcttattagtcatgatttatggaaaagattttccgttaaaaagagggcgccctatttttggggctgttctgatttatattagtgttttgttatttttccatgcctttatgtttcgaaatgttagtggcagtcaaccagatattttaggtaacacttgggaatttttgcaaagcgatttaaaagccaaccaggtgacgcaaaacgtagggggcggtatgattggcgcgctgctttatcaaggaacgtactttttggtggcacaatttgggagctatttaattgccaccttgctactgttagcgggtattttcttgatgagtatgtgggattttcagcaaattgttgatcatttccaaagtattcaagatcgcctaagtcatgtttcggcaaaatcacaggcgcgacaagaagaaaaagaggcgaagcgagcagcgaagaaagaagctaaggctgcagaacgccaagcaaaaattgaagccgctgcccaacaaaaattacaagagcgggaacgtatggaacaagcggcagccgatcgcttaacaaaaacaccagttgaaacccaccaaccaatggtggaagaaccggccgcaccaacgcctgttcaaattgattcgtttcaacagcaaaatcaggcgatgcctgtaccaccaattgcagcaacaaaaccgcaacgagagcaggaagaagaggcggcagatgaagctggtgttctcgaatttgaaatttctgaagaagcggaagatcgtgattatcaactaccaccaactgatttgttagatacaattcaagcaacggatcaaagtggtgaatatgaaaaaatcgaaaaaaacattggcgtcttagaacaaaccttcaagagttttggcgttgatgctaaagtggtcaaagctagtttaggaccatctgtcacaaaatttgaagttcaacccgctgttggggtaaaagttagcaaaattgttaacttgacggatgacattgctttagcacttgcggccaaagacgttcgtatggaggccccaatacctggcaaatcactaatcgggattgaagttcctaatagtgcaattagtacagtatcctttagagatattgttgaggcacaaccaagtcatccagataaactattagaagtacctttaggtcgagatatttcagggatggttcaaactgcggatctatcaaaaatgccgcatttattaattgcgggatcgacagggagtgggaaatcggttgctatcaatggcatcatcacaggtattttgatgcaagcgaaacctcatgaagtaaaattaatgatgattgacccgaaaatggtggaattgaatgtgtataacgggattcctcatttattaacgccagtggttactaatccgagaaaagcagcacaagccctacaaaaagtagttcaagaaatggaatttcgttatgaaaaatttgcagcaacaggcgtccgaaatattactggttacaatcaactaattcaacagaaaaatgcggaagatggcgaaaatcgtccgattctgccatttattgttgtcattgttgatgagttagctgatttaatgatggtggcaagtaatgaagtagaagatgcgattatccgcttagcccaaatggcacgggcagcaggtattcatatgattttagcgacacaacggccaagtgtggatgtcattacaggaatcatcaaagcaaatgtcccttctcgaatggcttttgcagtctcaagtgggacagactcgcgtaccattattgataccaacggggcggagaaactattaggtcgaggcgatatgctcttcttaccaatgggagaaaataaaccaattcgtatccaaggggcctttatctctgatcaagaagtcgaacgagtggttgcgtttgtaacggaccaacaagaagctgaatatcaagaaagcatgatgccaacagatgaaccgaccacttcaggcggtggcgaactcctcaagatgagttgtttgaagaagcgaaaaacttggtggttgaaatgcaaacagctagtatttcattgctacaaagacgttttagaattggctataatcgtgcggctcgcttagtagatgaattggaagcacacggagttattggaccatcagaaggtagcaaaccaagaaaagtctttctacaagcggaatca

SEQ ID NO: 3839 - DNA, 2331 bp, Enterococcus faecalis
tggcatttggactattatggctacgtgcctgggaaaaatgaatatgcggtggagtccctattaactgtcggcaatggctttttaggcttgcgcggcacgacacctgagatgacgatttctgatgatcattatccagcgacctacattgcggggctttataatacagcggcttcggaagttgcgggtcaagtagtggaaaatgaagatttcgtcaatgctcctgacaaccaacacatcgctttaaaaattggcgatgccactgactggttaacgatttccccagacacgctacaacaattacaccgtcaattgaacttgaaaacgggattgtttgtcgcagaaatgattttgaaagatgcggacaatcagcaaattaaattaacgacgaaaaaaatcgccaatatggcacagccgaatgactatcatctgcaatatacgtttgagccgttaaacttttcggccccgattactttgaaaaccgtcacggatggcagtgtctacaactataacgtggcgcggtatcgcaacttaacagccaaacattttcaggtgacagcattaagcgcgcaggaaaacaaaaccgtgattgaggtttgtaccaatcaatccaacttgagcgtccgagaaacggccttgataactggtgatttttttgaaaaagaagcgattacgattcaagaagaagcggaaaaaatcgcccaagtggtgaccgtgatggcgcaccaaggaacacgctatacgctagaaaaacaagtctttgtgcaagccagccacgccgaacaaagttggcaggtaccgtttacgccgaaggactcttttgcggccgccgctcaggaaagcgcccgcgcttggcaaaccctttggcaacaagccaacattaccgtgacaggcgatttgatgtctcaaaaacttttacggattcacagttatcacttgctggcttcggcttcgccttttagtaaccaagcgcaagcattggacgtctcgattaccgcccgaggcttgcacggtgaagcgtatcgtggacatattttctgggatgaaatttttattttacctttttatattcaacattatcctgacacagcgaaacaattgttgctgtatcgctaccatcgattagagaaggcgaaggaaaatgcggcggccagccagtatcgtggcgcaatgtatccgtggcaatcaggtcgtgatgggcgtgaaaccacgcaaaaacttcacttaaatccgttgaatggacattggggcgaggatcatagtattctgcaacggcatgtgtccttggcgattgcttacaatgcttggttgtattggcatagtacacaggatcatgaatttatgaaacaatatggcggcgaaatgttgttagaaatcgctcaattttggaacagcgctgcgacgttagatgacgcaacaggacggttctttattgataaagtgatgggacctgatgagtttcacgagggctatccagaccaagcggaaagcggcttgaaaaacaacgcctatacgaatttgatggtggtttggctattcgaagaattaaccaacattttggcacttttctctgaggaagaacaggcacaactttttgccaaaacgcagacctcttcggctgatctagcccgcatgcagcaaattcaaaattcactggaaattgaagttaattctgacggcattattgcgcaatatgaagggtatttcggcttaaaagagattgactgggcggcgatgaaagagaaatacggcaatatttaccgcatggatcgaattttaaaagccgaaggagaatctcccgatgattacaaagtggcgaaacaagccgacacgttaatgttgttctacaacttagacaaaactcgggtggatcaaattttagaagatttagggtatcaattgcctgcggattatttggaaaaaaatcttttgtattatctaaaacggacgtctcatggttcgactttgtcacgaattgttcatgcccaattggcagaaatggcgcaattccatgagctatcttggcaactttatcaagaagcgttgtattccgattatcgtgacattcaaggtggcacgaccgctgaagggattcatacaggggtcatggctgcgacgatccacgttactttagcgacgtatgcaggcgttgacacgcgccagaacgagttatcaatttgtccaaacttacctgaacattggcaagcgctggcgttccagtttattcatcaaggcgtgacgtatcaattttcattaacacaaaccagtgtcacgattacagcagataaagacacacaattattggttcagggcgcgttgattccgttaaccgcc

SEQ ID NO: 3840 - DNA, 981 bp, Enterococcus faecalis
gtaagtatgaaagtttttgattatgaagacgtccaattaattcccaataaatgtatcgtgaatagtcgttctgaatgtgatactacagtaactttaggaaaacattcgtttaaaatgcctgtcgttccagcgaacatgcaaacaattattgatgaaacgattgcggaaacccttgctgaaaatggttatttttatatcatgcatcggtttgatgaagaggcgcgagtgccatttattaaaaaaatgcaacaaaagggcttaatcacgtcaattagtgtgggtgtgaaagaaggggaatacgcttttgttgaaacgttagcccgagaaggtttagttcctgactacgtgacaattgatatcgcccatggtcattcaaatgcggtgattaatatgattcaacacttgaaaaaatttttaccagaaacgttcgttattgcgggcaatgttggaacgccagaagccgttcgcgaattagaaaacgctggagccgatgccaccaaagtggggattggaccaggaaaagtatgtattactaaaattaagactggctttgggacaggtggctggcagttagcggctttacgttggtgtgccaaagctgctcggaaaccaattattgcagatggtggaattcggacccatggagacattgcaaaatctgtgcgttttggggcaactatggtcatgattggttcattatttgctggacatgaagaatcaccaggtgaaacaaaagtggaagatggcgttgtttacaaagaatactttggtagcgcctctgaattccaaaaaggcgaaaagaaaaacgttgaaggcaaaaaaatctggttacgccataaagggaagttggcagatactttagtcgaaatgcaacaagatttacaatcttccatttcatacgcgggaggtcgcgatttagaagcgattcgtaaagttgattatgtgattgtaaaaaattctatttttaatggtgataccatt

SEQ ID NO: 3841 - DNA, 228 bp, Enterococcus faecalis
gtgaaagagttaattttaactattgtccgtccgttagtcagtcaacctgaagcagtctcattagaaattgaggaatcaactgatttcctcgagtataatttgactgtggccaaagaagatattggacgtatcattggtaaacaagggcgtgttgcaaaagcaattcggacaattgtttatagtgtacgtatcgatggtccgaaaaaggtccgtttaaatattcttgat

SEQ ID NO: 3842 - DNA, 2971 bp, Enterococcus faecalis
accgtacaagaaatgattttaaccttgcaaaaattttggtcatctaatggctgtatgttaatgcaagcctatgatacagaaaagggagccggcaccatgagtccttacacgtttttacgtgccattggacctgaaccatggaatgctgcctacgtagaaccttctcgtcgtccagctgatggacgctatggtgaaaatccaaaccgtctataccaacatcatcaattccaagttgtaatgaagccttctcctgaaaatatccaagaactttatctagaaagtttgaaattattaggaattgatccattagaacatgacattcgttttgtagaagataactgggaaaatccctcaatgggttgtgctggtttaggttgggaagtttggttagatggcatggaaattacccaatttacgtatttccaacaagtcgggggcttacaatgtcatcctgtcacttctgaaattacttacgggttagaacgcttggcatcatatatccaagaagtcgaaagtgtctatgatttagaatggacacaaggcgttaaatatggtgaaatttttgttcaacctgaatatgaacattcaaaatattcctttgaaattagtaaccaagaaatgcttttagaaaactttgacaaatttgaaaaagaagctaaacgctgtattgaagaaagcttagttcatccagcctatgattatattttaaaatgtagccatacattcaatttattagatgctcgcggcgctgtctctgtaacggaacgtgcaggatatttagcccgcattcggaatatggctcgttccgtagcgaaaatttttgtggctgaacgtgaaaaattagggttcccattattaaataaagaccaacacgtatccaaggaggcagaataacatggcaaaagatttattattagaaattggcttagaagaaatgcccgcacatgttgtcacaccaagccgtatccaacttgaagaaaaagtaatcaaatttttagatgaacatcatttagactatgaaacagtgcaatcctttgccacacctcgtcgtttagccgtgaaagtaactgcgattcctgaaaaacaagcggatgttgaagaagaagtaaaaggtccagcgaaaaaaattgctttagatgctgaaggaaattggtcaaaagctgcacaaggttttgtacgcggccaaggagttacaactgaggacattgttttcaaagaattaaatggtgtcgaatatgtctatgtgacgaagtttaccaaaggccaaagtgccaaagaggtattaacaaaattaaatgacgtgattacaagtctaactttcccggtaacaatgcactgggcaaactatgatttcgaatatattcgtccaattcattggattgtggcactacttgatgatgaagtaattcctttcaacgtgttagacgtgacgacagggcaaacttctcgtggccaccgtttcttgggagacgatgtgacgttccaacacgctaatgaatatgaaacaaaattaaaagaacaatttgtagtggttcaaccgaatgaacggaaacaaatgattgttgatcaagcgaacgctctcgctgcagaaaaaaattggcagttagctttagatgaagagttattggaagaagttacgaatttagtggaatatccaactgcatttgtaggcagttttgatgaaaaatatttatctgttccagatgaagtattagtgacttctatgaaagaacaccaacgttactttgaagttcgtaacgaccaaggcttattaatgccgcattttatcgctgttcgcaatggggataatgttcaccttgaaaacgtgattaaaggaaatgaaaaagtgttaattgctcgtttagaagatgcagaattcttttacaatgaagataaaaaattaacgattgaagcatgtgttgaaaaactaaaaaatgtgactttccatgaaaagattggctcaatttatgaaaaaatgcaacgggttgctttaattgcacaaatcattggtcgaaaagttggcttatctgaggatgaattggaagatttaaaacgtgcctctgaaatttataaatttgacttagtaacaaatatggttggtgaattcccagaattacaaggaattatgggagaaaaatatgccttattacaaggcgaaaaaccagccgtagcaacggcgattcgagaacattatctaccaacttccagtgaaggtgaattgccagaaacagcaatcggggctgttttagccttagccgataagcttgacagcgtcttttcattcttctcagttggtatgattccaacaggttctaacgatccttatgcacttcgtcgtcaaacctatggcgttatccgaattattgaagataaaggctggaccttcccattagttcaattacaaacagaagttgatgaagcagtgaatcaagatgttgagaaatatggcgttttactaaacgaaggacaagcagaagtcgttgaatttgtgaaagctcgcttacgtcaattattaatgacgaaaaatgttcgccatgacattatcgatgcagtggtgtctgctgagcaagccgatttatcgaaattatttgcttcagcgaatattttaaaaagccgttttgaagatcaagattttaaaccatcaatggaagccttaacgcgtgttattaatttagcgaaaaaaggtcaagaacttttaggtgatactgaagaagggattgatccaagtctgtttgaaaataaggcagaaaaagaactgtatcaagcagttaacgatttatctgaagcatttgcgacacgcacgattgcagaaaactatgaagcactagtaaatctacgtccgttaattgatgcgtacttcaatgaaacgatggttatggttgaggatgaaaaagtcaaacaaaaccgattaaaacaattaatgcaaattgctaaaatggcgttatcaattgctagcctagatttattaatt

SEQ ID NO: 3843 - DNA, 792 bp, Enterococcus faecalis
atgatgaataaattgatttttgggcgctatattccaggtgattcttttatccatcgtttagatccgcgcgcaaaattattagctagtttttattttattggaattatctttttagcaaataattggcagagttatgttttaatagcagcctttactgcttttgctatttcattatcaaaaatcagcgcccgcttctttatccgcggtgttcggccgttattatggctaattctatttactgtggctcttcaaaccttgtttacacaagggggggaagtgtactttcagtggggaattatttccattacccagtttggtgtgacgaatgggctatttattttctgtcgttttgttttaattattttcatgtcaacgttattaactttaacgacggcaccattagagttatcagatgcgattgaatatttgctacgtccacttcgtgtggtgaaatttccagttcatgaagtttcattgatgttatcaattgccttacgttttgtcccaacattaatggatgaaacggaaaagattatgaatgcccaacgtgcccgtggtgttgattttggcgaaggaaacttacttcaaaaaatgaaagctattgttccacttttgattccgcttttcgtaagtagttttaatcgtgcggaagacttagcgactgccatggaagcaagaggttatcaaggtggcgaaggacggacaaaataccgcattcttcattggcacctacgagatacaatagtaatgtttggctttgtcttgttaaccattggcttatttgtattaaga

SEQ ID NO: 3844 - DNA, 450 bp, Enterococcus faecalis
gtttaccgtatgcaaggggtagaaatcggcgacaaacatatcgaagtaatggttcgtcaaatgttacgtaaaatccgcgtaatggatccaggtgacactgaaatccttccaggaacattaatggacatcgcagaatttaaagaccgtaactacgacacattagttgctggtggcgtccctgctactagtcgtccagtcttacttggtattaccaaagcgtcattggaaacaaacagcttcttatctgctgcatccttccaagaaacaacacgcgtgttaacagatgctgctatccgtggcaaaaaagatccattacttggattgaaagaaaatgttatcattggtaaaatcatcccagctggtactggtatggctcgttaccgtaacatggaaccaaaagaagttggcgtagctagcgaaaacgtttatagtatttcagacattgaagca

SEQ ID NO: 3845 - DNA, 1806 bp, Enterococcus faecalis
atgtgtggaattgtcggaatgattgggaaagaaaatgtcacggaaagtttgattcaaggattaacaaaattggaatatagaggttatgattctgctgggatttgtgtgaatgatcaaagccaacagccccatgtggttaaggcagttgggggcattgccgatttagcagcaaaattaacgccagaaatcgatggaacagttggtattggtcatactcgttgggccactcatggcgaaccaactgtcgccaatgcacatccccatgtttcaagcgatcaacgctttgcattagtgcataatggtgtcattgaaaactttgaagaattaaaagaacaatttttaagtggtgctcacttaattggtgatacagatactgaaatcgtcgttcaattaattgctcattttgctgaaaatggtttttcaacaaaagatgcttttaaagcggctttagccgaaattaaaggttcatacgcttttgcattaatggataaaatggaccccaatactatctatgtagcgaaaaataaaagcccgttacttatcggtctaggcgaaggctttaatgttatttgtagtgatgcgatggcgatgattaaagaaaccaatcaatttgttgagattgttgatggtgaaattgtaactgttacagcggacaaagtaggaatcgaaacgccagaaggacaagtaatcaaccgagaaccttttgaagcgcaattagatttaaatgacattgaaaaaggaacatatccgttttatatgctcaaagaaattgatgaacaacctgcagtgatgcgcaaaattgttcaagcgtatactcaaggtgaaaaagtgactttagatgaggcgttacttgaaaaaattaatcaatgtgaccgaatttacattattgcttgtgggacaagttataatgcaggttgggtcggaaaatctttaattgaaacgattgccagtattcctgtggaagttcatttatcaagcgaatttggctacaacatgcctattttatctgaaaaaccgttcttcattttcttaagtcaaagtggtgaaacggcagatagtcgccaagtactggtacaggttaatgaattagggcatccatcacttacattaacaaatgttgctggctcaacattatcacgtgaagcggacgataccttgttattacacgcaggaccagaaattgctgtcgcttccaccaaagcttatactgctcaaatcgctgtcttagctattttagcaaaagcaattggtgaagaacgccaaacattagcagccgtctcatttgatgtggctcacgaattgagcgtggtagcagctgtcatggaaaccttgattgatgaaaaacaacaaatgaaagccttggtggaagattatctgacgtatactcgaaatgccttctatatcgggcgaggagtcgactattatgtgtcgatggaagcggccttgaagttgaaagaaatttcctacattcaagcagaaggctttgcggcaggtgaattgaagcatggaacgattgccttaattgaagaaggaacacctgtgattgggattgtgacagatgccaaagtcgctgcccatacaagaggcaatttaaaggaagtcgaaagtcgtggagcaagaaatattgtgattgctttggaatccttggcaaaaccacaggaccaactgattattccagatgttcatccgttactttctgccttagttagcattgttccaggtcaattattagcgtactatgcaaccttacaaagaggctacgatgttgataaaccaaggaacttagccaaaagtgtaactgttgag

SEQ ID NO: 3846 - DNA, 2631 bp, Enterococcus faecalis
atgaaagaattaacaagtagtcaagttcgtcaaatgtatttagacttctttaagtctaaaggacattcagtagaaccaagtgcttctttagtaccagtaaacgatccaacattattatggattaactctggtgttgcaaccttgaaaaaatattttgatggctctgttgtgccagaaaatccaagaattacgaatgctcaaaaatctattcgtacaaatgatattgagaatgttgggaaaacggctcgtcatcatacaatgtttgaaatgttagggaacttctcaattggagattattttaaaaatgaagcgattcactgggcttgggaattcttaactggtgctgaatggcttgcttttgacccagaaaaattatatgtgactgtttatccgaaagatacagaagcaaaacgcatttggcgtgatgaagttggtttatctgaagaccatattattgatgtagaagataacttctgggatatcggtgctggtccaagtggtccggatacggaaatcttttatgatcgcggcgaagaatttttagatattccagaagatgatccagaaaattatcctggtggcgaaaatgaacgctatttagaaatttggaacttagtgttctctgaatttaaccatacaccagaagatacgtacgaaccattaccacataaaaacattgatacgggcatgggcttggaacgtgttgtatctatcattcaagatgcaccaacaaattttgaaactgatttatttatgccaatcattcatgcggtagaagctttaggaaccaacgtgaaatatggagatgcaccacaaacggatgtttcctttaaagtgattgctgaccatattcgtgctttatcctttgcaattggtgatggtgcgcttccttcaaatgaaggtcgtggctatgtgttacgtcgtttattacgtcgtgcggtaatgcacgggaaaaaattaggcattaatgaagcctttttatacaaattagtgcctgttgttggcgaaatcatggtaagctactatccagaagtattacaacaaaaagacttcatcgaaaaagtggttcggacagaagaagaacgtttccatgaaaccatcaatgaaggtttaagcatgttaaatgaggttattaaagaagttaaagatgcaaaaggcgatacattagatggaaaaattatcttcaaactttatgatacttttggcttccccgtagaattaacggaagaagttgcggaagatgaaggcttgaaagtcgatcatgctgggtttgaaacagaaatggaagcacagcgtgaacgcgctcgttctgcccgcagtaaagaaacttcaatgggtgttcaatctgctttattaacagatattaaagtagaaagtaaatttgttggctatacagaattaacacatgatagtgaattatttgttattattcaaggtgacgcactagtaaatgaagcatctgcaggaacagccgaattaatttttgctgaaacaccattttatgctgaaatgggtggacaaattgctgaccgcggctatgtaaaaaataccgcaggggaagtcgttgccaacgtggtggatgtgaaaaaagcaccaaacggtcaatttttacacaaagtagaagttttggcgccattagcagaaggccaaatttatcaattgcaagtggacgaacggatgcggacacgtattttgaaaaatcatacggcaacccatttattgcatcgtgctttaaaagatgtgttaggggagcatgccaaccaagcaggctcattagttgcaccaggacatctacgttttgactttactcattttgggcaagttacatcagaagaactagcgcggatggaagccatcgttaacgaaaaaatctgggaagctattcctgttgtcacaattgaaacagatattgatacagcgaaaaacatgggcgcaatggcgttatttggcgaaaaatatggcaaagaagtccgtgtagttaatattggggattactctatcgaattatgtggtggaacacacgttgctaatacagaagatatcgggattttcaaaattgtttctgaatctggaattggtgcaggagtacgccgtattgaagcagtgacgagtaaagaagcgtatcaacttttacaagaagaagaacgtcaattgaaagagattgctacactagttaaatcacctcaattaaaagaagtggttacgaaaacagagcaattgcaacaacaattacgtgatctacaaaaagaaaacgaacaattggcaggcaaattagcgaaccaacaagctggtgacatttttaaagatgtcaaagacatcaatggtgttcgttatattgccgctcaagtcaatgttaaagacatgaatcaattacgccaattggctgaccaatggaaacaaaaagaattgtctgatgtactagttctagcaactgcacaagatgaaaaagtaagcttgttagcggctatgacaaaagacatgaacggaaaaggcttaaaagccggtgacttaatcaaagcaattgcgccaaaagttggcggtggcggcggtggtcgtcctgatatggctcaagctggtgggaaaaatccagcagggattgcggatgccttagcagaagttgaaaactggttg

SEQ ID NO: 3847 - DNA, 378 bp, Enterococcus faecalis
gtgagttaccgtaaattaggacgcacatcaagccaacgtaaagctatgctacgtgatattacaactgatttaatcatcaacgaacgcatcgtaactactgaagctcgtgcgaaagaagtacgttcaactgtagaaaaaatgattactttaggtaaacgtggagatcttcatgcacgtcgtcaagcagctactttcgttcgtaatgaagttgctagtgttcgtgaagaagatgagtctatcgttgttgaatcagctttacaaaagctatttaacgatttaggacctcgtttcgcggaacgccaaggtggttacactcgtatcttgaagacagaaccaagacgcggcgatgcagcaccaatggtagttatcgaatttgtt

SEQ ID NO: 3848 - DNA, 3903 bp, Enterococcus faecalis
atgaagagaattaactggcaacgcttagcaaccattggcttgtgtagttctttagtgattaacgccttttctggcgtaacagccattgcggaaacagttatgagtgaaagtagcccgacagtggcaaatagtattaaggaagcaacaccagcaagtagcgcaaggcaagaaagtacggaaagcagtcaaaaaacgactgaaacgagtcaggaagaagtaacacaggaaacagcgaaacaagcagagacaaaagcgccactggaaacaccagagataaaaacaaacacaacagcacaacctgcagaaaatagtagtgaaaatgaccgacaaacgagtatttcgccacgttgggtgccgaataatcaagtgatttatccgagaataaccttggctttcactaatgaatcagggcaagtttttactgatgaaaacttaacgttatcagggacgtatactaaatttggatatgaaaacgcaactagtttatggcgatcgtatgcggttaattatccaattacttcttctaatgcagaaggcggtcaatatcgagtagctgtcaatgcaacggttcctttaccatacgatttttttacagatttaccagcaaattataggatgaatatatacgcggttgaacaattaaagattgataacacgctaaagtatgtcgacagtattgttgctgtgcccaattctacactgaggatgaccagatatagtgcacaacaaacaactgagttaccgcagtttggaaatcatatgactccttttgtattacgcacaagagatagcgtgttttctaaaagcagtgaaaatgttttctctctaaacacggatggtaatgaatttttaagaatcctgagtgtcgcccccattggcactccagtagaaccagtattatacggatttgatggcactgcaacgtaccgagaaacacttaattacgtagtcactcggaaacaagtcaccgagaagttcgtagatgctaacggcgtagctatcacgccgccaacaggttttacccaaaacaagaaaacaccaatgaccagcaatgacttcaccttcaaacaagctagtactttgccggacacctatcaagcagacggcaaaacctacaaattcaaaggctggtacaaaggcaaaaccaagccaaataccttgaccacgaccaaagcgccaagctatgcggtgacctatgattggaatgacgatttgacggtggtgtatgaggcgattcaaaatcctgtgacttttcaagaaggaaaaggaatgtcatctgttcaggtgatgaataaggcgattcagaatccagtgactttgcctgatcgcatgtatcgtgtcctatttatcaatgaaacaggggggctgacatttgctgatcgttatggctttactggagaattagttgaagttgcggatggcaaagtgacgccaattggcccagtcccgactaacaataatagcgcagtaaaagaaatcactataccaggtcgagttttcgatacagaaagacctacgccgttgcaatatggagttcgcaatgcaacctttacgttgcccaaaatgtataaaaccgtaacgtatcaacctggcccaaattatacaggtacagcctactctattccagaaacgtatcgtcttagtttaagaagtggtgtcaaaagtgacatcgatacaactggatggcgaattggtcttgacccgacaacagatccacaaaagtttacgatgagcggtatatactggtcatcaatgcctacaaatgttagacttgcaacactattaagtgcgactattactggtaaaggagtagaaccgagtgtctatacactagatgaaaatgcacgtatgtatctttacctagaaaatcgtcgtgttacggaaaacttcgtagataccaatggtactaaaatcaccgcaccgtcaggtttcgcccaagggaaaaaaacagtaattactagtgattcgtacacctttaagcaaagcggagatttgccagatacctataaagtcggcacgaaaacctatcagttcaaaggctggtacaaaggtaaaaacaaaccagacaccttgacgacgaccaaagctcccagttatccagtcacttataatgatgatgatgatttgacggtagtctatgaagaagtcgtgatgaaaacgtataatttaccagccaaagatgtttactttggttatgttgatgaggcaggtaacctattgaatacagcaggcttttctgtagaagccgaattaggtgaaagtgacgaaactgaatcaacagtattagggaaaattcaaggaactgatgaagtgatgagtaaattaaaaaaattatcgattcctggcaagtcatatgatttcccgatagataagcttaagacatacggtgcaaggtctgttaatcatacaattcctaaacaatataagacaatgtcgattacaccgctagctacttatacgggagataaaacaaagtatcctatgaccaaagagatccggaaaaatatagaagcgccatatacggttgtttctcaagctgacggagtagaagccttcaaattaactaacgctggaactttttttagaaccagacgagctttttggacatgggacccgaataacacgttgtatgctatgggaatttattcagggacagtcggaaaaaactataacttagcttctccagagggaacaatctactattatttagaaaaccgtcgtgtcactgaaaactttgtggatccaagcggcgctaaaattacaccgccaacaggcttcacgcaaggaaaacaaacggtgattgacagtgataatttcacttatgctagtacgaaagccttaccagacacttatacaacaggagataaatcctataagttcaaaggctggtacaaaggtaaaaccaaaccaggcaccttgacaacgactaaaacaccaagttacgccgttacttacgacgataaagatgacatgacagcggtctatgaggaagtccaaccaacagcagaaatgacggttagtcggttactagaagtgatcccaaatgaagcttctatgatgtggatagttaaactaaaaaataccagtgaagttccattgaccaacgttaaactagctccaacggccaaatgggcggcaggtatttcaccaccaacacaattagctgttcgcattggtaatacaccaaataaaattattccagtgacggcagaacaatggcaagcaggagttaacttagatatagagattcctgtgaacggcgaagccttagtgacagtgaacacagcgaaaattacgggagaaccaagacaacttttaaccgcagaaatgacagctagtggaaacttttctgcagtgacagctagtaactttgtacgtattcaaggagaagatcaaacgattacgccaacaccagtagaagaaggtttcattagtacaccaacgtttgattttgggaaaattacgattaacagtagcactaagcagtacggactgaaaaaagcagctgattactatggcaacggcacacgtaatccatatctacgaataaagacaagccaacctaattggcagttaacagcacaattgtcacagttaacagcatcagctgatagtttgccaactagtacgcgtttattattaggaagtgcggatgttatagcaatcgaaaactataatcaagtcacagagttaacaaataaagttggggttacgaaagccttaactttgacgagtgacggcacatctacaccagtaattcttaataaccaatttacaggtaatgatgtctatcaattagattttgattttgccaatgtgaaattagaagtccctgccaatcaagggaaaataaatgagaaatatcaaggaacggtgacgtggaacttagtcactggaccttaa

SEQ ID NO: 3849 - DNA, 936 bp, Enterococcus faecalis
atgattgaatttgaaaaaccaagaatcgaaaaaattgatgaaaatagagattatggtaagttcgtcgttgaaccattagaacgcggttacggaactactttaggtaactctctacgtcgtattttattgtcttctttaccaggagctgcaattacgaatattcaaatcgatggtgttttacacgaattctcaaccattccaggtgtacgagaagacgtaacacaaattattttgaatattaaaggcttagcattgaaattatatgctgaagaagagaaaacccttgagatcgatattacaggacccgctaccgtgactgccggcgatattatcgtggacagtgatgttgagatcctaaataaagatttagttatctgtagtgttgctgaaggagctactttccatgctcgcttaacagtgaaacctggtcgtggctatgttcaagcagacgaaaacaaaaaagaagatatgccaatcggtgtacttccagttgattccatctacacacccgttcgtcgtgttaactaccaagtagaaaatacacgtgttggtcgtcgtgatgatttcgacaaattaacaatggaaatatggacagatggttcaatcattcctcaagaagcactaagtttagctgcgaaaatcatgactgagcatttagatatctttgtaaaccttactgacgaagcgaaaaacgctgaaatcatggtggaaaaagaagaaactcaaaaagagaaaatgctagaaatgacgattgaagaacttgatttatcagttcgttcatataactgtttaaaacgtgcaggcattaatactgtacaagaacttacaaacaaatctgaaccagaaatgatcaaagtacgtaatttaggtcgtaaatctcttgaagaagtaaaacttaaattgcatgatctaggattaggattacgtaaggacgat

SEQ ID NO: 3850 - DNA, 207 bp, Enterococcus faecalis
atgcgtttagataaatttttagccgatgttggtatcggtagtcgtaaagaaatcaaacaattgttaaagaaaaaagtcgttacggtgaatggtgacgtcgtaaaagaagccaaaacacaagtaaacgaagaaacagatcaaattgccttgatgggagaaattcttacgtatcagaaattcttttattacatgttgcataaaccacaa

SEQ ID NO: 3851 - DNA, 345 bp, Enterococcus faecalis
atgaatccattaattcaagaattaacacaagaacaattacgtacggatattcctgcgttccgccctggtgacactgttcgcgttcatgcgaaagtagtcgaaggtactcgtgaacgtatccagttattcgaaggtgttgtaattaaacgccgtggtgctggaatcagcgaaacttacacagtacgtaaagtttcaaatggtgttggtgtggaacgtacattcccattacacacaccacgtgttgctcaaattgaagtggttcgctacggtaaagtacgtcgtgcaaaactttactacttacgcgcattacacggaaaagcagctcgtatcaaagaaatcagaaga

SEQ ID NO: 3852 - DNA, 699 bp, Enterococcus faecalis
ttggacgcatatgagattattcagtatattggcgatgccaaaaagcaaacgcctgttaaagtaacactgaaagggcaattaaaagaagtcacgtttccggaaacaattaaggtctttaataattgtaaaactgggacattgtttggcgattgggctgacgtaaaaccttttttagaagcaaacaaagaaaaaattgaggattatgttgtagaaaacgatgcacgtaactcagcaattccttttcttgatctgaaagacattaatgctcggattgaaccaggtgctttgattcgcgaaaaagttgaaattggcgatcaagcggtgattatgatgggggctattctaaatattggcgccgtcgttggtgcagggactatgattgatatgggcgctgttttgggcggtcgtgcaactgtagggaagcattgtcatattggcgcaggaacggttttagctggtgtcattgaaccaccaagtgccgcacctgtggttattgaaaacgaggttgtcattggagcgaatgcggtcgtactagaaggggttcgtgttggtgaaggtgccgttgtggctgctggggcagtagttgtggaagacgttccagcgcataccgttgttgcaggcgtgccagcaaaagtaattaaacaaattgatgataaaaccaagagtaaaacagagattttagaagaattacgtaaactc

SEQ ID NO: 3853 - DNA, 1245 bp, Enterococcus faecalis
atgaacatcatcggcgttggaaatgcaaaatcagacggtttgaatcgagggattgtcgtcgatattgatcaaacagttcaagcaatccaacgggccgttcgacaagccgaagaaaaagccggcattcaaattaaaagcgtaaatgttggattaccagcgaatttattagaagtagaaagctgtcaaggaatgatagctgttagcagtgaatcaaaagaaattacagatgaggatgtgcgcaacgtcgcatctgcagctttggttcgttcaactcctcctgaacgtcaaattgttgcaatcttaccgcaagactttaccgtcgacggctttgaaggcatcaaagacccacgtggaatgcttggcgttcgcatggagatgtttggcgttgtctatactggaccaaaaacaatcatccataacatccgtaaatgtgttgaaaaagctggcttaggaattaacgaattagtgattacaccgcttgctttaacggaaacaattttaacagatggcgaaaaagactttggaacaattgtcattgatatgggtggcggtcaaacaacgacatctgttatccacgacaaacaattgaaatttactcatgttaaccaagaaggcggcgagttcatcacgaaagatatctcaatcgtattgaatacttcttttaacaacgccgaagccttaaaaattaattatggggatgcttatccagaaagaacttcagcaaacgaagagtttcctgttgatgttatcggtaagtcagagcctgtaagagtggacgaacgttacctttcagaaattattgaagcgcgtgtggaacaaattttgagaaaatcaaaagaagttctggatgaaattgatgcgtttgaattacctggaggcgttgtattaactggtggcgccgctagtatgccaggtattgtcgatttggcgcaagaaatttttgaagccaacgtaaaactatacgtaccaaatcacatgggcttacgtaacccagtctttgctaatgtcattagcattgtggaatattcagcgcaactaaacgatatttatcacattgccaaatatgcaatccctggtgaaaaatcgaaaccagcacaatcagtcgctgtccaacaagaagttcgctatgacacatatgctgaacagcctcaagaagaatacgaagaattcaacgaacgtgagtctggtgaaaaagtgacaggcaaaatcaaagacttcttctcgaacattttcgactaatcacac

SEQ ID NO: 3854 - DNA, 1239 bp, Enterococcus faecalis
atggaattttcattagacaataacattaacaacggtgcagtcattaaagttatcggtgtaggtggcggcggcggaaacgctgtaaaccgtatgatcgaagaaaacgttaaaggcgtggaatttatcacagccaatacagacgttcaagcattaaaacattcaaaagcagaaacagtgattcaattaggccctaaatacactcgtggtttaggtgccggttcacaacctgaagttggccaaaaagctgcagaagaaagtgaacaagtgatttcagaatcattacaaggcgcggatatgattttcattactgctggtatgggtggcggaactggtacaggtgctgcgccagtagttgcaaaaatcgctaaagaattaggcgctttaacagttggtgtagtaactcgtccatttagttttgaaggtccaaaacgtggtcgttttgccgctgaaggaattgccttattaaaagaaaacgttgatacactattaattatctcaaacaaccgcttattagaagtcgttgacaagaaaacgccaatgcttgaagcatttagagaagctgataatgtattacgtcaaggtgttcaagggatttcagatttaatcactgcaccaggttacgtaaacttagactttgctgacgtgaaaacagtgatggaaaaccaaggaacagctttaatgggaattggtgtagcgagcggcgaagaacgcgtaattgaagcaacgaaaaaagctatttcttcaccattgttagaaacatcaatcgatggtgcggaacaagtcttattaaacattactggtggcttagacatgaccttgtttgaagcacaagatgcttcagatatcgttacaaatgctgcttcaggtgatgtgaacatcatcctaggtacatcaatcaatgaagatttaggcgacgaaattcgtgtaacagtaatcgctacaggtattgatgaatcaaaaaaggatagaaaaccgcaccgtcaaacaagacaagcggttcaaccaatgcaacaaacaactcaatctgtggaaatggatcaaccaaaatcacaagaagaagcaagtgcttttggcgattgggatattcgcagagaacaaaatacacgtccaaaagttgatgaatcttcattagaacaagtagacaaaaaagaatttgacacattccaccgtgaagaaccaaatcacaatgatgacgaattaagtacgccaccatttttccgcagaaaacgataaggagca

SEQ ID NO: 3855 - DNA, 1041 bp, Enterococcus faecalis
atgagcaaagaaatgttaaatgcattagacgtattagaagctgaaaaagggattcctaaagatacggtgattgaagcgttacaagcagctttagtttctgcatataaaagacattatggacaagcaagcaacgtcgaagttgaatttgaaccaaaaaaaggcaatattcacgtgtatgctgtcaaagaagtaacagaagaagtatttgattcacaattggaagtttcattaaaagatgccgttgcattaaatggtgcatatgaaatcggcgacaaaattcgttttgaagttacgccaaaagactttggccgcattgctgcccaaacagcaaagcaagtaattttacaacgtgtccgtgaagcagaaagaacaattatttataatgaatttagcgaatacgaaaatgacatcatgcaaggaattgttgaacgtcaagatcgtcgttatatctatgtaaacttaggcaaaatcgaagcagtcttatcaaaacaagatcaaatgccaaatgaattttaccaaccgcatgatcggattaaagtttacgtatcacgtgttgaaaacacatcaaaaggcccacaagtttttgtaagccgtagccatccagatttactaaaacgtctttttgaacaagaaattccagaagtttatgatggaattgttgaaatcgtaagtgtcgctcgtgaagctggcgatcgttcaaaagtagctgttcgttcaacagatcctaatattgatccagtgggtacctgtgtcggtccaaaaggccaacgtgtccaagcgattgtgaatgaattaaaaggcgaaaatatggatattgtggaatggaacgaagatccagctatttatattagtaatgccttgaatccagctcaagtattagatgttatttttgatccagaaaatagcaaagcatgtacagttgttgtacctgattatcaattgtcattagcaattggtaaacgtggtcaaaatgcgcgcttagctgctaaattaacgggccataaaattgatatcaaatcagaatctgatatggctgaattt

SEQ ID NO: 3856 - DNA, 789 bp, Enterococcus faecalis
atgggaaaacacatgattaaaataattgtcgctgggtttaaaggacggatgggcagtactgctacacaaatggtcttagaaaccgcagactttgaattagtaggtgtgtatgatcctcatgaagcacaagaaactgtttctttcaatgatgaaacagcaattcccgtttttcagcgcttagaagaagtcctagctgtcaaaccagatgtttggattgattttacggttcctgaagccgcctatccaaatacacgttttgcgttggaacatggtatggcgccagttgttgggacgacaggctttacggaggaacaaatcaacgaattgacaaacctatctcgagaaaaagccatcggcggcttgattgcgccaaattttgcaattggggcagttttaatgatgcaatttgcccaaaaagcggcacagtattttccggatgtggaaatcattgaattacatcatgataacaaattggatgcaccgagcggaacggctataaaaactgcagaaatgattcaagaagttcggccagcaaaaaaacaagggaatccgcaagaggtagaatcaataccaggggcacgcggggctgatttcgagggtctgcgaatccatagtgtccgcttacctggtttagtggcacaccaacaagtccaatttggcagtgtaggtgaagggctcactattcggcatgattcttatgatcggcgttcattcatgacaggagtggcgttagcttgtcggcaagtggtacagagaacagaactactttacggattggaacagatgcta

SEQ ID NO: 3857 - DNA, 1143 bp, Enterococcus faecalis
tttaaagaagccgctcccgttattcgcgaaatcaatgcacagggctttgaagcgtattttgtcgggggcagcgtccgtgatgctttattaaataaaccaatccatgatgtcgatattgcgacaagtgcctatccagaagaaattaagcaaatttttaaacgaaccgttgatgtgggtatcgaacatggtacagtccttgtattgatggaagaccaacagtatgaagtaacaacctttcgtaccgagtcaacttatcaagactttcgtcgaccagatgaagtcacttttgttcgctccttgaaagaagacttaaaacggcgagattttacgattaatgccttggcacttgacagcacaggcgaaatcattgatttatttgatggtatcgaagatttaactaatcaaaccattcgtgcagtcggcaatccccatgagcggtttcatgaagatgctctgcgaatgatgcggggcttacgctttgctagccaattagattttaaaattgaagaaaaaaccttagccgctatcgctgaatttcatcctttattggaaaaaatttcagtagaacgcattacgattgaatttgtaaaaatgcttttaggggttaatcgacaaggtggcttagctccgtttattgaaacagaatgctatcaatactgtcccaaattacgagaacaaggggctggactttttcgtttaatggacttgcctgctcgtcaaattgaaacagaagcagaagcgtggacgttacttatccaatcattgaatttaccagaagcagaaattcgctccttcttaaaggcttggaaactttcaaatcaattaattcaaaacgtttcacaattagtacgcggtttgcgttttcgcttgagtaacgactggcagccaatgatgctttatgaattaggcgaagaatcagcagtacttgttgaaaggcttttatattattaccaacaagagagtcaagtacaagtaacaaaagagttagttaaggcattacccatccatcaaagacatgaattggccataacaggaaaagaccttttagccgtcttagaagaaacaccaggcaaatggttaggggaactgattgctgaaatcgagcaacacgttgttaaaggtaacttagagaataaacaagaa

SEQ ID NO: 3858 - DNA, 699 bp, Enterococcus faecalis
aagaaaattttagtagttgatgacgagaagccaatttcagagatcgttaaatataatttggttaaagaaggatatgaagtatttactgcttatgatggagaagaagcacttgaaaaagtggaagaagtggaaccagacttaattattttagacttaatgctccctaaaatggatggcttagaagtcgcgcgagaagtgcgcaaaacacatgatatgccaatcattatggtgactgccaaagattctgaaattgataaggttttaggattggaattaggagccgatgactatgtaacgaaaccattttcaaatcgtgaattagttgctcgtgtaaaagccaatttacggcgaggtgcaaccaatgcgaaagaagctgaggtgacaacacaatctgaattaacgattggtgatttaaccattcatcctgatgcatacatggtctcaaaacggggtgaaaaaattgaattaacccaccgtgaatttgagttactttattacttagcaaaacatatcggacaagtgatgactcgtgaacatttgttacaaaccgtttggggttatgattattttggtgatgtgcggacagtggacgtaaccgtgcgtcgtttaagagaaaaaattgaagatagtccaagtcatccaacgtatttggttactcgtcgtggggttggttattatctaagaaatcctgaacaggag

SEQ ID NO: 3859 - DNA, 483 bp, Enterococcus faecalis
gcagcaatcgctaaaaaagaaaccctagttcaagcagccgctgagaaatttgaatcagcagcatcagttgtaatcgtggactaccgtggtttaacagttgaagaagtcactaacttacgtaaacaattacgtgatgcaggcgtagaaatgaaagtcatcaaaaactcaatcctttctcgtgcagctaaaaaagttggtttagacggcttagacgaagtctttacaggcccaactgctgtcgcattcagcaacgacgatgtagtagcaccagctaaaattatcgacgaatttgctaaagatgcaaaagcattagaaatcaaaggtggcgtcatcgaaggaaaagtttcttcagtggaacaaattactgcgttggcaaaactaccaaaccgcgaaggtttactatctatgctattatctgtattacaagcgccagtccgcaacgtggcttacgctgtcaaagcagtggcagagaaaaacgaagaa

SEQ ID NO: 3860 - DNA, 2421 bp, Enterococcus faecalis
atgttagtttcttataaatggttaaatgaatatgttaatctttcaaacgttactccgcaagaattagcggacaaaatgtctgtgacaggtatcgaagttgagggcgttgctgtacctgaagaaggcttaaagaaaattgttgtcggtgaagtaaaagaatgtgttcctcatccaaactctgaccacttatcaatttgccaagtagacatcggtgaagaagaattgtcacaaattgtttgtggagcaccaaatgtaaaagccggaattaaagtcatcgtagcattacctggttcaagaattgcaggaaatcaaaaaattaaaaaaggtaaaatgcgtggcgaagtctctaacggaatgatttgttcgttagaagagctaggatattcagacaatgtcgtaccaaaagcctatgctgaagggatttattatttacctcaagaagcagtgaatgggacacctgttttcccttatttagacatggatgatgcgattattgaattatcaattacaccaaaccgtgcagatgcactaagtatgagaggggtagcctatgaagttggcgcaatttatcgtcaaacgcctcagtttaatgatcccgaactcaaagaagatgcttcagataacgtgggaaattacgtaacagtgactgttgaagattcacaagatgcgccagcgtatcaaattcgtgtcattaaagatgtgacgattgcagaaagtcctcagtggttgcaaaatcgattgatgaatgaaggaatccgtccgattaacaatgtggtggacgtgacaaattatattttattattatttggtcaaccgttgcatgcatttgactaccaaaaattagatagcaaagaaatcttggttcgtcgagcaacagcagcagaagaactaattacattagatggtgaaacacgtcaattaacagaagaaaatatcgtcattacgaatggaaaaacgcctgtcggtttagctggcgtaatgggtggggctaattctgaaatcagtcaagaaacaacaactgtggctttagaagcggcattgttcaatccattgtctattcgcaaaacgtctaaacaattcaatttacggagtgaatcttcaagtagatttgaaaaaggcatcaaccaagcgacagttgggttagcttgtgatgtggcagccgcgatgattgcagagttagccgacggaacagtggtttcaggcactgcagttggttctgaagtggccgttaaagaagcgcaggtagctgtgactttagagcgaatcaaccaatatttaggcactgcattagatgaagcaacggtgaatgaaatttttgaagcactcggttttgcttatgaagtaaatcaaggcgcatatgaaattacgattccaccaagacgttgggatattgcgattgaagcagatattattgaagaagtggcgcgcatttatggatatgatcatttaccttcaacattgccaagtggagaaacagttgctggaagtctaaccaaagcacaacatgttacgcgccaattaaagagcttactggaaggtcatggtacgagtgaagccatcagctatgcgttgacaacagaagaaaaatcccgtcaatttatgatgaaagaaagtcaaacaacacggttgcaatggccaatgagtgaagagcgttctgtgttacgtatgaacttaatttctggtttattagatgatgtcgcatacaatgtggcacgtaaaaataataatatcgccttctacgaagtaggacgcgttttctaccaaacagaagatccaacaaaaaatttacctacagaagaaaatcacttagcacttgctttaactggtaatacaatggttaaagattggcaaacaaaagcaacagccgttgatttttatacagtaaaaggcttagtggaaagtattgtagctgttttaggattaacagaaaaaatcagttatcaagcgacaacggcgattccagaaatgcatccaggccggacagcatggatttatttaaaagatgaagtggttggttttgtcggacaagttcacccaacgacagcaaaagcgtacgatattcctgaaacatatgttgctgaattaaacttgcaacaattagtagccacagaagcaggcggggttacttatgaagcagtttctaaattcccagcagtttctcgagatattgctttattagtcgatgaaacagttaccaatcaagaactagttaaaactatttcagataacgcaggtaaatatttgaaagagattcatttatttgatgtatatcaaggtgaaaaactaggcgctggcaaaaaatcaatggcgtatagtttaactttcgttaatgcagaagcgacattagtggatgaagaaattaaccgttcaatggaaaaagttgaaaaagcgctaattgaaaaacatcaagtagaagtaaga

SEQ ID NO: 3861 - DNA, 632 bp, Enterococcus faecalis
atgaccaagggattctaaggaaaaaaagtgggaaatgccccaaacaaatctcacgtctgggtgaattaattcccagttccagaaaatgaagctacgccaaacgtattttacaagtaaaaactgttgaaactgacggatacgaagctatccaagttggttaccaagacaaacgtgaagttttatcaaacaaacctgcgaaaggtcatgttgcaaaagcaaacacggctcctaagcgcttcattaaagaattcaagaatgttgagctaggagaatatgaagtaggtaaagaaatcaaagtagatgttttccaagcaggagacgttgttgatgttacaggtactacgaaaggtaaaggattccaaggggcaatcaaacgtcacggccaaagccgcggacctatgtctcatggttctcgttatcaccgtcgtcctgggtcaatgggtccagtagcgcctaaccgtgtatttaaaaataaacgactagccggccgtatgggtggcgaccgcgtaacaattcaaaaccttgaagttgttaaagtggacgtagaaagaaatgttatcttaatcaaaggaaacattcctggagcgaaaaaatctttaatcacaatcaaatcagctgtgaaagctaaataa

SEQ ID NO: 3862 - DNA, 621 bp, Enterococcus faecalis
atgccgaatgtagcattattcaaacaagatggaactcaaaacggtgaaatcactttaaatgaagaaatcttcggaatcgaacctaatgaaagtgttgtctatgatgcaatcatcatgcaacgtgcttcattaagacaaggaacacacgcagttaaaaaccgtagcgctgttcgtggcggtggccgcaaaccatggcgtcaaaaaggaactggtcgtgctcgtcaaggttcaatccgttcaccacaatggcgtggaggtggcgtagtctttggaccaacaccgcgttcatacagctacaaacttcctaaaaaagttcgtcgcttagcaatgaaatctgtattatcagacaaagttgctgaaaataacttggtagcagtagaaggtttaagcttcgatgcaccaaaaacaaaagaattcaaacaagttcttgctaacttgtctatcgatactaaagtattagttgttttagaaaatggtaacgactttgcagctttatcagctcgtaacttaccaaacgtttctgtagtaacttctgataacgttagtgtgttagatgttgtgtcagctaacaaagtcttggcaacacaaacagctcttactcaaattgaggaggtgcttgca

SEQ ID NO: 3863 - DNA, 267 bp, Enterococcus faecalis
gacgtaatcaaacgcccagtgatcactgaaaaatccatgttagctatggacgaaaagaaatatactttcgaagtggacactcgcgcaaacaaaactttagtaaaacaagctgttgaatcagcattcgatgttaaagtagcaaacgtaaacatcttaaacgtgcgtccaaaattcaaacgcatgggtaaatatgcaggttatacaaaaaaacgtcgcaaagcgatcgttacattaactgaagattcaaaagaaattcaattattcgaa

SEQ ID NO: 3864 - DNA, 822 bp, Enterococcus faecalis
gtggcgattaaaaagtacaaacctaccacaaatggccgtcgtaacatgacaagttctgatttcgctgaaatcacaacttcaacaccagaaaaatcattgttacagccattaaaaaacaatgccggtcgtaacaacaacggtcgcattacggttcgtcaccaaggtggcggtcacaaacgtcaataccgtgtgattgacttcaaacgtaataaagataacgtcgcagcggttgttaaaacgatcgagtacgatccaaaccgttctgctaacatcgcgttagttcattacgaagacggggttaaggcatacatcttagcaccaaaaggattagaagtaggcatgcgcctagtatctggtccagaagcagatattaaagtaggtaacgcattaccattggaaaacattccagttggtacagttatccacaacattgaaatgaaacctggtaaaggtggacaattaatccgttcagctggaacaagcgcgcaagtacttggtaaagaaggcaaatacgtattaatccgcttaaactctggcgaagttcgtatgatcttagcaacttgccgtgcaacaatcggttcagttggtaacgaacaacacgaattaatcaacattggtaaagctggccgctctcgttggatgcgtaaacgcccaactgttcgtggtagcgtaatgaaccctaacgatcacccacacggtggtggtgaaggtaaaacaccaattggacgtaaagcgccagtatctccatggggtcaaccagcaattggatacaaaacacgtaataaaaaagctaaatcagacaaacttatcgttcgtcgtcgt

SEQ ID NO: 3865 - DNA, 276 bp, Enterococcus faecalis
atgggtcgtagtttaaaaaaaggacctttcgtcgatgatcatttgatgaaaaaggtcgaagcacaacaaggtgccgaaaagaaaaaagtaattaaaacttggtctcgccgctctacaatttttccatcattcgtaggtttcacaatcgctgtatatgatggacggaaacatgtccctgtttacattcaagaagacatggtaggacataaattaggtgaatttgcaccaactagaacttatcgtggccacgttgctgacgataaaaaaactaaacgc

SEQ ID NO: 3866 - DNA, 336 bp, Enterococcus faecalis
caaattacatcagctaaagcaactgcaaaaacagttcgcacttcacctcgtaaagcacgtttagtaatcgatcttatcagagggaaaagcgttgcggatgcaatttcaatcttgaaattcacaccgaacaagtctgctggaatcattgaaaaagttttaatgtcagcagttgctaacgcagaaaacaactttgacttagacgttgaaagcttagtcgtatctgaagcatttgttaacgaaggaccaacaatgaaacgtttccgtcctcgtgcaaaaggttcagcttcaccaatcaacaaacgtactagtcacatcacagtagttgtaacagagaaa

SEQ ID NO: 3867 - DNA, 627 bp, Enterococcus faecalis
atgcgtgtaggcatcatccgcgactgggatgcgaaatggtatgctgaaaaagagtatgctgaattcttacacgaagatttaagaatccgtaaatttatcgcaacaaaacttgctgatgctgctgtatctacaattgaaatcgaacgcgctgcaaaccgtgttaacatttcaattcacacagctaaaccaggtatggttatcggtaaaggcggatctgaagtcgaaaacctaagaaaagaattaaacaaattaactggcaaacgagttcacatcaacatcgttgaaatcaaaaaaccagatttagatgcaaaattagtaggcgaaggaattgcacgtcaattagaaaaccgtgttgctttccgtcgtgctcaaaaacaagccatccaacgcgcaatgcgtgctggcgctaaaggaatcaaaactcaagtatcaggtcgtctaaacggtgcggatatcgctcgttcagaaggatactctgaaggaactgtaccacttcacacattacgtgcggacattgattacgcatgggaagaagcggacactacttacggaaaactaggagttaaagtgtggatctatcgtggagaaattcttccaacgaaaaaaaacactgagaaaggagggaaa

SEQ ID NO: 3868 - DNA, 1212 bp, Enterococcus faecalis
atcaaaatgaataagaaacatgttgttattttaggtgctggttacgcaggcttaaaaacattacgcgaattacaaaaaggcgccaaagacgtcgaaattactttagtggatcgtaacaactatcactacgaagcaacggatttgcatgaagttgctgctggaacacaaccagctgaaaaaatcacatacaatattatggatgttgtcgatgaaaaaatgaccacctttatccaaggaacagttaaaacaattgatgctgcaacacaaacagttgctttagaagatggccaaacaatcaattatgattacttagttgtttctcttgggtttgaatcagaatcatttggtatccctggtgtgcaagaacatgctctacaaatggtagatgtgaaaacggctttaaacgtgtatgaacatatccaagaacaaatgcgtcaatacaaagcaactcaaaacgaagaattcttaaaaattgttgtctgcggagcaggctttacagggattgaattattaggttctcttgttgaaaacaaaccaaaatttgctgaaatcgcaggtgtctcagcagatcaaatccaaatttattgtgtcgaagcagttactcgcctattgccgatgtttaacgaaaaacttgcgaactatggtgtgcaattattaaaagattcagctattcatttattattaggtaaaccgattaaagaaatcaaaccaggcacagttgtttatcaagataacgaagcaggcgacttggcagaactttctgctaaaacaattatttggacaacgggtgttagtggaagccacgttgtaggcgattctggatttgaagctcgtcgtggtcgtgtcatggttcaaccagatttaacagatgcgaaccatagcaacgtctatattattggtgactgctcagcagttatggatacagaaactaatcgaccttacccaacgacagcacaaatcgccttgaaaatgggggcgcatgctgctaaaaatattcaagcacaattgaaaggggaagcaactaaacctttcagctttaaatcacaaggttctgtttgttctgtcggaaatacacgtgctttaggaattgttggtaaaacagacattaaagggtacccagcttcattcatgaaaaaaattatcatgaacaaagcgctctttgaaacaggtggtaccaaagaaatgatggctaaaggtcgtttcgacttatac

SEQ ID NO: 3869 - DNA, 1026 bp, Enterococcus faecalis
caaaaagtcgctgttttaggtccaggttcctgggggacagctttagctcaagtattagccgaaaatggacacgaggtctgtatttggggaaataaaccagagcaaatcgatgaaataaatacaaaacacaccaacaaacattatttaccagaattaatcttacctacttcaattcaggcaaccactgatttagccactgctttagtagatgtggatgcggtactgtttgtggtaccaactaaagccattcgttcagtagcacaagaagtggcccaacatttaaaaacaaaaccaattattattcatgcaagtaaagggctcgaacaaggtacacataagcggatttcagaagtgatagcggaagagattccagcagaaaaacggcaagggattgtggttttatctggtccaagccatgcagaagaagtcgctgttcatgacattacaaccattacagcagcaagcgaaaatttagcagacgctgtgtatgtgcaagagttgtttatgaatgattactttagaatttatacgaatgatgatgtgattggtgtagaaacaggggcggccttaaaaaatattattgctttgggcgccggagcgattcatggcttaggctttggtgataatgccaaagcggcaattatgactcgtggtttagcagaaattagtcgtttaggggttgcgatgggagcaaacccattaacatttattggtttaagtggtgttggggatttaattgttacttgtacaagtgtccattctcgaaattggcgtgcgggtaatttattaggaaaaggccataagttagatgaagtcttagaaaacatgggcatgattgtggaaggtgtttcaacaactaaagcagcctatgaattggcacaacaactagaagtcgaaatgccaatcacagaaacaatctacaatgtcttgtacaatgacgaagatgtacaacaagcagcaaaagaaatcatgttgcgcgatggcaaaaccgaaaacgaatttacacttgatttttaggaggaaaaa

SEQ ID NO: 3870 - DNA, 942 bp, Enterococcus faecalis
cgaattagttgtacaagccgttatgttccagagaattgtgtcacgaatcaccaactgagtgaaatgatggatacctctgatgaatggatacattcgcgaacaggcattagtgaacgtcgcatcgttacgcaagaaaatacgtctgatttatgtcatcaagtcgcaaaacagttattggaaaaatctggaaagcaagcaagtgagattgactttattttagtcgcaacagtgacaccagatttcaatatgccttctgttgcttgccaagtgcaaggcgcaattggcgctactgaggcttttgcttttgacatcagtgcagcgtgttctggttttgtctatgccttaagcatggcagaaaaactagtcttaagtggtcgttatcaaacaggtctagtaattggtggcgaaacattttccaaaatgttggattggaccgatcgctccacagcggtgcttttcggtgatggggctgccggcgtcttgattgaagcggctgagacaccgcattttctaaatgaaaaattacaagcagatggacaacggtgggcggctttaacgtcaggctacacgatcaacgaaagtcctttttatcaggggcataagcaggcgagtaagacgctacagatggaaggacgtagtatttttgattttgcgattaaagatgtttcacaaaatattttatcactcgtgacggacgaaaccgtggattatcttctattacatcaagcaaatgtgcgcattatcgataaaattgcacgtaagacgaagatttcccgcgagaagtttttaacgaatatggataaatatggcaatacctcagctgctagtattcctattttgttggatgaagcagttgaaaatgggaccttaattttaggttcccaacaacgcgtggtgctaacaggatttggcggcggcttaacatggggctcactgctccta

SEQ ID NO: 3871 - DNA, 213 bp, Enterococcus faecalis
gaaaaaattcaagcaattatcgtagaagaattaggaaaagatgctgaagaggtacaattaactacaaacattcaagaagaattagatgcggatagcttagatttattccaaatcattaacgaaatcgaagatgaatttgatgtgaaaatcgaaacagaagatggcatccaaaccgttcaagatttagtaacatatgtagaaaaacaacaagca

SEQ ID NO: 3872 - DNA, 612 bp, Enterococcus faecalis
gaacgagagtgggagctgtttttagcgccatatgaacaggcggtcagcgaattaaaagtaaaactacgaggtattcgtaaacaatttcgggagcaagataaacacataccaattgaattcgttacaggacgtgtgaaaccagtagatagtattttgacaaagacggcaattcggcatattcctttaaatcggattgaagaagaaatgcaagacattgctggtttgcggattatgtgccaatttgtggaagacatttaccaggtagtcgcacttttaagaaatcgtaaagacttaaaaattgtggaagaacgtgactacattgaaaataaaaaagaaagtggctatcgttcgtaccatgtggtggtggaatatcctgtgcaattagtcaccggggaaaagattattttggccgaaatccaaattcggacactttccatgaatttttgggcaacgattgaacattctttgaattataaatatcaaggtgtctttcctgaagaaatgaaagaacgccttcagcgagcggcagaggcagcctatttattagatgaagagatgtcatctatccgtgaagaaattcaagaagcacaacattacttctctcatggccgt

SEQ ID NO: 3873 - DNA, 1545 bp, Enterococcus faecalis
tatccagagaacgaacttttaggaattgacgttgtcattccggattttacgtatttagaagaaaatagtgaacgaattgcaggggtctttttaacacatggccatgcagatgcaattggggccttaccgtatttgctttcaaaaattcaagtgcctgtttttgggacagaattaacgattgaactagcaaaactaagtgtcaacagtcatgcggaaacgaagaaatttaaagatttccatgtgattgacccgcatacagaaattgattttggtcaagcaacggtgagcttctttaaaacaacgcacaccattccagattcgattggcgttagcatcaaaacaaaagaaggcaacattgtttatactggtgattttaaatttgatcaaagtgcgattgagatgtatcaaaccgattatggccgcttggctgaaattgggaaagaaggcgtcttggcgctacttagtgattcatcaaatgctgaaaacccagcccaagttgcatcggaagcccaaatcgctgatgaagtgttcgacacgattcgctattgggaaggacgaatcatcgtggcatgtgtggcaagtaatttgcaacgggtccaacaagtattgaatgcagcggatcgttctggtcgtaaagtcgttttgacaggccaagattttgaacggattattcggacggcgatgaaattggaaaaattacaattgccaagtgaagatctattagtgaaaccaaaagaaatgaaaaaatatgcacccgaacagttattaattttagaaacaggccggatgggagaaccgattaagtcacttcaaaaaatggctaataatacacatggtgtcgttcgaattgaagaaggcgatttagtttatattacgacaacgccgacaacggccatggaaacaacggttgccaaaacagaggatattgtctatcgggccggtgctacggtgaagcaaatttccgacaatttacgtgtgtctggtcacgctaatccgaatgacttgcaattgatgctgaacttaatgaaaccaaaatatttcattcctgtccaaggtgaataccgccagttagctgcgcatgcggacttagcacacgaaattggcatgccttataaagatatctttattacaggtcgtggggacattctagagtatacaaaaggtagaatgtcggtagctggcagcacaacggccgaaaatattatgattgacgggattggtgtcggcgatattggtaatatcgttttacgggatcgtcgtattctttccgaagatggtatttttgtggctgttgtgacaattaatcgccgagaaaaacgaattgtttcaccagctaaaattacttctagaggttttgtttacgttaaaacaagtaaagacctaatgaaagaaagtagcaatattgttacagaaattgttgaaaagcatttagaaagtgacgatttcgaatggagcaaactgaaacaagaaatccgcgaaaacttaagccgttatttatttgaacaaaccaaacgtcgtcctgtgatcttaccagttatcatggaa

SEQ ID NO: 3874 - DNA, 1349 bp, Enterococcus faecalis
gaagagattgtgttgttccataccaatgatcttcattctcactttgaaaattggcccaaaatacggcgtctggttaaagccaaacgttcgctgtaccaaaaagagggcaaaacagtcgtaaccattgatttaggtgacttttcagatcggtgtcatcctttgaccgaagcaacagatggtcgagcaaatgtagctataatgaatacattagcgtatgacctggttacaattggaaataatgaaggaatcggcaattcaaagaaacaattagagcatttatatgatcaggcaacatttgaagtggtcttagctaatttagaagatccaaaaacccaaacgttaccagatttttgtcaagcatataaaattatgacaactaaagaaggcacgaagttagggtttattggcttaaccgcaccatttcctttaacgtataatcccaatggctggacaatcaaacaagtggaagcagtccttcctcaactgattacagaagttgcgcctcaatgtgatgttctcattttgcttagtcacttggggatagatactgattttatgattgcggcgaattatcctgaaattcaagtgattttaggttcccatacacatcatttatttaaagatggtgaaaaaattaatcatgtgcaactagcagctgctggcaaatatggacagtatattggtgaagtgcatctgtttgtggatgccgacacgaagcaagtcacaagttatgcaaaaacgattgaaacagcaagtttagaagagcaagcaacggatgccaaggaaattgcgggttacttaacggaaggtcatcgactattgcaagcgcacaaattgcacaaatccctgaaaccttgtcaacggacttacggcaaccgcatgcctttataactgttgccttgaaggcgttaaaagaagcggggcagaccgaagcggctgtgttgaacaacgggttatttttagcagatttaccagaaggaataatcaatgcagaccaattacatgaggccttgcctcatccaatgcatttaatcaaggttaccttgaaagggtcagacatgagccgtttgattcgtgaaatggaaaaaagtcatcaatttctgcggaaatttccgatttgcgggatgggcttccgcgggaaaatttttggcgaattatgttatgatgggattcgttttgagcgaaatagccagaccgttttttggcaagggaaacctattcagccagagcagaagtatacgctgacaacagtggatcactttcaatttgttccgtttttcccaacgattgagttagttggagaagtcgaatttttatttccagacgttttaagaactgtcgtggcgaac

SEQ ID NO: 3875 - DNA, 3327 bp, Enterococcus faecalis
atgtcatttccacaattacataccgttacttcctactcgcttttatctagtacggttaggattcgttcctatgtaaaacaagcgaaagcgttaggttatcaaacattagcgattaccgatatcaatgtcttgcatggggcggttgaattttatgaagcatgccaagaagcgggaattcaaccaattatcggtttaagattagaatataccccagcagaaaaagaagggcattccgagttgcttttatttgctaaaaatttaaaaggatatcagcaattaatgcaactatctagcagcaaaatgacgacagagggtcccttttacttagcggaacatcaatccttattaagtgatttatttgccgtgactttgtcagctaaaggagaagtcgcccaaacattttttgaagatgaacaacaagcggttcacgctttccaacaacttgcttcatattttgatccccagtcgttatttgttgaacattctttttcaatgaatcaacaacgcaatccagcgctcttttctttttaccaaagagaacaattacctggcgtggctttgcaagaggtacgtcatttaacaagggaagaaggctttgccgttactgttcttgagagcatcaaagaaaataatcaattgaatattacaagccaaacaccggaaatagaaggtctgaattacttgcgcgaagcagagacgacgatggaacaaatgcttcaaatagctggttcagaagtggtccagaatacgattcagctagctgaaaattgccgagttgacattcctttacatcaaaaattattaccgcattttcctgtgcctgataatcaaacggctggttcttatttacgctcattgtgtttagaaaaattaccagaaagagtgcctcatctaaatgaagtttaccaaaaacgattagaaaaagagttaaccatcattcacaatatgggctttgatgattactttttaatcgtttgggatgtgatggacttctgtcataacaatcaaattgttacaggcgctggccgaggttcagctgcaggctctttagtgtcctatgtgttatcaattacagatgtagatccaatcaaatatgatttgctttttgaacgttttttgaatccagaacgctacacgatgcccgatattgatttagatattcctgataatcggcgggaggaagttttagcttatgtcagtcaaaaatatggtcattatcatatggcgcaaattgccacgtttggtacgatggctgcgaaaatggttttacgggacgttgcacgtgttttcgggttgtcccagagtgaagcgaatcgttggtcggcagctgtccccaacaagctgaaaattacgttagaagaagcataccaagagtcaaaacggatgcaagaattggtcaatttttcaccaaataatcaattgctctataaaacagctgttcagctagaaggattgcctcgccatgtttctacgcacgcagcaggtgtggtaattagtgatgaaaatcttttgaatttggttccgttacaaccaggatcgaatgaaattttattgacccaatttactatgaatgatgttgaaaaaattggtcttctgaaaatggatttcttgggcttaagaaatttatccatcattgatgataccctcacagctgttaaacgcgtctataatcgaaccattcgtttaaatcagattccattagatgacgaaacaacgctggctttatttagaaaaggggaaacaagtggcgttttccagtttgaatctgctggaattcggaatgtattaagaaaattagggccaactagcattgaagatattgctgctgtcaatgccctgtatcgtcctggtccgatgcaaaatattgatgttttcatccgccggaaaaaaggcttggaacaaattagttatccagagcctagtctcgcccccattttggaaaatacgtacggaattattgtttaccaagagcagattatgcaagttgctgcgaaaatggcaggcttctctttagggcaagctgacattttacgtcgggccattagtaaaaagaaaaaagatgtgctagatgaagaacgaaatcattttgttaatggtgcgctacaacaaggctatcctcaagagacagctaaccaagtgtacgattatatagagcgctttgctaattatggctttaaccgctcgcatgcatttgcctattcctttattggttttcaaatggcttacttgaaggttcattatccgagtgctttttatgtcgcattgttgcattctgttcgtcataatccaacaaaaattaaagaatatattggcgaagctagaaaaaacaagcagacgattttgcagccgtcaattaaccaaagtcactacagcttttacctaaatcagcaacagcaaattttatttggttttagttctttaaaaggaatccgccgagacttcattcaaaatattttaaatgaacgccgagaaaatggaccgtacaaaacgttcgatgagtttcttttgcgaattgaccgtaagtggttgaaagttgaaaatatcgaaccattgattgccatcggtgcatttgacgaaattgcgcctaatcgccgtcaattagcggtaggtttagagagtaatatccaaagtattcttctcagcggtggtagtatggatttgttagaaacattgaagccaaaggaagaagaaattgccgattatccgctagaagagcgactagaacaagaagaacaatatttaggggtctatttatcaggacatccgacagaagagttcaaaaaaacacgcttagccaagcaaacgcaacttgttcatgaacttgttgaaaatcagcccacgaaattattgatttatgtcaaaaacattcggacgattcggaccaaaaagggagaacaaatggcctttgttgatggggatgatacaacaggaagtatttcactaacgttgttcccaaccgtttttcgccagttaagacagagtgtcgagaaagggcaagtttattatgtggaaggaaaagtggaacgcagtacgtacaatcaagaattgcaaatattggttcaacgaatagaaaaagcgcaacaagtagaaacatcaattagtgacgaaacgtgttttatcagaattacaaaagatgtcgaacaaacggacgtttttcagaaaatgaaagaggtactcagtcgtcatgctggacacattccagtgattgtctattttgaaaaaacaggaaagaaaatagtattaaatgaagaaaattgggtcgctcatacaagcgctagtcagcaacaattagcttacgttttaggtgagcaaaacgtcattttcaaa

SEQ ID NO: 3876 - DNA, 474 bp, Enterococcus faecalis
gaagttatgcaaggaaaagaccgtattttattagttcgtcgcttggatgaagcagcgacaaagaaagcaatgaaacccttatttcaaattgaacatgaatgggaattctcacgtgaatcgagcggtacgcaaacaaaagatggcgttgcgaatgctgtttctggtttagaagttacgttatcgttaagcggtttagcctctcgagatgatgaaaatttatacatgaaagacgcagttgaagatggcatcttaatggaattttgggatgttgatttaaaaggtgaaaaaaatgcggaaggtaaatatccagcaatttatgcccaaggttatgtaaattcatggagtttaccagccaatgtagaagaattagtagaaatcgaaacagaagcctctattaatggcaaaccacaagatggttttgcaacagtagaagcagatattattgcagaagcacaatatgcgttccaagatacc

SEQ ID NO: 3877 - DNA, 1368 bp, Enterococcus faecalis
tctattttcagaaaaaaagaaatcactgtgcctgtcaatgacagtggtgggatgaaaaaaaatcttaagacgatggacttaatttttctaggaattggggctgtagtaggaacagggatttttgttgtgacaggtgtcgcagcggaacgctatgcaggtccagggctcgtcttatcatttctggtagcagcagccgcgattattttatctggtttatgctatgcagaatttgcatcacgtattccggtcattggtgggccgtatgcctacatgtatgtggtctttggagaaattgtggcttggatgactggttggatgattatttgtgagtttttcttggcggtttcatccgttgcttcaggttggtcaggctatgtccatggctttttggatagcttaggtttttctttgccgcaagcgttaagtggcgcttataatccaacaaatggtacatatattgatttgattgccatgttggtcgttgtagccgtaactttttgggtatctttagaagcgaaaacagcgttacgtttaaataacttaatggttttcgtgaagtttgggattattttattatttgttctcgtgggaatcttttatgtgaaaccaacgaactggcaaccatttattccttatggtttttcaggcgttttcagtggtgctgctttagttttctttgcctttctagggtttgatgcggtcagcatggccgcggaggaagtgaagaatccgaaaaaagatattccaaaagggattattggttccattattatttcaacattgttatatattgttgttacgttagttttaactgggattgttccatttacggatttaggggtcaaggatccggtggcttttgcgatgcgcttcattaatcatggcgcaatcgcgacaatcatttcagttggtgctattttaaccttattaacagtgacgattgcgatgatgtacagtttagcccgtgtgatttatgcgattagtaaagatggattattgccgcagtttatgagcaaaatcgatgagaagcggcacacacctaagaatgcaacctatgtagctggatttttagcaatggtttttgctgggattgttccaatggagatgttggctgaacttacaaatatcgtgacactcttttatctgatgtttctcgctttaggaattatcaaattacggacaatgaaaggagaaccgcaagcaggtgaatttaaagtaccacttgtgccggttctaccattaatttcaatcgtggtttgcgcggctttgatgttccaattgtctttagctacttggcaagtatttggcatagccgtagtgattggtttggctatttatttcttttatggacgacaccatagtatcgtt

SEQ ID NO: 3878 - DNA, 1998 bp, Enterococcus faecalis
cagaaagaaacattttatattaccaccccaatttattacccaagtgggaagttacatattgggaattcatatacaacaatcgcctgcgatgcaatggcccgttacaagcgtttaatgggttttgatgtattttatttaacaggtgtggatgaacatggccaaaaaattgaaaaaaaagctgctgagttgaatgtgacaccaaaagagtacgttgataaaatggcagcagatgttcaaaaattatggaaaacattagatatcagctatgataaatttattcggacaacggatgattatcacatggcagccgtgcaacaaatttttgaccgtttagtagaacaaggagatatctaccttggagaatatgaaggttggtattcagtttctgatgaagaatttttcactgaaacacaattagctgaagtatatcgtgacgatgaaggcaatgtcattggtgggaaagcaccaagtggtcacgaagtcgaattagttaaagaagaatcctatttcttccgcatgagtaaatatgcggatcgcttggtacaatattacgaagaacatccagaatttattcaaccagaatctcgtaaaaatgagatgctaaataacttcatcaaaccaggattggaagatttagccgtttcaagaacgactttctcttggggaattccattaaaaaatgatccaaaacatgtggtttacgtatggattgatgcgttatcaaactatattacagcactaggttatggttcagaagatgattcattattccaaaaatattggcctgcgaacgtgcaaatggttgggaaagaaatcgtgcgtttccatacgatttattggccaattatgttaatggccttggatttaccattaccgaaaaaagtctttggacatggttggttattgatgaaagacggaaaaatgtctaaatctaaaggaaatgttgtttaccctgaaatgttagtagaacgctacggtctagatgcgttacgttactatttattacgagcaattccatttggtagtgatggcgtctttacaccagaagatttcgtttctcgcttaaattatgatttagctaatgacttaggaaacttgttgaatcgaacaattgcgatgattaataaatattgtgatggcaaagtaccagcctatgcttcaaaagttaccccatttgatagtgaactatcgacaactgcggcgaatgttattggaaaatatcatgaagcaatggaaaaaatggaatttaacacggccattgcagaaatctggacgctagtttctcgtgccaataaatatattgatgaaacagcgccttgggtattagctaaagaagaagagaaacgcaacgaattagaaagtgtcatgatccatttagcggaaagcttacgaattgtggcaatcttattgcaaccagtcatgacagaaacaccagggaaaattttcgaacaattaggcttagatccagaaacaatgaacatggaaaatattcattttggtgagttcccaacagacgtaacagtaacaagtaaaggaacacctattttcccacgtttagaaattgaaacagaagtaacgtatattcaaaagaaaatgtcccaaagcgaaagtgctacagaagaggatattaaatggaatccagaagaaacaacgttggtttcaacgaaagaaaaacaaattaagtacgatgatttcgataaagtggaattaaaagttgccgaagttattgactgtaaaaaagtcaaaggagcagataaattattgcaattccgtttagatgctggagatgaaaaccatcgtcaaattctttcaggtattgctgaattttatccagatccagctgcgctaattggcaaaaaagtagtcattgtggctaacttaaaaccaagaaaaatgcgtggtcaaattagccaaggaatgattctttcagctgaatcaccagaagggaaacttcaaattgttgaagcaccaaaagaaatgccaaatggtgcaggaatt

SEQ ID NO: 3879 - DNA, 255 bp, Enterococcus faecalis
gaaagaaatcaacgtaaagtttaccaaggtcgcgtggtatcagacaaaatggataaaacaatcacagttgtcgttgaaacaaagaaaaaccaccctatctatggcaaacgtatgaaatattctaaaaaatataaagcgcatgatgaaaacaacacagcgaaagttggagacatcgtaaaaatcatggaaactcgtccattatcagctacaaaacgtttccgtttactagaggtagtcgaagaagcagttattatc

SEQ ID NO: 3880 - DNA, 366 bp, Enterococcus faecalis
gtgatccaacaagaaagtcgtttaagagtcgctgacaattctggcgcacgtgaaattttaacgatcaaagtcctaggcggatctggtcgtaaaactgctaacatcggtgacgttattgttgctactgtcaaacaagcaacgccaggtggggttgttaaaaaaggtgaagtagttaaagccgttatcgttcgtacaaaatctggcgctcgtcgtgctgacggttcttacatcaaatttgatgaaaatgctgcggtaattatccgtgacgataaaagcccacgcggaacacgtatcttcggaccagttgcacgtgaattacgtgaaaacaacttcatgaagatcgtttctctagcaccagaagtatta

SEQ ID NO: 3881 - DNA, 309 bp, Enterococcus faecalis
atgtttgttaaaaaaggcgataaagtaaaagttatcactggtaaagataaaaacaaagaaggcgttgtcttagcagcgtttcctaaacaagataaagttatcgttgaaggtgtcaacgtcgttaaaaaacaccaaaaaccaaaccaagcagccccacaaggtggaatccttgaagtggaagcgccaattcatgtttctaatgtaatggtgattgatccttcaaacggagaagctactaaagttgcgtttaaagaagtcgacggcaaaaaagtccgcgtttctaaaaaaacaggtgaagttttagataaa

SEQ ID NO: 3882 - DNA, 537 bp, Enterococcus faecalis
atgaaccgcctgaaagaaaaatatattaaagaagtaacaccatcattggtggaaaaatttaattacagctcagttatgcaaacacctaaagttgataaaatcgttatcaacatgggtgtgggtgatgcagtatcaaatgctaaaaacttagacaaagctgttgaagaattagcattaatcactggtcaaaaaccacttatcacaaaagctaaaaaatctatcgctggattccgtttacgtgaaggaatgccaatcggtgcgaaagtaacgctacgcggcgaaagaatgtacgaatttttagataaattagtaacagtttctttacctcgtgtacgtgacttccacggtgtcagcaaaaaagctttcgatggtcgtggtaactatactttaggtattaaagaacaattaatcttcccagaagttgattatgatttagtagataaagtacgcggtatggacatcgtaattgttacaacagcgaacactgacgaagagtctcgcgaattgttggcacaattaggtatgccattccaaaaa

SEQ ID NO: 3883 - DNA, 183 bp, Enterococcus faecalis
gtggctaaaaaatcaatgattgctaaaaacaaacgtcctgctaaacattcaacacaagcttatactcgttgtgaacgttgtggacgtccacattcagtttatcgtaaatttcatctttgccgtatttgcttccgcgaacttgcctataaaggtcaaattcccggcgtgaagaaagctagctgg

SEQ ID NO: 3884 - DNA, 396 bp, Enterococcus faecalis
atggtcatgacagatccaattgcagattttctaactcgcattcgtaatgcgaacatggttaaacatgaaactttagaagtacctgcttcaaaaatcaaacgtgatatcgcagaaatcctgaaacgtgaaggatttatccgcgacgtagaatacatcgaagatgacaaacaaggcgtaatccgtgttttcctaaaatatggtaaaaacgaagagcgtgttatcacaaacttaaaacgtatttctaaaccaggtttacgtgcatacgtaaaagctgacgaagtaccaaaagtattaaacggtctaggaattgcaatcatctctacatcagagggtgtaattactgacaaagaagctagagcgaaaaatatcggcggcgaagtaatcgcctacgtatgg

SEQ ID NO: 3885 - DNA, 528 bp, Enterococcus faecalis
cgtattggtaataaagttgttgttcttcctgctggtgttgaaatcaagcaagacggaaacaacattacagttaaaggacctaaaggtgaattaacacgcgaattttcttctgatatcaaaatgaacatcgaaggaaacgaagtgacattcactcgtccaaacgattcaaaagaaatgaaaacaatccacggaacaactcgtgcaaacttcaacaacatggttgttggtgtttctgaaggtttccaaaaagcacttgaacttatcggggtcggataccgtgcccaagtacaaggcaacaaattaactttaaacgttggttattctcatcctgtcgaaatgacagcaccagaaggcgtaacatttgaagtacctgcgaacacacaagttatcgttaaaggcatcaacaaagaagttgttggtgaattagctgctaacatccgtggcgttcgtcctccagaaccttataaaggcaaagggattcgctatgttggtgaatttgtacgccgtaaagaaggtaaaactggtaaa

SEQ ID NO: 3886 - DNA, 354 bp, Enterococcus faecalis
gtgattacaaaaccagataaaaacaaaacacgtcaaaagagacatcgtcgtgtacgtaacaaaatctctggtactgctgagtgcccacgcttgaacattttccgttctaacaaaaacatctacgcgcaagtcattgatgacgtagcgggtgtgacgctagcaagtgcctctgccttggataaagaaatttcaggtggaacaaaaacagaaacagctgcagctgttggtaaactagttgctgaacgtgccgctgaaaaaggcatcaaaaaagtagtcttcgaccgtggtggatacctttaccatggccgcgtgcaagctttagctgaagctgctcgtgaaaatggactagaattt

SEQ ID NO: 3887 - DNA, 498 bp, Enterococcus faecalis
atggtttatattgatccaaaacatttggaattagaagaccgcgttgtagcgatcaaccgtgtaacaaaagttgttaaaggtggacgtcgtttacgtttcgcagctttagttgttgtcggtgacaaaaacggacacgttggtttcggtactggtaaagcacaagaagtacctgaagctatccgtaaagcaatcgaagacgcgaagaaaaacttagttgaagtgcctatggttggttctactatcccgcacgaagtaattggcgtattcggtggcggccgtatccttatgaaacctgcagtagaaggttctggggtagctgctggtggaccagttcgtgccgtattggaattagctggtgtagcagatattacatctaaatcactaggttcaaacacacctattaacgttgttcgcgcaactgttgaaggtctaaaacaattaaaacgtgccgaagaagtggcagcacttcgcggtaaatctgtagaagaaattatcggt

SEQ ID NO: 3888 - DNA, 264 bp, Enterococcus faecalis
atggaaaagaaagaatttcacattgtagcagaaacaggaattcacgcacgtccagctactttattagtacaaactgcaagcaaatttaactcagatattaacttagaatacaaaggtaaatctgttaacttaaaatcaatcatgggcgttatgtctttaggcgttggtcaaggttctgacgtaacaatcactgttgatggtgctgacgaagctgaaggaatggcagcaatcgttgaaacattacaaaaagaaggattggctgaa

SEQ ID NO: 3889 - DNA, 1719 bp, Enterococcus faecalis
atgtctgagatgctaaaagggattgccgcaagtgatggcgttgctgttgctaaagcttacctgctagttcaacctgacttgtctttcaacaaaacttccgtagaagatactgatgcagaagcaactcgcttagacgatgctttagcaaaatctactgaagagttgcaagcaattcgcgacaaagcagctcaaagccttggtgaagcagaagcgcaagttttcgatgctcatttaatggttttatctgacccagaaatggttggtcaaatcaaacaaaatatccaagacaacaaagtcaatgcagaagctgccttgaaagaagttacggatatgtatattggtatgtttgaagcaatggacgacaatgcttacatgcaagagcgtgcagcagatattcgtgacgttgccaaacgtatcttagcacatttattaggtgtgactcttccaaatccttcaatgattaacgaagaagtaatcgtggttgcccatgacttaacacctagtgatactgcacaattagaccgtacgtatgttaaagcctttgttacagacatcggcggacgtacttctcactcagcaatcatggctcgttcgttagaaatccctgcaatcgttggtacaaaagaaattactgacaaagtaaaagcaggcgatattttagcagtgaacggaatcattggggatgttattattgacccaacagatgctgaaaaatctgaatttgaagcagaagcaaaagcttatgcagatcaaaaagcagaatgggataaactaaaaaatgcagaaacagtgacagctgacggcaaacatgttgagttagctgcaaacattggtacaccaaaagatttagaaggcgtacacaaaaacggcggcgaagctgttggtttatatcgtacagaattcttatacatggattcatctgactttccaactgaagaggaccaataccaagcgtataaagcagttcttgaaggaatggaaggaaaaccagttgtggttcgtacaatggatattggtggggacaaagagcttccttacctaacattaccacacgaaatgaacccattcttaggttaccgtgcattacgtattagcttatcagaactaggtgacggcatgttccgtacacaaatgcgtgcattattacgtgcgtctgttcatggtaacttacgtatcatgttcccaatggttgctactttgaaagaatttagagcagcgaaagcaatctttgaagacgaaaaacaaaaattagtcaacgaaggtgttgaagtttcaaacgatatccaagtaggtattatgattgaaattccagcagctgccgtattagctgataaatttgccaaagaagtagacttctttagtgttggaaccaacgacttaatccaatacacaatggcggcagaccgtatgaacgaacgcgtttcttacttataccaaccatacaacccatcaatcttacgtttaattaaaaatgtaattgatgcagcacacgctgaaggtaaatgggctggtatgtgtggtgaaatggcgggcgatcaaacagctgttccattactattgggtatgggcttagatgagttctcaatgagtgctacatctatccttaaaacacgtagcttgatgaaacgtctagacacaactaaaatggctgaacttgctgaccgcgcattaaaagaatgcgacacgatggaagaagtcgttgcattagttgaagaatat

SEQ ID NO: 3890 - DNA, 1416 bp, Enterococcus faecalis
atggcttttgagagtttaacaaaccgcctacaacaggcaatgagtaaaatccgtcgtaagggaaaagtttccgaagccgacgtaaaagaaatgatgcgagaaatccgtttggctttattagaagccgacgttaatttacaagtggtcaaagatttcacaaaacgcgtcagagaacgggcagtaggagtcgaagtattagaaagcttatcaccagcccaacaaattgtaaaaattgttgatgaagaattaacgaaaacgttaggttcagaaacggttgaactgaataaatctccaaaaatcccgacagtgattatgatgacagggttacaaggggctggtaaaacaacttttactggtaaattagcaaaacacttaatgaaaactgaaaacgctcgtccgcttttaatcgctggtgacgtttatcgtccagcagcgattgatcagttgaaggttttaggtcaacaattagaagttcccgtttttgatatgggaacagatgctaatccagtggaaattgttcgtcaagggttagcattagcaaaagaaaagaaaaatgattatgtcttaattgatacggccggccgtttacacattgacgaagctttaatggacgaattgaaacaaattaaagagttggctaatcccaatgaaattctgttagttgttgatgcgatgacggggcaagatgctgtcaacgttgcagatagttttaatgaacagcttggaattactggggttgttattaccaaaatggacggcgatactcgtgggggggctgcgctgtcaattcgggcagtaacgggcgctccgattaaatttgtcggttctggtgaaaaattaaccgatttagaaattttccatcccgatcgtatgtcgagtcgtatcctaggtatgggggacatgttgacgctaattgaaaaagcgcaacaagattacgatgagaaaaaagcagaagaacttgctcaaaaaatgaaagaaaacagttttgactttaacgatttcattgagcaattggatcaagttatgggcatgggaccgattgaagacttattaaaaatgatccctggaatgagtaacatgcctggtattgaaaatgtcaaagtcgatccaaaagatgtggcacggaaacgggcgatggtcctatcaatgacccctgcagaacgtgaaaatcctgatctattaaatcctagtcgccgtcgcagaattgcagctggttcaggaaatagtgtggttgaagtcaatcgtatgattaaacaatttaaagaatccaaaaaaatgatgcaacaaatgtccaaaggggatatgaacattcctggtatggatcaaatgctaggtggcggcgttaaaggcaagttaggtaaaatggccatgaatcgtatgatgaagaaaaacaaaaagaagaaaaagaaaaaaaga

SEQ ID NO: 3891 - DNA, 2037 bp, Enterococcus faecalis
cgggtcgattcagtggagaaaaccttaggaactgggatttatgtagatgacattgacatagaaggaatgcttcatgcatctgctttgcggagtgcctatcctcgcgcaaaagttctatcaatcgatagtacccaagcattggcgcatcctgactgtgtggctgtgttcacagctaaagacgttccaggaaataataaaattggtcatttagaatttatttccgattgggatgtaatgattccagaaggtgaaataacacggtatgttggggatgcagtggcactcgttgtttcaaaaagaaaagaaaccttaccagagataaaaaatttagtggaagttgattacgaagaaatgataccgcttacttcttgtgaagctgctttagcagaaggtgcaccagctattcatgaaaagggcaatatcttgtctcatgaacacttggtacgtggcaacacagatgaagtattagcaaattctgcgtttgtagtgacagaacattattccgtaccaattaacgaacatgccttcatggaacccgagtgtgcgattgcacagcctgaaggtgagggcattttactctttagtgcgggtcaaagtatctatgatgaacaacgggaagtggctcggatgttaggactagacaaggaaaaaattcatgttcaatcaaaacttgttggtggtggttttggtggaaaagaagacatgagtgttcagcatcatgcatccttagccgcttggttattgaagaaaccagtaaaagtactgctaagccgtgaagaaagtttgatggttcatcccaaacgccatggcatggaaatggactttacgaccggctgtgatgaagaaggcaatttaactgcaatgaaagcagtgatttatgcggatactggggcctatgcttctttaggaggaccagtattgcaacgggcttgtacacatgcggcaggtccctacaagtatcaaacgattgatgtggaagggtttgctgtatatactaataatccgccagcaggtgcatttcgcggatttggtgtttgccaaacggcttttgcaattgaaagtaatttaaacttgttagcagaaaaagtcggactatcaccatgggaaatacgctttaaaaatgccgtcgccccaggagatactttaccgaatggacaattggtctcgaaaaatgcggcgttaaaagaagccttgttagcggttaaagacgtctatgaacaagcggaagttgctggaatttctagtttctttaaaaatagtggcgtgggtgtggggctacctgatacagggcgttgtattatttctgttgaagaaggaaaaatacatgtccgcacaagtgctgcttgtatcggtcaagggatggcaaccgttacgacgcaaattgcctgtgaaacattaaatttaccaccagaaatgattgttgcggaagcacctgatacgagaagaacgccgaattcaggaacaacaacggcttcgaggcagtcactcttcacaggagaagctactagaagagcggcaatgcaattacggtatgagcttgatatgggacgtgctttaagtgatttggaaggcgaagaattttatggggaatattcagcgaaaacggatccattaatcaatgataaaaaaagtccagttagtcatgctggttatggttatgctgctgaagtagctattctagatgacaaaggaaaagtagctaaatttgtggctgcgtatgatatggggcaagtggtgaatccacgagctgctgaaggtcaaattgaaggtgggattgcgatgggcatggggtatgctttaactgaaaaatttgccttagaagaaggctatgttaaagcaaaatatgcaacgctaggattagtgaacgccactcaagtaccaccaattgaaacaattttggttcatgctgacaatcttcacgaaggtttagcttatggaattaaaggcgtaggtgagttagcaacgatccctaccgcaccagctttagcaggcgcatattttgccttggatggtcagctccgaccaagtctgccttta

SEQ ID NO: 3892 - DNA, 774 bp, Enterococcus faecalis
atggcagtaatttctatgaaacaattcttagaagccggcgtacactttggtcaccaaactcgtcgctggaacccaaaaatgaagaaatatatcttcacagaaagaaacggtatctacatcattgacttacaaaaaacagtgaaattagtagatgcagcttacgattacatgaaaaacgttgcagaagaaggcggcgttgctttattcgtaggaactaaaaaacaagcacaagaagcaatcaaagatgaagcaatccgcgctggtcaatactatgtaaaccatcgttggttaggtggtacgttaactaactgggatacaatccaaaaacgtattgctcgcttgaaaaaaatcaatgcaatggaagaagacggcactttcgaagttttacctaagaaagaagttgctggcttaaacaaagaacgtgaacgtttagaaaaattcttaggtggtatcgctgatatgccaagaattccagatgtaatgtacatcgttgacccacgtaaagaacgcattgctgttcaagaagcacacaaattaaacattccaatcgttgcaatggttgatacaaactgtgatcctgatgagatcgatgttgtaatcccttcaaatgatgatgcaatccgcgctgtgaaattaatcactgctaaaatggctgacgctttcatcgaaggtaaccaaggggaagaccaagcaactgaagagttattcgttgaagaaacaccagaagcaacttcaatcgaagaaatcgttgatgttgttgaaggaaataacgaa

SEQ ID NO: 3893 - DNA, 867 bp, Enterococcus faecalis
gttacagctaaaatggtaaaagaattacgcgatatgactggcgttggaatgatggacgctaaaaaagcattagtaaaagtagaaggcgacatggaaaaagccgtagactttttacgtgaaaatggtatggctaaagcagcgaagaaaaatgaccgcattgcggctgaaggcttagcaaacgtagcaactgtgggtaacgttgcagcaatcgttgaagtaaactcagaaactgacttcgtttctaaaaacgaaatgttccaagatttagttaaagacattgcgactaaagttgctgaaaacaaaccagctacgatggaagaagcaatggctattaaaactgaaaaaggcacaatcgaatctgatttaatcgaagcaacaactgttatcggtgaaaaaatcagcttccgtcgttttgaagttgtcgaaaaagctgacaatgctgcatttggcgcttacttacacatgggtggccgtattgctgtattaacagttatcgatggcacaactgacgaagaagtagcgaaagatgttgctatgcacatcgcggcaatcaaccctcgctatgtcaacgaatctcaaattcctcaagaagaattagaacacgaaaaagctgtgttaactgaacaagcattaaacgaaggtaaaccagcaaatatcgttgaaaaaatggttgttggtcgtctacaaaaattcaaagcagaaatcgctttggttgaccaaccatttgttaaagatccagatatgactgtcgaaaaatttgttgcttctaaaggcggcgaagtgaaatcattcgtacgttttgaagttggcgaaggtatcgaaaaacgtgaagataactttgcggatgaagtaatgagccaaatgaaa

SEQ ID NO: 3894 - DNA, 2295 bp, Enterococcus faecalis
atgaagcgaagtaaatggaaagaattgatagtaacgggcatctgccatatattagtattccccatactaatacagacaactgtttttgcagaaacattaccaagtacaaaacaagtaagagaaggaaccaatcattcattaacagcagaaaaagccaaaagtgaacaaccacagacaaaggataaactacatgatgaagaaccactagcattgccaaaaagtgagttaatcgataatgaggctaatgttacaagtcaaacgattagagaaagaattgagacgcctaacctaacttatcgttatggatttattaatgaagaggggcagccagtaaacgccaatgagatccttctacagtatcatagttggcaaggcaattccccaaatggcataaatgtgtgggaaggtgaaagtcaaccagtgacagcatctacagtggctaatttaaaagaagtggtaattccaagtgagaaagtagccgtctattccgacatgtcaacggtgcttgcagcgagtaatcaaacattttttttaccaagatattatacttctttaagcttatacaataagaaaggggaaattgatcccaattttccgctgccaactatttccgacgcatcaggaaaccaatatccaacaacaatttcgcaatttgaattggaaaaaatgtctgcacaacaatatagtcagaaaacaggagtaacgtttaacattagagagagtcaaaaactaatcgttcctttgtacaaccaagtgaaggttgattcatcgaatcaatctgggctattgaattactttaaattttcagggccggtttattatcatgttaccaatcgcatagtgacagaacattttgtggatactcaagggaaaccaatccctccaccaccggggtttagacaaggaaagcaaacacttattgagcgtgacccttacgcatttaaacagaaagatcttttgccaagtagctatgaaattgactcaaaaacgtatcaatttcaaggatggtataaagggaaaacgaaacctgaaaatttagaaaaaagcgtaacgcccagttatgatattacctatgatgacaatgatgatttaactgttgtctataaggagatacctcaaaaaaattatacatttgaggatgtcaatggtgttgaaattgcaccaccatctgattttattcaggatcaccaacaaccaataactacggatggctttcgctatttagctggaaaaaaactgccacaacaatacagcgttaacggtaaaacttatttatatcaaggttggtatcaagataaaacaaaacaagagagcttagaaaaaacgaagcgccccataaactcccctgtttttaatgaaatgaacgctattacagcagtgtataaggaaataactgcaaaagctgaaatgcaaatagaaggactagtcaaagtcatgccaagtggttatatacaaatttggcagattatgcttacaaatgtgggagaagtaccgttaaaaaaaataaacttaaagccagcaagtggttggtcaccaggtctagctcggccaatccaagtcacgattcgtgttggatctgaaccaaacaaaattgttcctattactgatgaaaattggcgagttggcattgctttaaatacggaagtgcctattggtcagacagcaactattatgatgacaacaattgctacaggtgaaccagatcaagtgttacaagcggctgttgaaatgaatggaaatttttctgctgttcacgcagctgatactgtcagaatccaacctaaaaatcaagaaattgtggcaccagatgaggaaggttttatcagcacaccaacttttgattttggcaaagtcgccatttctagcaacacgcagcaacatggtttaaagcaggcagcagattattatgaaaatggtcaggaaaatccatatttacgtttgaaaaaatcacaacccaattgggcactaactgcagaactatccccctttgaaggaagagtggatcaactatcatcaatgacaaagttattgttaggaacaaccaatgtttcaggttttattcagtacaatcaaccaacggaaactaaagttgctcttggcaaaacaaccgctattcaattagttgccaacggtgtagctagccatattgttgccaatggtcagtttgacgaaagtgatgtttatcaatttgatttttcttttgatcaaatcaaattagaaattccagcaaatcaaggtagaaaagatcaaacttatcaagcaatggtgacttggaatttagtgacaggcccataa

SEQ ID NO: 3895 - DNA, 2118 bp, Enterococcus faecalis
atgaatgaagacattaaggtgatctttgatagtatctatcgcgacaaagcaacaaataatttaaccattacaggttgggcgttggatacaatcactaaagaaagcccaactttcacaattaataatgaaaaccaagtgtccgcttataacattcagcgcgttttacgtgaagatgttaatcaaatttatcaaacagagcctgcgattgaagctggctttgttgttacacttgaaggaattaaacaaaaaaaagtactcccttttcattttcaatcatcagcacatgttgtaacggtggattttcccttgaataaaaaatatccagtgattccagggacagaagataaagtgactcgtctttggataaaagccaaaaaaggatttaagtatatggctaaaaatggtatttctcataccattcaacgagcgaaaattgagaaactaagaaatcaagcttcgtatcttaactggttagctagaaatgaagtactagacatagaagcgatgacgcaagaaatcgcaacatttcattaccagcctaaaatttccattgcgatgccagtgtataatgttgaagaaaaatggcttcggttgtgcattgattctattttgaatcaagtctatactaactgggaattatgtatggccgatgacgcctcaacagatcctaatgtcaaaaagattttaacagagtaccagcaattggatgagcgaattcgggtcgtctttcgtgaacaaaatggtcatatttccgaagcaaccaactctgctttagcgattgctaccggagaatttgtcgccttactagacaacgatgatgaattagcgatcaatgctttttatgaagtggttaaagtgctgaatgaaaacccagaactggatttaatttatagtgatgaagataagattgacatggatggaaatcgttctgatccagcctttaaaccagattggtcacctgatttacttttaggaaccaattacatttcgcatttaggcgtgtatcgtcggagtattctagaagaaattggcggctttcgaaaaggttacgaaggttctcaagactacgatttagtcttaagatttactgaaaaaacgacaaaagaacgcatcacacatattccaaaagttctttactattggcggatgctgccaacctcaacagcagtggatcagggctccaaaggttatgcttttgaagcggggctaagagccgtgcaagatgcgctcgttcgtcgaggaattaatggtcatgcaacgcatggggcggcgaatggcttatacgatgtttattatgacattgaatctgaaaagttagtctcaattattattccaactaaaaatggctataaagacgtacaacgttgtgtttcatcgattattgaaaaaacaacctaccaaaattacgagattattatggctgataatggaagtacagatccaaaaatgcacgaattatatgcaaaatttgaacaacaattacctggccgctttttcgttgaatcaatcgatattccattcaatttctcaactattaacaatcgtgcagcgaaaaaagcgcacggagagtatttattatttttaaataatgataccgaagtgattacagagaattggttaaccttgatggtttcatttgctcagcaagaacggattggctgtgtaggtgcgaaattattgtatccaaataatacggtccaacacgcaggcgttattttaggattaggtggtgttgctggacatggtcattatggttatccccatggtgacttaggctattttggtcggttagctattaatgttaattattcagcagtaactgccgcatgcttacttatgaaaaaagcagattttgatgcagttggtggttttgaagaagcgtttactgtagctttcaatgatgttgatttatgcctgaaagtccaagctttaggacgtgacaacgtctggcttcatgaagcagagctttatcattttgaatctcaaactcgtggatatgatgataaaggcaaaaagaaaaaacgttttgaacaagaaaaagtgatgatggaagaaaaatggggacctttaattgaaaatgatccattttataatcctaatctgacaagggatattccc

SEQ ID NO: 3896 - DNA, 1983 bp, Enterococcus faecalis
gcgacaactcgtgcgcaagaattaagaaaacaactcaatcaatattcccatgaatattatgtcaaagatcaaccatccgtagaagattatgtttacgatcgtttgtataaagagttagtcgatattgaaacggagtttcctgatttaatcacgccagattcgccgacacaacgtgtaggtggcaaagttttatctggttttgaaaaagctccgcatgacattccaatgtatagtttaaatgatgggtttagcaaggaagacatttttgcttttgatgaacgtgttcgtaaggcgattggtaaacccgttgcttactgttgcgagttgaaaattgatgggttagcaatttcattacgttatgaaaacggggtgtttgtacgcggagcaacacgaggcgatggaacggttggtgaaaacattacagagaacttacgaacggttcgctctgtaccgatgcgtttaacggagcccatttcagtggaagttcgtggcgagtgctacatgcctaaacaatcctttgtcgcgttgaatgaagaacgtgaagaaaatggccaagatatttttgccaatcctcggaatgcagcggcgggaagcttgcgccaattagacacaaaaattgtggcaaaacggaacttaaatacgtttttatacacagttgctgactttggaccaatgaaagcgaagacgcagtttgaggcattagaagagctttctgcaattggttttagaaccaatcccgaacggcaattatgtcagtcaatcgatgaagtttgggcctacattgaagaataccatgaaaagcggagcactttgccatacgaaatcgatggaattgtgattaaagtgaacgaatttgtgttgcaagatgaattaggtttcactgtcaaagcacctcgctgggcgattgcctacaaatttccaccagaagaagcagagacagtagtggaagatattgaatggacaattgggcgcacgggagtggtcactcctactgcggtcatggctcctgtacgagtcgcgggaaccacggttagtcgggcaagtttgcataatgcagattttattcaaatgaaagatatccgtttaaatgatcatgttattatttacaaagccggcgatattatcccagaagtagcgcaagtcctagttgaaaaacgtgcagccgatagtcagccttatgaaatgccgacacattgtccaatttgtcatagtgagttggtgcatttagatgaggaagtggcgttacgttgtattaatccaaaatgccctgcgcaaattaaagaagggctgaatcactttgtctcacgaaacgcaatgaacattgatggcttggggccacgagtgttagcacaaatgtatgacaaaggattagtgaaagacgtagcggatctgtatttcttaacagaagaacaattaatgactttggataaaatcaaagaaaaatcagcaaacaacatttacactgccattcaagggagtaaagaaaactctgtcgaacgtttgatttttggcttaggaattcgccatgtgggggcgaaagcggcgaaaattttagcggagcattttggtgatttaccaaccttaagtcgtgcaactgcggaagaaattgtggctttggattcaattggcgaaacaatcgcagacagcgttgtgacgtattttgaaaatgaggaagttcatgaattaatggctgaactggaaaaagcccaagtgaacttgacatataaaggtctccggacagaacaattagcagaagtggagtcacctttcaaagacaaaacagttgttttaacaggaaaattaacgcagtacactcgcgaagaagccaaagaaaaaattgaaaatcttggtggaaaagttacagggagtgtttcgaaaaaaactgacattgtggttgctggcgaagatgcaggcagtaaattaaccaaagctgaaagcttaggcgtgagcgtttggaatgaacaagaaatggtcgatgcgtta

SEQ ID NO: 3897 - DNA, 1443 bp, Enterococcus faecalis
ttatacgacaaatcgttaacagagttacatgatttattggtttcaaaagaaatcacagcagttgatttaaccgaagaaacattaaatcgtattcaagatacagaagaacaactaggttcttttatcacagttagtgaagaaaaagcaatggcattagccaaagcgattgacttaaaaggcatcactgaaagtaatccattagctgggattccaattgggattaaagacaacattgtcacaaaagatattttaacaacagctggctcaaaaatgttacacaattttgacccaatttatgatgcgaccgtgatggataaagtctatcaagcggatatgattccagtcggaaaattgaacatggatgaatttgccatgggtggaagtacggaaacgtcttacttcaagaaaacaaaaaatgcttgggatcaaaccaaagtccctggtggttcttctggtggttcagcttctgctgtcgcagccggacaagtcccagtttctttagggagcgatacaggtggcagtatccgccaaccagccgcattcaacggtattgtgggcttgaagccaacttatggacgtgtgtctcgttttggcttgattgcttttgcttcaagtttagaccaaattggtccattgacacgaaatgttaaagacaatgccttagctttaaatgcaattagtggttatgacgaaaaagacggcacttctgcaggcgtttctgttcctgattttacggcagatttaactggcgacatcaaaggcatgaaaattgctttaccaaaagaatacttaggtgaaggggtacaacctgatgttcgtgaagcggtattaaaagcagcagaaacatttaaatctttaggagcaacggtggaagaagttagtttgccacattctaagtacggcgtagcggtttattatattattgcctcttcagaagcaagttcaaacttacaacgctttgatggcattcgttacgggtaccgttcagacaatgtacaaaacttagaagatgtctatgttaattcacgttctgaaggtttcggaacagaagttaaacgtcggattatgttaggaaccttctctttaagtgctggttattatgatgcgcactttaaaaaggctggtcaagtccgtacactaatcaaacaagattttgagaatgtctttgcggattatgacttaatcattggcccatccacaccaacagttgcctttggtctaggggaaaacatcaatgatccaatcacaatgtatatgaatgatattttaaccattcctgtcaacttagcaggactaccaggcatgtccattccagcaggcttctcagaaggcttgccagttggtttacaaattattggaaaacattttgacgaacatacaatgtataaagcagcctatgcttttgaacaagcgacagatttccatacgaaaaaaccagtcatt

SEQ ID NO: 3898 - DNA, 1446 bp, Enterococcus faecalis
aaagttcgtgtgcgttacgcaccaagtccaactggacacttgcacattgggaatgcaagaacagcattatttaactacttatttgcccgccacaatgacggagaatttatcattcgtatcgaggataccgaccaaaaacggaacatcgaagacggcgagaaaagtcagttggaaaacttagcatggttagggatggaatgggatgaatcacctgctcatccgggagaatatggtccatatcgtcaatcagaacgtaaagaaatttaccaaccattgattgatcaattattaagtagcaatcgtgcgtataagtgttattgtacgccagaagaattagaagcagaacgtgaagcacaacaagctcgtggggaaatgcctcactacgcaggcacttgtgcgaatttaacaccttctgaacaagcagccaaagaagcggctggtctagaaccagtgattcgtttccgtgtgccacgtaatacagaatacaaatttgatgacatcgtgaaaggtgaaattacttttgagtcagataacattggtggcgattttgtcatccaaaaacgcgatgggatgccaacgtataactttgccgttgcagtagatgatcacttaatgaaaatttctcacgttttacgtggcgatgatcacattgcgaacacaccaaaacaattaatgatttacgaagcgtttgaatggacaccacctgtctttggccatatgaccttaatcattaattcagaaactggcaaaaaattgagcaaacgtgatgaaacaattttacaatttattgaacaataccgtgaattaggttacttaccagaagccatgttcaactttattgctttactaggatggtctcctgttggcgaagaagaaatcttctcacaagaagacttgattaaattgtttgatgaacaacgcttaagcaagtcaccagcggcctttgatgcgaaaaaattagaatggattaacaatcaatacatgaaacaaatggacttaggtgaactaacagatatgtgtattccttatttagtcgctgacggtcgtgttgaagaaaatccatctcctgaaaaaatcgaatggttaaaacaattagttagcttgtatcaaccacaaatgagttatgcagctgaaattgtggaactatcaaacttgttctttaatgaacatccagttttagatgatgctgcgaaagaattcttgcaaggagaaacagtgccaactgtgttacatgcgtttaaagaacaattagaagccttggacgttttcgatgtcccaagtattaaagcagcgattaaagccgtccaaaaagaaaccggcgttaaaggcaaaaacttgtttatgccaattcgaattgctgtttctggacaaatgcatggtcctgaattaggcgaaaccatcgaattattaggcaaagaaaaagcattagatcatttaaataaagtg

SEQ ID NO: 3899 - DNA, 1218 bp, Enterococcus faecalis
aagcgtcccgaggtgttggctccagccgggacgctagaaaaactaaaggtcgcaattcgttacggtgccgatgccgtttatatcggagggaatgcctacggtctgcgtagccgcgcaggaaatttcacgccagaagaaatggcggaaggcgtagcctttgcccgcgaacataatgcgaaagtttatgtcgctgccaatatggtcactcatgaaggaaaccaggaaggggcaggagcgtttttcagagaattgcgagacatcggaatttcagctgtgattgtttccgatccagctttaatcgaaatttgtgcgacagaagcaccaggtttacctatccatttatcgacacaagcttcagcaactaactatgaaacattagaattttggaaaaatgaaggcttagaacgtgtggttttagcgcgcgaagtttcaatggaggaagttgcagcgattcgtaaaaatacggacattgaaattgaagcctttattcatggagcaatgtgtatttcatattcaggacgttgtactttatccaaccatatgtcgatgcgggatgccaatcgtggcggttgctctcaatcttgtcgttggaaatacgagttatttgatatgccttttgggacagaacgtcggagcaaaaccagcgaaggggaagttgaagaagagttttcaatgagcgccgtagatatgtctatgattgaacatattccagaattaattgaaaatggtgtcgatagttttaaaattgaaggccgcatgaaatccattcactatgtttcgacagtcgctaatgtgtataaaaaagccgtcgattcttacatggaagatcctgaaaactatgtctgccaacaagagtggattgatgaattatggaaagtagcacaacgtgaattagcaactggtttttattacaatacaccaagtgaaaatgaacaattattcggcgaacgtcgtaaaattccacaatataaatttgttggcgaagtgattgcgtacaacgaaaagacgcaagtcgcgacaattcgtcaacggaaccttttcagtgtcggcgatgaaattgaattttatggtcctgggtttacccatttccaccaaaccgttaaagagatgtataatgaagacggtgaagcgatcgatcgggcacctaatcccatgatgttattaacaatggaagtgacgcaacctgttgcagtcggcgatatgattcgtaagaaaaaa

SEQ ID NO: 3900 - DNA, 906 bp, Enterococcus faecalis
atttatacatgtacattaaatttagccattgatttatttatcgaaacagaagagctagttccttttgtcgtgaatcgcacgaaggaagatgatattcaagcaaacgggaaaggagtcaatgtttccctaattttaaagatgttagggattgataataccgctttgggagtcaaagctggtttcactgggaactatgtcgaggattatttaaaagaaaaagagataaccactgattttatcgaagtcgctggcacaacgagaatcaatgtgtttacaaaagttacccaagatcaaaaggaatacaaattagtcaataagggaccaaaattatctgaagaacatgtacaacgttttttgaaaaaaatttcagagttacgtaaaggggattatttgtgcgtatcaggaagtttaccacaaggggtttcgccaagtattttgattgaaattagccgaatttgttttgaaaagcaggtgttcttaattttagacagtagttatgaagaaattttagattgtttgccttatcaaccatttttattgaaaccaaatgaagaagaacttcaagagtggtttcatacagaagtgcagactaaggacgattacattttttacggacaagaattactgaagcggggagccaaaaatattttactttctttaggtagtgaaggggctttatttatgaataatgaaaaggttctttcaggcaattcaccaactggaatggttgtgaatacagcttgttcaggggatgcaatgttaggtacctttttagctggctggcatcaaggactttcattggaaaaaaatttaaaaagaagtattgcagcaggtagttcaacagcatttcgcaaaggattgacagatttttcagatgttcaggagttagagcaacaaataaagatt

SEQ ID NO: 3901 - DNA, 1365 bp, Enterococcus faecalis
caattaatagctgctacaggttgtccgacgggaatagcgcacacgtatatggcacaggaggcattggaacaagctgcgaaacgtaaaggtattacgattaaggttgaaacacatggtcagattggtatagaaaacgagttaacacctgcagaaatccaaggagcggaggcaatcattattgccgccgacaaagacgttcaagcagaacgttttgctgggaaacgaattattgatgtccctgtcagcgttggcattaaagaagcagatcgcttaattgaagaagcgctcgcaggaaaaggatcgattgcggccgaaaaccaagcagtggacgaacttgaacaggagacacaaatttcttcaggaaatgttggacatagtatttataaaaacttaatgaatggcgtttctcacatgttgccgtttgtagtagcaggcggcattttaattgctctttcttttgctatttggggtatttattcatttgatccagaaagtagtcagtataatgctaccgctgctatgttaaaaagtattggtgatgcctcaatgggaatgatggtgccaatcttatctgcgtatatcgcagaggggattgcgaaacgacctggtttggttgtgggctttgtcggtggtttgattgctaacactggtggtactggctttttaggagggatattatctggtttccttgctgggtatttcattcttttattacaaagagtatttaaaggtttgcctaaatcattagatggtttaaaagcaattttcctttatccagtcattggcgttgcagttattggtatcactatgtctttactagcagatccgatgaaagctgttaacgaaggaatgatgagctttttagctagtttccaaaattccagtccgttggttttaggaattattgtgggttgtatgtgtgcctttgatatgggaggtccagttaataaagcggcctatgttactggaacggcactcttagctcaaggaaatacttcttttatggcaggagtttctgctgcctgcatagcgccacctttaattacaggctttgctacattattctttggaaaatactttgacacaaatgaacgcaatgcgggcctagtgaactttattttaggctccacacatattacagaaggcgctattccgtttgcggcaaaagacccattgaaggttttaccaattatgatgctcggatcttcaattgcggcagtcttaacgtatatgtttggggtacaagtgccagcacctcatggaggatttcttgttttaccagttgttactcacgctgttcaatgggttctggcaattttagctggttcattggtaggtggtttattgctaggttttgtacaaaaa

SEQ ID NO: 3902 - DNA, 3072 bp, Enterococcus faecalis
ggaacgcgccaactaattactgggttatcaggctctgctaaaacattactgatggcaggcgctttacaaaagacgcatcaaaaaattgttattgcggttccaaacctatactatgccaatcaattagtagatgattttttaaatattttaccttcagaacaagttcatctatttccagtagatgaagtgttatccgccgaaatggccttttcttcaccagaagcgcgcgcagatcgagtgagtgcgttaaatttcctgatgacagcgaatgcaggaatcgtggtcgtaccagtagctggactacgaaagtatttgccaacgaaagaaacgtggcaaaatgcgcaacttcattgggaaatcgggacagaagtagaacctgagatcctcgcgcaacgcttagtgttaatgggctatgaacgccaatcgatggtcggaaagcctggcgaatttagtattcgcggaagcattgttgatgtctatccgctaaatgccgaataccctgttcgggtggaactgtttgatgttgaaattgactcaatccgttatttcgaagcagatacccaacgttcattagaaaatcttgaagaagtaacgatttcaccaatgactgatttagtattctcaaaggcagatatgaatcatggcatgatgaggttacaagatgctctagaaaaacgtttagcgacagctaaagatcaaacagagaccgattttttagaagaatattttggtcagttgctgtcttcttgggaacaagggattcctacagaaaatgctcactattatacagattttctgtaccaacaaaagactacgctgttagattatttaccagaaaatagtttgctttttgtggatgattattctcgtatgatggaaacggagcgagaaatcgctagagaggaagcggaatggcaaaccctgaaaattgaagaaatgcgcgtgttttctgaacaaacttttggcgtagactttcatgatcaattgcgaaaaactgcacgaaatacgaccttcttttcactttttcaaaaagggatggggaatcttcgtttccaagaagtccataatttccaatatcgttcaatgcaacaattcttcggtcaaatgccgttgctaaaagcggaagtggaccgttggcaaaagcaaaaccaaacggttgttgtttttgttcctacgaaagaacggattcaaaaagtcgaagagctatttcaggactttgacatacctagcgtagtaagcaattgggatcagttgttagattggcatgtccaaattgtccaaggggcattacaaacagggtttgaattgcctaaaaacaagctcgtggcgattacggaaaaagaaatttttcatacaacgaccaaaaaacgggcacgtcgtcaaacaatctctaatgcggaacgtttgaaaagttatagcgacttaaaaacgggcgattatgtcgttcatgcgaatcacgggattggtaaatatattggtatggaaaccttagaagttgatggggtccatcaagattacatgactatcttgtaccaaaatgatgacaagttatttattccagtaacacaattgaacttgattcaaaagttcgttgcttccgagtctaaaacgccgaaaattaacaagctaggcggcagtgaatggacgaaaaccaaacgaaaagttgcttcgaaaattgaagatatcgcggatgatttaatcttactttatgcgacaagagaatcggaaaaaggctatgcttttccgccagatgatgcgtatcaaaaagaatttgaagaggcttttccgtattctgaaacagatgatcaattacgtagtgctgccgaaattaaacacgacatggaaaaatctcgaccaatggatcgtttgttagttggcgatgtagggtttggtaaaacagaagtggctttacgagcggctttcaaagctgttagcaacaataaacaggttgcctttttagtgccaacaactattttagcgcaacaacattacgaaacgattcaagagcggtttgagggctttcctgtagaaattggtttattaagtcgtttccgcacgaaaaaacagcaaaatgaaacaattgaaaaaattaaacatggccaagtagatattgtgattggtacccatcgtttattgtcgcaagatattaattttagtgatttaggcttgttgattattgatgaggaacaacggtttggagtgaaacataaagaacgactaaaacaattgcgttcacaagtggatgtcttgacgttaacagcaacgccaatcccaaggacccttcatatgtcgatgttaggtgtccgtgatttatccgtcatcgaaaccccaccagagaatcgttatccgatccaaacgtatgtcatggaaaataatcctggggcgattcgggaagcgattgagcgagaaatggcccgagatggtcaagtcttttatttatacaatcgagtagatacgattgaacgaaaagttgaagagttacaagcactagttccagatgcacgaattgcgtatgcacatggtcaaatgacagaagtacaactggagaatactttgtttgattttattgaaggacaatatgatatattagtcactacaacaattattgaaacaggagtagatattcctaatgctaataccttgtttgtagaaaatgcggactacatgggcttatctacgttgtatcaattacgtggtcgtgtggggcgtagcaatcgagtggcctatgcttattttatgtacgaacagcaaaaaatcctaaacgaagttagtgagaaacgtttagaagcaattaaagactttacggaattaggttctgggttcaaaattgcgatgcgtgacctttccattcgaggggccggaaaccttcttggtgcccaacaacatggcttcattgattcggttgggtttgatatgtactcacagatgttatctgaggcagttgctcgtaaacaagggaaaaatatccaagaccaaaaaacgtctgttgaaattgatttgggcattgatgcttatattccaggaacgtacattacagacgaacgacaaaaaattgaaatttataaacggatt

SEQ ID NO: 3903 - DNA, 921 bp, Enterococcus faecalis
caacagctacagcaaatgcaacctttgctgtacaagcaactccaaaaaagttttgagcatggtcgtcttgcccatgcttatctttttgaaggagatacaggaactggaaaacaagaatttggcttatggatggcgaaacatgtcttttgtacgaatttagtaaatcaacagccttgtaacgaatgccataattgtgtgcggattaatgaaaatgaacatccagatgttttaagaattgcgccagatgggcaaaccatcaaagtgaaccaaatccgtgaattaaaagcggagttttctaaaagtggggtcgagactgctaaaaaagttttcttaattcaagaagcagataaaatgagtaccggcgcagctaatagtctcttaaaatttttagaagaaccagaaggacaaattttagctattttagaaaccacttcgctttctcgaattttaccaacgattcaatcacgatgccaaaccttacattttcaaccattagtcaaaaaaacattaattgatcgcttaatcaaacaggggattggtgaaaagactgcaacccttttagctgagctgacaaatagttttgagaaagcagttgaaatctctcaagatgaatggtttaatgaagctaaggaaatcattttgcaatggtttaattatctaaaaagtaatgatttacaggcatttatctacgttcagaagaaaatggtcaaagtatttaaggaaaaagaacaacaagcgcttagctttgacttgctcatggtttattaccgtcaattattggaagaaagtgttgcgacacagcaagccaaaaaagtaacggaagagcaggcggaacggttggcgctaattttgaaagcacgccaaaaatggactgccaatgttagttggcaaaatgtttgtgaacaattagttatccaaatg

SEQ ID NO: 3904 - DNA, 1740 bp, Enterococcus faecalis
caagaattattaaaagatacatttggctatgatgattttcggtcaggacaagaaacgattattcgtcatgtattgcgacaagaaaatgtcttaggcattatgccaacaggtggaggcaaatcgatttgttatcagttgccagccttacttctggataatttaacattggtgatttcaccattaatttctttaatgaaagatcaagtagatgccctgaatttaatggggattccagctacatatatcaatagtaccatttcctatcaagaaatgaatcaacgtattcaattagcggttaacaaagaagtcaagctattgtatgttgcgccagagcgattagaatcttatgattttcaacagatgctgacacatgtaccgattgatttattggcagtagatgaggcacactgtatttcacaatgggggcatgattttcgtccaagctatttgcgtttagcagagattatcgatcaatttcaacagcaaccaactgtgattgcactaacagcaacagcaacgccacaagtagcggaggatattgtcaagcaattaagaattccatcagaaaatgaaatcaaaacaggattcgctcgagaaaatttatcttttcaagtcgtgaaggatcaaaacagagacgtttttcttttggaatatttaaagatgaatactgggcaatcaggtattatctatgcaagcacgcggaaggaagttgaacgaatttatcatttattagaaagtaaaaaaattgcagctgggatgtatcatgggggcatgagtgaacagttacgtagtgaaaatcaagaagcattcttgtatgatcaagtgcaagtgatggtagcaacaaatgcctttggtatggggattaataagagtaatgttcgttttgtcattcacgcacaagtaccagggaatattgaatcttattaccaagaagccggccgagctggtcgtgacggtctgcctagtgatgctgtgttaatgtttgctccacaagacttgcaaattcaacaatactttattgaacaatctgaaatgaccattgattataagcagaaagagtacttgaaattacgggaaatgtcacaatatgcgaatgcacaaatgtgtttacaaaaatatattttacgctattttggtgaagaagggacggactgcggtcgctgctcgaattgtctggataatcgagaattagtcgatattacggtcgatgcccaaaaagtcttgtcttgtgtaaaacgtatgggagaacgtttcggtaagggcttagttggtaaagtcctgactggctcaaaagatcaaaaaattgatcaatggcattttgatcgtttgccaacatacggactaatgaaaggtcgcacgcaaaaagaagtcacacagctgattgattatttgacagcagaacgttatttaattccttctgatgggcaatttccgttgttatcagtctcgacagaaggtgttcaggtgcttttaggggaacggaaagtcttccgaaaagaagaccaaaaagttcgaaaagtagcagtggatgatgccttgtttgaacgattacgcgaattacgtatggacatggctcaagaggcaggcgtgccgccatatgtagtcttttccgatagtacacttaaagaaatgtgtgaaaaattaccgcaaacaacgattcaattattgcaaataaaaggggtcggccaaaataaattagataaatatggcaccgcctttttagaagtaattaaagaatat

SEQ ID NO: 3905 - DNA, 234 bp, Enterococcus faecalis
aagaaatttgccattcaattattagaagacgatgcagaacgcattaaaatgcttattcgtaatcaaaaaaacagtttgtgcatttctcaatgtaaagcatttgaagaagtggtggatacacaaatgtatggtttttcaagacaagtgacctatgcgacccgtttggggattttaactaatgatgaaggacatcgcttactaagtgatttagaacgcgaattgaatcaattatat

SEQ ID NO: 3906 - DNA, 1200 bp, Enterococcus faecalis
aaacggcatttgctagactatagtatttttattccatatttaattttaagcatcgtgggattgattatggtatatagttccacatccgcattacaagtaatgaaaggtttttcacctacgtcattcgttattaaccaggttgccttttgggtagtagggttagttgcaatgttttttatttataagatgaaaacatccgtttttcagaatcgaagttttatcatgtttgccattgcagtaattacggttatggttttagccgttcggattcctggtatcgggaaagaaattaacggcgcacgtggttggattgagattggtggattttcgatgcaaccagctgagtatttaaaaattatggttgtctggtatctgtcttatattttagcacggcgacaaaagacaattaatggaggcatggatcaatttaaacaagctgccgggcgcccgttgatgctcgtttttgtattaattgctctagttgcaatccagcctgacttcgggaatgcggccattctaacattaattaccatcgtgatggttttagcaagtgggattaattatatgtatacctacttggttggtggcttgggcattttaggtagtatcacggctattcagttattaattatgtcgaaaggaaaaattttcccagcgcgttaccaatatatttataatcgttttgctgtttttaaaaatccatttttagatgaacggaacttaggccatcagttagctaattcttattatgcaatcagtaatggcggctggtttggcaaaggtctagggaatagtgttcagaaaaaaggctttttaccagaagcacatacggactttatctttgcgattactttagaagagttaggcattatcggcggtctagcgattttaggattgttgatgtttatgattgcgcgaattattttagtcggtgtacgctcgaagaaaccttttaattcactaatgtgtattggaattggtacaatgttattaattcaagtctttattaatgttggtgggattactgggattattccattaacaggaattactttcccgttcttgagtcaaggtgggaatagtttgctgattatttcgattgctgtggcctttgtcctgaatatcagtgcagatgaaacacgtcagaaattagaaaatgagtactatttatctttagaacagaaccaataaatttgaagg

SEQ ID NO: 3907 - DNA, 480 bp, Enterococcus faecalis
attaacatgcagttagaagaagtaaaagcactattaacacaatttgatcaatcaactttaaccgaatttgatttacgagaaggctcgtttgaattatatatgaataaaaatacagtttctgggcgaagtgccgtagaaccagtggtgcaaccacaagaaacaccagtagccgctagtggtgtgtcagtgcctgttgaaacagtttctgtcgttgaagaaacgccaactaatacaccgacagccaatgaaaagacagaagaaattacgtcacctattgtaggaatcgtttatttacaaccagcaccagataaagagaactttgtcaaagtaggagacactgttaaaacgggtgacgttgtgtgtatcgttgaagcgatgaaattaatgaatgaaattacggcgacagttgacggtgtgattactgaaatattagtcaacaatgaagatgtggttgaatttggtcagccgctattccgagtt

SEQ ID NO: 3908 - DNA, 1329 bp, Enterococcus faecalis
atgttttcgaaagtattaatcgcaaaccgcggagaaatcgctgttcgtattattcgtgcctgtcgcgaattaggcgttcaaacagttgctgtttactctgaagcggatcaagaagcgttacacacacagttagcagatgaagccatttgtattggaccggcgaaagcaactgattcttatttaaatgttcaagctgttttaagtgcagcgattgttaccaatgctgaagcgattcatccagggtttggtttcttatctgaaaatagtcaatttgcttcaatgtgcgaagaatgtaacattacttttatcggtcctaaagcagaaacgattgatgcaatgggcaataaaataaacgcacgtcaactgatgcaaaaagccaaggtacctgttattcctgggagtgatggcgtcattgattctgtcgaagaagcgttgacgattgctgaagaaattggttacccagttatgttaaaggcagctgctggtggtggcggaaaaggaatccgaaaagttctttcaaaagaagagttaccgaaacactttacttcagcgcagcaagaagccaaagccgcatttggtaatgatgatatgtatttagaaaaaattatttatccagcacgtcatatcgaagtgcaaattttaggtgatcaatatgggcatgtgattcacttaggggaacgtgattgctcactacaaagaaataatcaaaaagtgttagaagaatcaccatcgattgctatttctgaagaaaagcgtcagatgttaggcgaaacgaccgttcgagcggcacaagctgtgcattatgaaaatgccggaaccattgaatttttgatggatccagctggcgacttttatttcatggaaatgaatacccgcatccaagtcgaacatccagttacggaaatggtaacagggattgatttagtcaaagcacaattagaaattgcttcaggtgaacctttaggctatacccaagaggatgttatcctgactgggcatgcgattgagtgccgaattaacgctgaaaatcctgcctttaattttgctccttcaccaggtaaaattcaaaatctcttgttgcctagtggtggaatgggcttgcgtgtagacagcgctatgtattcagggtattcaattccgccttattatgattcaatgattgcaaaagtcatcgtacatggtgaaaatcgttttgatgccttgatgaaaatgcaaagggctttaaatgaaattgtaacagaaggtattattacgaatgccgaattccaattagatttaattacacatgacaatgttttgacaggtgactatgacacaagctttttacaa

SEQ ID NO: 3909 - DNA, 798 bp, Enterococcus faecalis
gatgttgttaccttggcaagagaccaagatcgtttgacaactttagaatatatagaagccatttttgaggactttttagaatttcatggggatcgttactttgccgatgatttagctgtagtcggtggtgttgctactttgcaagggaaaccagttacggtgataggtatccaaaaaggccgaaatctaccagaaaatattgaacgtaattttggttcacctaatcctgaagggtatcgcaaagcgttacgtttaatgaaacaagcggaaaaatttaaccgcccagtcattacctttgtgaacactgctggtgcctattgtgggattggtgccgaagagcggggagaaggggaagccattgcgcaaaacttgttagaaatgtctgatttgaaagtgccaatcatttcagtcatcattggtgagggcggtagtggcggtgctttggctttagcagtcgcagatgaagtttggatgttggaacacacgatttatgcggttctttcgccagaaggtttcgcctctattttgtggaaagatggcagtcgtgcgaaagaagcagcagaattgatgaaaatcacagcgacagagctgaaggaattagctattgtagataaagtaattccagaagttatgaacggtcagcctctggaacaagcaaaaattaatcgcatgttacaaaaagcgttcatttcaaaattaactgaattagctaaattagatacggaaacgttactagaaaaaagataccaacgttttcgcaaatattagaagttactactcatcaacgaacttttcagg

SEQ ID NO: 3910 - DNA, 768 bp, Enterococcus faecalis
atgagcaatcaagaagccattggattaattgattctggcgttggtggattaactgttttaaaggaagcgctaaagcaattaccaaatgaacgattaatttatttaggagatacagcccgttgcccatatggtccacgaccagccgaacaagtcgttcagtttacttgggaaatggccgattttttattgaaaaaacgaataaaaatgctagtaatcgcatgtaataccgcgacggctgtcgcattagaagaaattaaagctgccttgccaattccagttgttggtgttattttacctggcgcacgagcagccgttaaagtcacaaaaaataacaaaattggtgtcataggtaccttagggacaatcaaaagtgcttcctatgaaatcgccattaaaagtaaggcaccagcaattgaggtgactagtttagcttgccctaaatttgtccccattgttgaaagtaatcaatatcgttcttccgtagcaaaaaaaattgtggcagaaacacttcaagcactacaattaaaaggacttgatacgttgattttaggttgtacccattacccgttgttacgtccggtgattcaaaatgtgatggggagtcatgtgacattaattgactcaggagccgaaacagttggcgaagtcagcatgcttctcgattattttgacattgcccacacgcctgaagcgcctacacagccccatgaattttatacaactggttctgcaaaaatgtttgaagagattgcaagcagttggcttggt

SEQ ID NO: 3911 - DNA, 702 bp, Enterococcus faecalis
atgaaccagcgaactatttattatggtagtatcggcacagccttatttctttcttcaggaatgttgattgcttcagtgaatagctatgcaaacgaagcgacaacaccaggcaaatacaccgtgacttatgaagtggatggcaaaattgaaacagcaaccattacggtcaaagaaaatcaaacggaacttaaattaaaagacacgtttttaggagttaatcaagcatggtcacccttagacaatgtcgtttttctaaaagataaagagggtcgccctttaaatttagaaaatgtaattatagaaaataatgtaaatactcaaaaagtaggcctttattttgtaaccttccgttacgagtcatacctttctattgcgaaggtgtatgtcaaccctactaattttgctgcagaggggaatatgcttgcagagcttccttatagtcaagcaatgattggcccagaaagaccaattattgcctcgagacaggacaaggagcaacaaacaaaacaggagaaaaagaaaaataaaattgaacaggaacgagtaaataaaaaggtgctgttaaatgatgagttgttgaaaaaaatagatacgatagccccagtggaaattactggaggagcggcaagtgggtcctctcaatttggcaccactttaagcttcctgtcaggctcacttttgtatggaacaaggagagtttaa

SEQ ID NO: 3912 - DNA, 168 bp, Enterococcus faecalis
atgtcaaaaacagtcgttcgtaaaaacgaatctcttgatgatgctcttcgtcgcttcaaacgttccgtttcaaaagcgggtactttacaagaatcacgtaaacgtgaattctacgaaaaaccaagtgtaaagcgtaagaaaaaatctgaagcagctagaaaacgtaaa

SEQ ID NO: 3913 - DNA, 438 bp, Enterococcus faecalis
atgtcattgctaaccacattgaatgacgacattaaaacagcgatgaaagctaaagacaaagaaactttagccgtacttcgtatgttaaagactgccattcaaaatgatcagattaaagcgggccgtgaattgaacggagaagaagaactcactgtattgtctcgtgagatgaaacagagaaaagattctttatcagagtttgaaaaggcgggacgcgacgatcttgttgaaaaagtaaaagttgaaatagcaattgttgaaaaatatatgcctcaacaactaacagaggaagaaattcgtcaactagttcaagaggtaatgacgcaaactggcgccacttcaccaaaagattttggtaaagtgatgggcgctatgatgccgaaagtcaaaggcaaagccgatggcaaccaagttaacgcaattgtgaaagaattatta

SEQ ID NO: 3914 - DNA, 273 bp, Enterococcus faecalis
gtgttaaaaccattaggcgatcgcgtcgtaattagagtcgcgaaagaagaagaaaaaactgttggaggaattgttcttgcatccgttgcaaaagaaaaaccacaaacaggtgaagttatcgcagtaggtgaaggtcgtgtgcttgaaaatggcacaaaagttccgatggaagtaaaaattggtgacacagtaatgtttgaaaaatattcaggaacagaagtgaaatacgaaggcgtagaatacttaattgtatcagccaaagacattattgcc

SEQ ID NO: 3915 - DNA, 1551 bp, Enterococcus faecalis
gttttaaatattctcctcgctatcgtcggtttgattgtcggtcttggtttaggatttgttattgcaaagtcacgtcatgataaagcaataaatggtgcaaaaatttcagcgtcgagtattctcgagaacgctcggaaagaatcagaaacactgaaaaaagaagcattgctagaagctaaggaagagaaccagaagtatcgttcagaaattgaaagtgagttgaaagaaagcagattagaacttaaatctcaagaaaatcgtttaattcaacgggaacaaacgttggatcgtaaagatgactctcttgaaaaacgtgaaggctcactggaagaaaaagaagagaaacttggtgctagacagcaattaattgatgagcgagaaaaagaagtagaaaacttaattaatcagcaacatcaagaattagaacgaattgcttccctttcaaaagaagaagcaaaatcgattattatgaagtcaacagaagaagagttgaatcatgaactaaccttgatggtcaaggagtcagaacaacgtgccaaagaagaatctgatcgcaaagcgaagaacttgctttccctagcaattcaacgttgcgccgccgattctgtttctgaaacaactgtttccgtggtcactttaccaaatgatgagatgaaaggtcgcattattggtcgtgaaggacgtaatattcgtacattggaaacattaacagggattgacttaatcattgatgatacgccagaagcggttgtgttatccggatttgatccaatcagacgagaaatcgctcgaatgaccttggaaaaattaatccaagatggtcggattcatcccgctcgtatcgaagaaatggtagaaaaatcacgtaaagaaatggatgaacggattcgtgaatacggagaacaagcagcctttgaagtaggtgctcatacgttacatcctgatttaattaaaattttaggccgtttacgtttcagaacaagttatggtcaaaatgtcttgaaccactcaatcgaagtagcaaaactggctggcgttttagccgccgaattaggcgaagatgttcaattagccaaacgtgcaggtttactacatgatattgggaaagcattggatcatgaaattgaaggttctcacgttgagattggcgcagaattagctgcgaaatataaagaaaattcagtagttattaatgccattgcctcgcatcatggtgatgtggaagcaacctcagttatttctgttttagtggcagccgcagatgcgttatctgcagcccgtccaggtgcacgtagtgaatcgttagaaaactacattcgccgcttagaaaacttagaaaatatttctaatagttttgaaggcgttgattcaagttttgctgttcaagcaggacgtgaagttcgtgtcatggtgaaaccagaagaaatttctgatttagaatctgttcgtttagttcgagacattcggaagaaaattgaagatgacttggattatccaggacatatcaaagtaacggttatccgtgaaacacgtgccgtagactatgcgaaa

SEQ ID NO: 3916 - DNA, 795 bp, Enterococcus faecalis
ttgcgtatattatttataggagatgttgtcggttctttaggaagagaagccttagcaacgtatgtccctaaattaaagaaaaaatatcgtccacaagtgaccattgccaatggtgaaaatgcggcatctggtcggggaattactggcaagatttataagaaatttttgcaagatggtgtcgatgttgttacgatgggtaaccatacgtgggacaacaaggatatctttgaattcattgatgatgcgaagaaaatggttcgtccagcgaactttccagaagatgtgcctggtcaaggaatggtttttgtgaaagtcaatcaattggaactagcggtgattaatttacaggcccgcacatttatggtgccattggaagatcctttcaagaaagccgccgagttagtagctatcgctcgcaaacggacaccgctcatttttgtggattttcatggcgaaacgacgagtgaaaaacaagccatgagctggtttttagatggccaagtttcagccgttgttggaacacatacgcatgttcaaacaaatgatgctcggattttaccgaaagggacagccttcttaagtgatgtcggtatgaccggtccttatgatgggattctaggaatgaagcgtgaaccgattattgagaagtttatgacagcattgccgaagcgctttgaggtagtcgaaacagggcggacaattttatctgcctgtattttagagattgatgaccaaacgggccaagcgaagatgattgagccgattcagattagtgaagatcgcccgtttcaagaa

SEQ ID NO: 3917 - DNA, 2535 bp, Enterococcus faecalis
atggcaaattttttgaaaaaaatgattgaaaacgataaaaaagaattaagacgattagaaaaaatcgccgataaaattgatgcacatgcaagtgcaatggaacaactaagcgatgaacaattacgtgaaaaaacagatgaatttaaagcccgttatcaaaaaggggaaaccttagacgaactattaccagaagcgtttgcggttgtccgtgaagctgctaaacgagtactaggtttattcccataccgtgtccaattaatgggtgggattgtgcttcatgacgggaacattcctgaaatgagaacaggtgaagggaaaaccttgactgccacaatgcctgtatacttgaatgcactatctggcgaaggagtacacgttgttacagttaatgaatacttagcaacccgtgactctaacgaaatgggagaattatataatttcttaggcttaagcgttggtttaaacattaactctaaatcttctgatgaaaaacgtgaagcgtataactgtgatatcacttatagtacaaataacgaattaggatttgactatttgcgtgataacatggttgtttatcgcagccaaatggttcaacgtccattaaactatgcaattgtcgatgaagtggattcaatcttaattgatgaagcaagaaccccattaattatttctggacaagctgaaaaatcgacagcactctatacgcgtgccgataattttgtcaaacgcttaaaagaagacgaagattacaaaattgatattcagtctaaaacaattggtttaacagaagcagggattgaaaaagctgaacaaactttcggattggataacctgtacgatattgaaaatacagcattaacgcaccatttagatcaagcgttacgggcaaactatatcatgttattagacattgattacgtggttcaagacaataaagtcttaattgttgaccaatttactggtcgtatcatggatggtcgtcgttattctgatggcttgcatcaagcgattgaagcaaaagaaggcgtcgaaattgaagatgaaacaaaaacaatggcgacgattacgttccaaaactacttccggatgtacaaaaaactagccgggatgactggtactgctaaaacagaagaagaagaattccgtgaaatttacaatattcaagtcattcaaattccaaccaatcgtccaattatccgtgacgatcgtccagatttactttatccaaccttagaaagtaaatttaatgcagtggtggaagatattaaagaacgttaccacaaaggacaaccagtgttggtggggactgttgcggtagaaacgtcagaattactttctgataaattaaacgcagctaaaattcctcatgaagtattaaatgcgaaaaatcactttaaagaagccgaaatcattatgaatgccggtcaaaaaggcgcagttacaattgcaacaaatatggctggtcgtggaacggatattaaacttggtttaggtgtacttgaactaggtggtctagcggttatcgggacagaacgtcatgagtcacgtcgtattgataatcagttgcgtggacgtgcaggacgtcaaggggatccaggggtttcacaattttatttatctttagaagatgacttaatgaaacgctttggttcagaacgaattaaaacattcttagaacgaatgaatgtgcaagaagaagatgcagttattcaaagtaaaatgtttactcgccaagtagagtctgctcaaaaacgtgtggaaggaaataactatgacacacgtaaaaatgtcttacaatacgatgacgtgatgcgcgagcaacgtgaagttatttatgcgcaacgacaagaagtaattatggaagaaaatgacttgtctgatgtattgatgggcatggtaaaacggacgattggccgagtggtggatagccatacacaattagaaaaagaagaatggaatttagatgggattgtcgattttgcagcctcaacacttgtccatgaagatacgatttctaaaaaagatttagaaaataaatcagctgaagaaatcaaagactacttagtggcacgtgcgcaagaagtatttgaagaaaaatctcaacaattgaatggccaagaacaattgctagaatttgaaaaagtagtcatcttgcgtgttgtcgatactaaatggacagatcacattgatgcaatggatcaattacgccaatctgtcggcttacgtgcgtacggtcaaaacaacccattagtagaatatcaaacagaaggttattctatgtataacaatatggtgggttcaatcgaatatgaagtaacacgtttattcatgaaatcggaaattcgccaaaatgtccaacgtgagcaagtagctcaaggacaagcggaacatccagaaacagaacaagatgcagctgcacaaagcaacacaagtgcgaagcgtcaacctgtgcgtgtagataaaaaagtgggccgtaatgatttatgcccatgcggaagtggcaaaaaattcaaaaattgtcatggaagaaacgct

SEQ ID NO: 3918 - DNA, 1755 bp, Enterococcus faecalis
atggcttatcaagcactttatcgggtctggcgttcacaacgtttcgatgacgtagtaggacaaaaagcaattactcagacactgaaaaatgcgatagtgcaaaagaaaacatctcatgcctatttatttactggccctcgtggtacaggtaaaaccagtgccgcaaaaattttcgctaaagcgattaactgtaaacatagtcaagatggtgaaccttgtaatgtttgtgaaacctgtgtagccattacggaaggtcgtttaaatgatgtcattgaaattgatgcggcgagtaataatggcgtggaagaaatccgtgatattcgtgataaagcaaagtatgcaccgacacaagccgagtacaaagtttatattattgatgaagttcatatgctatcaacaggcgcgttcaatgcacttttaaaaaccttggaagaaccgccacaaaatgttatttttatcttagcaacgactgaaccacacaagattccgttaacgattatctcacggacgcaacgctttgattttaagcgaattagtacgcaagatatcgtcgatcatatggcccatatcatgcaggaaatggctctcgattatgaggaacaagccctttatgtgattgggcgtgctgcggaaggtgggatgcgagatgccttgagtatcttggatcaaacgatttcatttagtgatgaaaaagtaacactggaagatgcaatgcaagtgacaggcagcctaacctatgaaatgatggatcattatattcagtgttgtgtcgccggtgatgttgaacgagcattagaaggtttggaaagtattttaggcgaaggcaaagaagcgcgccgtttcttagaagatttgttattatattgtcgagatttactgatgtatcagcaagcaccgaagttattagcagaaaaagcaggaactttgacagaagcatttaaggaactagctacacaaacacctgctgaaaaaatctaccaactaatccaaattttaagtgacacacaaaatgagatccgctttaccaacaatgcgaatatctatctggaagtagccactgtcaaattggctaaaacggtgcaacccaataaacacaacacgccagaaacagctaatcaagatggtagtgcagagggaaatccagaattagcagatttacaaaatcaaatcgggcaactgaagaaagaactggctgaattaaagaaacacggtgtagctgccaaagaagcagatgcgccacgtcaacaagcacgaccacaagcgccaaaaagttcgttccgtgtacccacagaacgcgtatatcaagtcctaaacgaagcgactagaacacatttaatgaatgtgaaaaatgtctgggaagacttactgcaaacattatctgtgactcaacgagcgatgctcaaagctagtgaacctgtcgcagcgagtcctaagggcatcgtggtggcatttgactatgagattgtttgtgctcgtgcaacagacgatgaagagatgcagttagctttcaataataatttaagccgtttgatggactatacaccagagatggtctgcattactagagaaagctggccaaaactaagacaaagttttattaaccaaaatcagggcagtttgaatcattctgaacctgaaaatgaaatggctcgtctagcggacgaaccgcctgtaacaaatgaacattcacaagaaaatccagtagtagatgaagcaatcgctatgtttggtgaagagcttgtcgaagtactagat

SEQ ID NO: 3919 - DNA, 267 bp, Enterococcus faecalis
atggcaatttcacaagaaagaaaaaacgaaatcattaaagaatacgcacgtcatgaaggagatactggttctccagaagtacaaattgctgtcttaactgaagacattaaccaattgaacgaacatgcgcgtacacacaaaaaagatcaccattcttaccgtggtttaatgaaaaaaatcggtcaccgtcgtaacttgttagcttacttacgtaaaactgacatccaacgttaccgcgaattgatccaacgtttaggattacgtcgt

SEQ ID NO: 3920 - DNA, 2106 bp, Enterococcus faecalis
gaaaaacaagtctttaaaacaacttggggcggccgcccactagaagtagaaatcggccaattagccaaacaagccaatggagctgtcttagtacgttacggcgatacggtcgttttaagtgctgctgttgcctctaaagaagcaaaagatgtagactttttcccattaactgtaaactatgaagaaaaaatgtatgcggtaggaaaaattcctggcggcttcattaaacgtgaaggtcgtccaagtgaacgtgcgacattaaccgctcgtttaatcgaccgtcctattcgtccaatgttctcagaaggcttccgtaacgaagttcaaattacgaacatcgttatgagtgtggagcaagactgtacaccagaaatggctgcaatgtttgggtcttccttagcgttagcaatttcagatattccgtttgatggaccaattgctggtgttgacgttggccgtattaatggcgaatatgttttaaatccaacggtagaacaagcggaacaaacagatattgaattaactgttgctggaacaaaagaagccatcaacatggttgaaagtggtgccaaagaagtatcagaagaagatatgttaggtgccttacttttcggttttgatgccattaaagaactagtggcgttccaagaagaaatcgttgccgctgtaggtaaaccaaaaatggacgtggacttattacaagtggacgctgatcttaaaaaagaaatttttgatgcgtactacaatacaatgaaaacagccgtaatgacggaagaaaaattagcacgtgaagttgaaattgacaaagtaaaagatacagtcaaagaagtttacgctgaaaaatttgcggaacacgaagaagaagcgcaattactaaaagaagtgaaacaaattgcggaagatcttgaaaaagatgtcgtacgtgagttaatcacgatcgataagattcgcccggatggccgtaaattagacgaaattcgtcatttatcatcagaagtaagtattttaccacgtgtgcatggttctggcttatttactcggggtcaaacacaagctttatccgtttgtacattagcgcctttaggggaacatcaaattatcgatgggttgggtgtccaagatagcaaacgtttcatccatcattataacttcccacaattctctgttggttcaacaggacgcgcgggctcaccaggtcgtcgtgaaatcggtcacggtgcgttaggtgaacgtgccttagcacaaattattccatcagaagaagacttcccttacacaatccgcttagtagcagaagtgttagaatcaaatggttcttcttcacaagcaagtatttgcgcgggaacattagcattaatggatgcgggtgtgccaattaaagcgccagttgcaggtattgcaatgggtcttgttagtgatggcgaaaactatacaatcttaacagatattcaaggtttagaagaccaccttggcgatatggactttaaagtagcgggaacgaaagacggaatcactgctttacaaatggacatcaaaatccaaggaattacagaacaaattttaacggaagcattagaccaagcgaagaaagcacggatggaaattctagaagaattaacaacaacgattgctgctcctcgtgaagaattaagtcaatatgcaccgaaaattgaaatgattcaaattaaaccagcgaaaattaaagatgtcattggtaaaggtggcgaaacaatcaacagcattattgatgaaaccggcgttaagattgatatcgatcaagacggtaacgtaagtattgcttcatcagatgctgaaatgattaaaaaagccatcaagattattgaagaattaaccaaagaagttgaagtcggtcaagtttacttagcaaaagttgtccgcattgaaaaatttggtgcgtttgttaacctaattaaaggcaaagatggcttgatccatatttctcaattagcaaacgaacgtgtgaacaacgttgaagatgtcgtgaaattaggcgacgaagtccttgtcaaagtaactgaaattgacaaacaaggccgtgtcaacgtgtcaagaaaagcattattaaacgaagaaaacaaagaaaaa

SEQ ID NO: 3921 - DNA, 216 bp, Enterococcus faecalis
ttgactgcgagacctacaagtcgagcagggacgaaagtcgggcttagtgatccggtggttccgcatggaagggccatcgctcaacggataaaagctaccctggggataacaggcttatctcccccaagagtccacatcgacggggaggtttggcacctcgatgtcggctcgtcgcatcctggggctgtagtcggtcccaagggttgggctgttcgc

SEQ ID NO: 3922 - DNA, 2073 bp, Enterococcus faecalis
atggcaagagaattttcacttgaaaaaactcgtaacattggtatcatggcccacgttgatgctggtaaaacaacaacaactgagcgtatcttgtactacactggtaaaatccataaaatcggcgaaacccatgaaggtgcttcacaaatggactggatggaacaagaacaagaacgtggtatcacgattacatccgctgcgacaactgcacagtggaaaggctaccgtgtaaatatcatcgatactccaggacacgtggacttcacaattgaagtacaacgttctctacgcgtattagatggtgcggtaacagttcttgactctcaatcaggtgtagaacctcaaacagaaactgtttggcgtcaagcgactgaatataaagttcctcgtattgtattctgtaacaaaatggataaaatcggtgcggacttcttctattcagtagaatcattacatgatcgtttacaagcaaacgctcatccaattcaaattccaatcggagctgaagaagacttcactggaatcattgacttgattaaaatgaaagctgaaatctacacaaatgatttgggaacagatattcaagaaactgatattcctgaagattatttagaaaaagcgcaagaatggcgcgaaaaattagttgaagctgttgctgaaactgacgaagacttaatgatgaaatatcttgaaggtgaagaaatcactgaagaagaattagtcgctggtatccgtcaagcaacaatcaacgttgagttcttccctgtattagctggttcagcattcaagaataaaggggttcaattaatgttggacgctgttcttgattacttaccatctccattagatatcgatgctatcaaagggatcgatactaaaacagacgaagaaacaactcgtccagctgatgacgaagcacctttcgcttcattagcatttaaagttatgactgacccattcgtaggtcgtttaactttcttccgtgtttattctggtgttcttgaaagtggttcatacgtattgaacgcttcaaaaggcaaaaaagaacgtatcggtcgtatcctacaaatgcacgccaacactcgtcaagaaattgacaaagtgtactctggtgatatcgctgctgctgttggtctaaaagacacaacaactggtgatacattatgtgcattagatgcaccagttattcttgaatctattgaattccctgatccagttatccaagtcgctgttgaacctaaatcaaaagctgaccaagataaaatgggcgtggctctacaaaaacttgctgaagaagatccatcattccgcgttgaaacaaacgttgaaactggtgaaacagttatctctggtatgggtgaattgcacttagacgttttagtagaccgtatgaaacgtgaattcaaagttgaagctaacgtaggtgctcctcaagtatcttaccgcgaaacattccgtgctgcgactaaagcagaaggtaaattcgttcgtcagtctggtggtaaaggacaatacggtcacgtatgggttgaatttacaccaaatgaagaagttaaaggctttgagtttgaaaacgcaattgtcggtggtgtggttcctcgtgaatacatcccagcagttgaaaaagggttagaagactctatgaacaacggtgttcttgctggttatccattagttgatatcaaagcaaaactttacgatggttcataccacgatgtcgattcaaatgaaacggccttccgtgtagctgcttctatggcattgaaagctgcggctaaaaatgcaaacccagttattttagaaccaatgatgaaagttacaattactgttcctgaagattacttaggtgatatcatgggacacgtaacaagtcgtcgtggacgtgttgaaggtatggaagcacacggtaactctcaaatcgttaatgcgatggtacctttagctgaaatgtttggttatgctacaacattacgttcagcaacacaaggacgcggtacatttatgatggtatttgaccactatgaagacgtacctaagtctgttcaagaagaaatcatcaagaaaaacggcggc

SEQ ID NO: 3923 - DNA, 1608 bp, Enterococcus faecalis
ttggaaaatcctaaatctgttgatcatggagatgtggcttttccagccttttcattagctaaaatttatcgtaaagcaccacaacagattgcagcagaattagcagaaaaaattgatggcacaaattttgaaaaaattgaagtggtgggaccttatttaaacttcttcatgaataaagaagcagtcagtcaagctgttattggcgcagtagtcaaagaaaaaaacaactacggaaacagtacctttggcaataatggcaatgttcctattgatatgtcttcaccaaacattgctaaaccaatttctatggggcacttacgttctacggtaatcgggaattcaattgcctttattttagaaaaaattgggtatcagccaattcggattaaccacttaggtgactggggtacacagtttggtaagttaattgtagcttataaaaaatggggttctgaagaagcagtccgccaacaaccaattaatgaattattgcgcttatatgtgcaatttcatgaagaagcagaagaaaaaccagaattagaagacgaagcacgtgcatggtttaaaaaattagaagaaggagaccaagaagctaatgaattatggaaatggttccgtagcgagtctctaaaagaatttgataaaatctattccatgttagaagttgaatttgattcttataatggcgaagccttttataatgataaaatggatgaaattgttactttattagaagaaaaacatttattaacagaaaatcaaggtgcagaaattgttgatttgacagaatataatttaaatccagcacttattcgtaaatcagatggtgcgacgttatatatcacacgggatttagctgctgcgctttaccgtaaacggacgtatgattttgccaaatcactttatgtagtcggcaacgaacaaagcaatcacttcaaacaattaaaagcagtcttgaaagaactaggatttgaatggtcagatgatatggaacacattccgtttggtttaattactcaaggcggtaaaaaattatccacacgtaaagggaaaatcgttttattagaagaagtattgaatgaagctgttactttagcaggaaatcaaattaacgagaaaaacccagacttagcaaatcgtgaagaagtggcgaaacaagtaggtgtaggtgcagttattttccatgaccttaaaaatgatcgtctaaataatttcgattttgtattagatgaagttgttcgttttgaaggcgaaactgggccatatgttcaatatacacatgctcgtgcgatgagtattttacgtaaagcaaactttacaccagacgctacacaacgttatgcactaaatgacaaggatagctgggaagtcgtgaagttgttacaaaaattccctgaaactgtgatgcaagctgctgaaaaatatgaaccatctgttattgcgaaacatagcattcatttagcacaagcgttcaataaatattatgcccatgttcggattttggatgaagatgctcaaaaagaggcacgcttagcgttagtttatgcagttgctactgttttaaaagaagatttacgtttactagggttacatgcaccagaagaaatg

SEQ ID NO: 3924 - DNA, 1947 bp, Enterococcus faecalis
atgacagaagaagaaaaaaacatgagagaacgtgcgcaagaatatgacgctagtcagattcaagttttggagggcttagaagctgtccggaaacgtcctggtatgtacataggttctactagtggcgaagggttacaccacttagtatgggaaatcgttgacaactctatcgacgaagccttagcaggatttgctaaatcaattcaagtaattatcgaaccagacgatagtattactgttatcgatgatggtcgtggaattccagtcgggattcaagccaaaacaggtcgcccagctgtggaaacagtgtttacagtgctacatgccggcgggaaatttggcggtggcggctataaagtatcaggtggcttgcacggtgttggttcctctgttgttaatgctttatcgactagtttagatgttcgtgtttataaagatggcaaagtgtattaccaagaatatcgtcgtggtgcggttgttgatgatctaaaagttatcgaagaaacggatcgtcacggaactactgttcactttattccagatcctgaaatttttacagaaacaaccgtttatgattttgataaattagcaacacgggttcgtgaattagcctttttaaatcgaggcttacacatttcaattgaagaccgtcgtgaaggacaagaagataaaaaagagtatcactatgaaggcgggattaagagttatgttgagcatttaaatgccaataaagacgttattttcccagagccaatcttcattgaaggagagcaacaagatattacagtggaagtgtcaatgcagtatacagatggctaccactcaaatattttaagttttgccaacaatattcatacttatgaaggcggaacgcatgaatctggttttaaaacttctttaacacgtgtgattaatgactatgcacgtaaacaaaaattgatgaaagaaaacgatgaaaaattaactggggaagatgttcgtgaaggtttaactgcagtggtttccatcaaacatccagatcctcaatttgaaggacaaaccaaaacgaaattagggaactcagaagtacggaccgttacggatcgtttattctcagaatactttacaaaattcttaatggaaaatccaacagtcggcaaacaaattgtcgaaaaaggcatgttggcttcaaaagctcgtttagccgctaaaagagctcgtgaagtcacccgtcgtaaaggcgcgttagaaattagcaacttgccagggaagctggctgattgctcaagtaaagatccggaaaaatgcgaattatttatcgtcgaaggagactcggccggcggttcagcaaaacaaggccgtagccgtgaattccaagccattttaccaattcgtgggaaaatcttgaatgttgagaaagccagcatggataaaattttagccaatgaagaaattcggtcattatttacagctatgggaacaggcttcggcgaagatttcgatgtttctaaagcacgttatcacaaactagtgattatgaccgatgccgatgtcgatggtgcgcatattcgaacgttgttattaaccttgttctatcgcttcatgcggccaattgttgaagctggttatgtgtatattgcccaaccaccactatatggtgtgaaacaagggaaaaacatcacctacgttcaaccgggcaaacatgctgaagaggaactagcaaaagtgttagaagaattacctgcttcaccaaaaccaagtgttcaacgttacaaagggttgggtgaaatggatgatcaccaactttgggaaacaacaatggacccagaaaaacgattaatggcgcgagtgagtgtcgatgatgccattgaagctgaccaaatttttgaaatgctaatgggcgatcgtgtggaaccacgtcgtgcgtttatcgaagaaaatgcccattacgtgaaaaacttggatatt

SEQ ID NO: 3925 - DNA, 282 bp, Enterococcus faecalis
aagtacgaaatcatgtacattattcgtccgaacattgatgaagaagcaaaaactgctttagtagaacgtttcgacacaatcttaaaagataacggagcagaagttatcgaatctaaagattgggaaaaacgccgcttagcatatgaaatgaacggattccgtgaaggcatctatcatatcgttaatgttacttctccatcaacagctggcgcaatcaacgagtttgatcgtttagcaaaaatcaatgacgatattatccgtcatatgatcgtgaaggtagaa

SEQ ID NO: 3926 - DNA, 564 bp, Enterococcus faecalis
atgattaataacgttgtattagtcggaagattgacaaaagatcctgacttacgttacaccgctagtggttcagctgttgcgacctttacacttgctgtaaaccgtaactttacgaatcaaaatggtgaccgtgaagcagactttatcaactgtgtgatttggcgtaaacccgcagaaacaatggctaattatgcccgtaaaggtacattattaggtgttgtcggaagaattcaaactcgtaactacgagaaccaacaaggtcaacgtgtctacgtaactgaagtggtttgtgaaaacttccaattgttagaatctcgttctgcttcagaacaaagaggaactggcggcggtagctttaataacaacgaaaatggttatcaatcacaaaatcgtagctttggtaataacaatgccggttctggatttaataacaacaacaatagtttcaatccatcatcttctcagtcgcaaaacaataacggtatgcctgatttcgataaagattctgatccatttggtggctcaggttcatctatcgacatttcagatgatgatttaccattc

SEQ ID NO: 3927 - DNA, 2418 bp, Enterococcus faecalis
atgagctacaatcacaaagagattgagaaaaaatggcaaaaatattgggctaagaacaattgtttcaatacattggacgacccaaataaagaaaaattttatgcactagatatgtttccctatccatctggacaaggcttacacgtaggtcacccggaaggctatacagcaaccgatattctttcacgtatgaaacgtgcgcaaggctataatgtgttgcatccaatgggctgggatgcgtttggtttgccagcagagcaatatgcgttagatacaggaaatgacccagctgaatttactaagaaaaatatcgaaacattccgtcgccaaattaattcactaggattcagctatgattggaatcgcgaaattaataccactgatcctgaatattacaaatggacacaatggatatttacaaaattatatgaaaaagggttagcttatgaagcagaagttgcggttaactgggtacctgaactaggaactgttatttcaaatgaagaagtcattgatggaaaaagtgaacgtggcggttatgatgtggttcgccgaccaatgcgtcaatggatgctgaaaattactgcttatgcagatcgcttattagaagatttagagcttgttgattggccagaaagtattaaagatatgcaacgaaattggattggacgttctgaaggagccaatgtgacctttaaagtcgctggtacagaagaaagtttcacggtgtttacaacccgtcctgataccttgttcggtgcaacctatactgttctagctcctgaactagaactagtgaaaaaaattacgacacctgaacaaacagcagctgtagaagcatatattgaagaaacctcaaaaaaatctgatttaaatagaacggatttagcaaaagaaaaaacaggtgttttcacaggtgcgtatgctataaatccagtcaatggccaagaaattccaatttggattggcgattatgttttagcaagctatggcacaggcgcaatcatggcggtcccagcgcatgatgaacgggattacgaatttgcgaaaacatttggcattgatatcctaccagtaatcgcaggtggcgacattacaacagaagcctatacaggggatggaccgcatatcaattctgatttcttaaatggattaaacaaagcagaagccatcgctaaaatgaatgagtggctagaagaaaatcacgtagggaaaaaagaagtatcctatcgtttacgtgactggttattctctcgtcaacgctactggggtgaaccaattcctgtgatccattgggaagatggaacaaccacaacggttcctgaatctgagttacctctacgtttaccagtaacatcggatattcgcccaagtggaactggggaatcgccattagcaaacattgatgaatgggtcaatgtcgtcgaccctgaaactggcatgaagggaaaacgtgaaacgaatactatgccacaatgggctggaagctcttggtattacttacgattcattgatcctcataataaaaatgaaattgctgattttgaaaaattaaaacgttggttaccagttgatatctatattggtggtgccgaacatgcggtgttgcatttactttatgctcgtttttggcataaattcttatatgatattggtgtggttcctaccaaagaacctttccaaaaattatacaaccaaggtatgattttaggagaaaacaacgaaaaaatgtctaaatcacgtggcaatgttgtaaatcccgatgatgtggtggctaaatatggtgcggatacattacgtctttatgaaatgttcatgggcccattagatgcttccattgcttggaatgaaaatggcttagaaggaagtcgtaaattcttagatcgcgtttggcgtctgattgttgatgaagaaggcaaaatgcgtgaccgaattaccacaattaatgatggccgtttaacgaaagtttatcatcaaacggttaaaaaagtgacagaagatatggcaaacttgcactttaatacagcgatttctcaattaatggtttttgtgaatgaagccaataaagtggatgccttaccttatgaatatgtggaaggatttgtccaattacttgcgccaatcgcgccacatattggtgaagaactatggcaaattttaggtaacgaggaaagtttaacttatgtcccttggccaacctatgatgaagcagccttagtagaagatgaagtggaagtagttttccaagtgaacggaaaattacgtggcaaacaaaatgtcgctcgtgggttaatcaaagaagaattagaacaaattgcaatgaaccatgaagctgttaaagaatttattgaaggaaaaacagtgcgcaaagtgattgctgttccagataaattagtaaatattgttgcaaattaagtt

SEQ ID NO: 3928 - DNA, 579 bp, Enterococcus faecalis
ggtagttgttttcttttagtatttatgtttttaggctacgttgttcgtttttatccaacctggctcaaaggctttgatcaaacgattacttcttttgttcgtcgtccttttccacagctaaataacttttttatttggtacaccaaatttgccaattcattgacgattatcatcttagcaatcgttgtcattgctctgtttattgtttggaaatattatgctgaagcattatggctctttattaatactgccttaattgctggcgtaggtaattctttattaaaattattctttatgcgccaacgtcctactttggagcatttagtaactgaacatacgtatagttttcctagcggacatgctgtaggaagtaccttgttctacggcactattttattgattctgccaattttcattaaaaataaaacggtccgcctttgtgtgcaaattttactaggtattgggattttcatgattggggttagtcgaatctatttaggtgtccatttccctagcgatatcttaggtggtttttgtcttggtttagcttggttgttattaagttaccctatttattta

SEQ ID NO: 3929 - DNA, 1608 bp, Enterococcus faecalis
atgacaaaatacatctttgttacaggtggcgtggtttcttctatcggaaaagggattgtcgcagcatctttaggacgattattaaaaaatcgtggattaaaagtaacgattcaaaaattcgatccatatattaatgtggatccggggacaatgagtccttaccaacatggagaggtttttgtcacagatgatggtgccgaaacagatttggacttaggtcactatgaacgttttattgatattaacttaaataaatactcaaacgtaaccactggaaaaatttattcagaagttttacgtaaagaacgtaaaggggaatacttaggtgcaacagtgcaagttattccacacattaccaatgaaatcaaagaaaaaattatgcgtgcagcgaaaatgacggatgccgatgtgattatcacagaagtaggtggtactgtcggcgacatcgaatcattacctttcctagaagcattgcgtcaaatgaaagctgatatgggtagtgacaacgtaatgtacatccatacaaccttgattccttacttaaaagcggctggtgaaatgaaaactaaaccaacacaacatagtgtcaaagaattaagaagtttagggattcaaccaaatattttagtggtccgtacagaattacctgtttctcaaaacactaaaaacaaattagcacaattctgtgatgttaatccggaagcggtaattgaatctcgtgatgttgaaacattgtactccattccattagcacttcaagcacaaaacatggatcaaattgtttgtgatcatttaaaattggatgcaccggctgcagacatgactgagtggcgtgcattagaagaaaaagttcttaacttgaaaaagaaaacaaaaattgcgctggttggtaaatatgttgaattaccagatgcctatatttctgttgtagaagcattaaaacatgctgggtttgattttgattcagatatcgaaattgattgggttgattcacaagaattaactgctgaaaatgtcgctgaaagaattggttcagcagatggtattttggttcctggtggttttggtgatcgtggaattgaaggaaaaattgaagcgattcgttttgctcgcgaaaatgacgtaccattccttggtatttgtttaggtatgcaaatggcctgtgtagaatttggtcgtaacgttgtgggcttagaagatgctggttctgcagaaactaatcctgacgtgacaaataacattattgatttaatggcagatcaagaaaacatcgagaatttaggtggcacactacgtttaggtttatatccatgtaaattgaaaaaaggaacgaaaactgcggcagcatacggaaatgaagatgttgtccaagaacgtcaccgtcatcgttatgaatttaacaacaaatatcgtcaattatttgaagaaaatggcttagttttctctggagtttcaccagataatcgtttagttgagattgttgaaattcctgaaaaacaattctttgtggcttgtcaattccacccagaattaatttctcgtccaaatcgcccacaacgcttaatcaaaggatttgttggtgcagctttggcaaataaagaaagtaaa

SEQ ID NO: 3930 - DNA, 294 bp, Enterococcus faecalis
agtcctaaagacattttacaaaaagaatttaaaacgaaaatgatgaacgggtatgacccaattgaagtagacgaatttttagacaatgttattaaagactacgaagcttataataaagaattattaagcttgcaagaagaaaacagccgcttaatggcaaaattagaccaattatcaaaagcccaaccaacgcctcgtgttgctcaagaagtaccaaaaagtgcagcagtgaccaactttgatattttaaaacgtttatcaaacttagagcgtgaagtttttggtaaaaagtta

SEQ ID NO: 3931 - DNA, 1323 bp, Enterococcus faecalis
aaaaaagttattttgtatacttgttgcatgagtttgtttgtagtgaccatggatgttacggttgtcaatgtggcgttaccatccattcaaagtgattttcacacgaatctgtctacattacagtgggtaacagatggctacactttaatggtagcatccttattattgttatctgggtctacagcagaccgaattggccgtaaacgagtccttcaattgggcttagcctgttttggtttagcgtctttcctatgtgggatttcgcaaaccccagggcaattgatcgcgtttcgcatgttgcaagggattggtggttctatgttaaatccggtagcaatgtctattattacacaggtatttaccgaaaagttagaacgtgcgaaagcaattggcttgtggggctctgttacagggatttccttaggaatgggcccgattattggcggactaattgtttcttattttagctggcggtatgtcttttttgtaaatgtaccgatcattgcagcggcaatcatccttacacaaaaatttgtacctgagtcaaaagtagagaagacggcgaaaaatgattttgttggtcaagcattgatgattctttttctatttagttctatctattccattatcggactacctagaaaagggcttttcgcgccagatattttaagtactgggataatcggctgtttagccattgtcattttctttatttatgaatataacattgacaatccgttaatcaacccgcgtttctttttatctattccatttacatcggcttcttttttagctatttttggctttatcatatataacggctatttatttttaaacacgctatatttgcaagagatgagaggcttcagcccgttggaagctggcttatcaaccattcctttggcttttgttagttttcttgttgcaccgagagccggcgaaatggtagggagaatagggacgaaacgtcctattatgctttgtggtatttcaatgttggctgttagctttttacaattatttgtaactaaaacaacgcctatgattattttatttattatttatatctttttaggcattgggtttgggatgttaaattcaccgattaccattacagcgattgaaggaatgccactttctcagtcaggaacggcagcagccattgcggtgacatgtaagcaaattggcaattctttaggggtggcgctaccaagtcttttaattacaaagcctattactagttcgcttactcgaacaccttttacaaacgtatggcttttatttggatgttgcgccattgcgattatctttttaagttattta

SEQ ID NO: 3932 - DNA, 1302 bp, Enterococcus faecalis
tatttaacagtaacagccttaacgaagtatttaaaacgtaaatttgatgcagacccttacttaggacgtgtctatttaacaggtgaaatttcgaactttcgcttccgagcgaacgcgcatcagtacttcagtttaaaagatgaccatgcgaagatttctgcaattatgtttaaatcagcctttcaaaaattgaagtttcaaccaaaagaaggcatgaaagtcatggtggtggggcggatttcgctttatgaaaacagcggctcctatcaaatttatattgaacatatggaaccagatggtgtaggtgcactttatcaagcattggcagaattaagagaaaaactaggaaaagaaggactttttgaagggcctaaacaacagttgcctcgttatcccaaacgaatcgctgtggttacaagtcctagtggtgctgttattcgggatatcattacgacagttaaaagacggtatccgattgcacaactggtcctttttccaaccttggtccaaggcgagcaggcggcggatgacattgtgcggaacattcagcgagccgatgcgcaaggcgattttgatacgatgatcatcggccgtggcggtggttcaatcgaggatttatggccatttaatgaagaaaaagtggctcgagccattcatgctgccaccacaccgattatttcatcggttggtcacgaaacagatgtgacaattgccgatatggtagcagatgttcgcgcagcaacgccaacggcagcagcggaactagcggtaccagttttaaatgaagaactattaagaattagtgaacggcgtagtcgtttagaacaaagctttttatatctcttacaacaacgaacagaacgtttccaacgactacaaaactcttatgtgtttaagcaacctgagcgactttatgaaggtcaaacgattaaattagatcgaatgacgcaacgtcttttccaagcaatgacaacaattcatcaccaaaaacaacgtcaagcccaaggaattatcgctcaattgcaacaacagacaccaaagggacaattaagagaaagtcagcaacaattggcatttttacaacgaaacttgcaaacacaaatgacacaattgttcctaaacaaacaaaagcaattcacgtctgctgttcaacaattagacttactcagcccactcaaaattatgggtcgaggatatagttatactacaaaagaggaccgtgtcgttaaaactgttaccgagttacagccagcagatcaattaacgattcattatgctgacggtacagttcaagcaaacgtc

SEQ ID NO: 3933 - DNA, 405 bp, Enterococcus faecalis
atggctgaattgaagaaagtaaatgatttccattatgaagcaccagaaatggatcagccaactgtggcaacagagcaagacagaaaaatgcaagaggaaacactacctgtccccactctattacccaaaaagaaactaaaaaatgtctctttgctagaaaaattaatcggtgttgtattagtttgtgcaacgattggtattgcaattgcgacaattcaagtaagaacgacaattgtccaaaccatgaacgatattacagaaacacaagcagtcattaaagaaaaggaagataacgctttgaaattggaacaagaaagaagcgaactttctaaatcagatcgaatcaaagatgtcgctaaaaaacaaggactagaaaataacggcgacaatgttaggactgttaaa

SEQ ID NO: 3934 - DNA, 2226 bp, Enterococcus faecalis
atgagtaaaagacataaatttaaacaattcatgaaaaagaaaaacttaaatccgatgaacaatcgtaaaaaagtaggcatcattttattcgctacgagtattggattgttctttttatttgcctttagaacgacatacattgtggcaacaggcaaagtagccggtgtatcactaaaggaaaaaacagcttctttatatgaaggaagccaagtggtaaaagctaagcgaggatcaattttagatcgatatggtaatccaatcgcagaagatgctacttcttattcgttatatgtcgtattatcaaaaaaatatacgggacaaaataatgaaaagctatatgcggagaaaaaagacttcgatgatattgctgaaattttagcgaaatataccaaactagacaaaaaaacagcattgaaatacttgaataatgggatccatgaagatgggtcaacacaatatcaagtggaatttggtacgggtggtcaaaacatcaccttggaaacacgccaaaaaattgaagcagatttgaaaaagaaaaaaatttcaggtgtttatttcaatgaacatccagccagattatatcccaatggtcagtttgcttctcactttattggctatacaaaagcagccaatccagatgatgataaagaaggcttagtaggcgcaatgggactagaacagacctataatgatattttaagtggaaccgatggccgtgtgtattttgaaaaagatatttatggcaatgccttaccaggaactgtggcggaagagaaaaaagcagtggatggtcaagatatttacacgacgctagatagtcgcttgcaaaataccttagaagatttaatgacgcaagttaatgaaaaatatgaaccagtttctatgactgccatgttaatggaagcaaaaacaggcgaaattgttgccatgtctcaacggccaacatttaatcctgaaacgaaacaagggttagacgataatggcacgtggcagaacctattagttgaaagtccttatgaaccaggctcaacaatcaaattatttacaacagctgcttctatggaacaaggacagtttaatcctaatgaattattcaatcgtgttggtggaattcaggttggggatgtaactgtgaatgaccatgactacactcggttgaacggcaaagaatatttgaattatcgtcaagccatttcttggtctagtaatattggtatggtaaaactagaacaaaaaatgggtgatgaaaaatggatggagtatttgaaaaaatttggttttggtacgagcacgcattcaggtttaagtggtgaatctgctggtaaattgccaggaacaaactttgtagatagagcaatgtcggcatttggtcaagcaattacggttactaatttccaaatgatgaaaggtttctcagctattgcaaatgacggttcaatgttgcaacctcattacatcagcaaaattgttgacaaaaatacaggaaaagaaacgattacggaaccacaaatcgtaggaaccccaatcaaagcgcaaacagctcaacagattcgtacgtacatgattgatactgttgaagacccgacttacgggattgcgtatgatatttataaagtgccaggctatcatgttgctgccaaaacaggaactgcccagatttcagatggtaaagggtacgttgatggagcaagtcaagtcttgtcttctgtagtggaaatggtcccagcggataatcctgaatatgttttgtatattacgcttagacaagcaaaaacaggttcgccttcagaagcaatggcggcaattgcaaacccattaatgaaattagcgttagacattaaagagacagatccggaaacaacgaaagtagcttctgataaagtcacagttgctgattataaaaacatgacaccagcggaagcgttggccaatgccaaagtgaacggggtggatcctgtgattatcggtgatggtgaaaaaatcaagaaacaatcaacgccggctggtcaaacattaatgcctaatcagaaattgattttgatcacaaatggaacgaactatatgcctgatttaaccggctggtcgaagagcgatgttaccaagtttggcgatctattaggtttgactgtcgagtttaaaggtgaaggctatgtgacgaaacaaagtatcgctgctgaaactgaaattacggagaaaaaattaaccgtgactttagaaggcacagaa

SEQ ID NO: 3935 - DNA, 963 bp, Enterococcus faecalis
atggagtggacacagatttttattcccatagtggtgagttttgccattacagtgagcgtaatgccactattcattggctattttcaaatgaaaaaacaagggcaggttactcgtgaagatggcccgacttggcatagcgtgaaaacaggtacccctacaatggggggagtcgttttccttgtagccagcttgattacttcattagcaatggggttgtttttccaccaatttacgccgtctctactaattattctatttattttagtattatacggtttgctaggttatttagatgatttcattaaagtctttaaaaaacggaacatgggcttgaattctcgtcaaaaattaattggtcaaatttttggtgggttggttttctactttgtttatcgaagtgaaggcttttcagacaccttagatttgtttggagtagcagaagttccgttaggtattttttatggcgtgtttattattttttggttagtcggtttttctaatgccgtgaatttgacagatgggattgatggtttagttgctggtttaggaacaatttcatttggtacttatgcaattattgcctggaaacaacaacaatttgatgttgtgattatctgcctaagtgtgattggtgggctgattggctttttcccttataatagaaaaccagcaaaaattttcatgggtgatgttggttcattagcattaggtggattgttagcagcaatttcaattattttgcatcaagaatggacgctacttttaattggacttgtctacgtttgtgaaacagcaagtgttattttacaagttgcttcatttaaattatttggtcgacggatttttaaaatgtcaccaattcatcaccattttgaaatgtgtggttggtctgaatggaaaattgattttgtcttttggtctgtcggtttaatctgttcaggaatcacattatggattcttttc

SEQ ID NO: 3936 - DNA, 1368 bp, Enterococcus faecalis
atgaaaaaaataacaacctatcaaaacaaaaaagtgttggttttaggactagctaaaagtggtgtcagcgcagcgaaactcttacatgagttaggtgcgctcgttaccgttaatgacgcaaaacaatttgatcaaaaccctgacgcccaagatttattaaccttgggtattcgtgttgttacaggggggcatccaattgaattgttggatgaagaatttgaactaatcgttaaaaatcctggtattccttatacaaatccacttgtggcagaagcactaactcggaaaattcctatcataactgaggtggaattagcaggtcaaattgccgaatgtccaattgtcggcattacgggcaccaatggcaaaacaaccacgaccacgatgattggtttactgctaaacgctgacagaacggctggtgaggcacgtttggcgggaaatattggttttccagcgagtacggtggctcaagaagcaacggccaaggatgatcttgtgatggaactttctagttttcagttaatgggaattgagacgtttcacccacaaattgcagtaattacaaatatttttgaagcacacttggattatcatggttcgcggaaagaatatgttgctgcaaaatgggccattcaaaaaaacatgaccgtagaggacaccttgattttaaattggaatcaagtagagcttcaaacgttagccaaaaccacagctgccaacgtattgcctttttcaacgaaagaagcagtagaaggggcttatcttttagatgggaaattatattttaatgaagaatatattatgcccgccgatgagctagggattcctggtagtcacaatattgaaaatgcactcgcagcgatttgtgtagctaaattaaaaaatgtatcgaatgttcagattagacaaactttgaaaaacttttcgggcgttccccatcgaacgcaatttgttggcgaagttcagcaaagacgtttttataacgattcaaaagcaaccaatattttagctacagagatggcgttaagtgggtttgacaaccaaaagctacttttacttgcgggtggcttggaccgcggtaactcatttgatgaattggttcctgctctgctgggactcaaagcaattgttttatttggagaaaccaaagaaaaattggcggaagctgctaaaaaagcgaacattgaaacaattttatttgctgaaaatgttcaaacggcggttaccattgcctttgattattcggaaaaagatgatactattttactatcacctgcttgcgcaagttgggaccaatacccgaattttgaagtacgcggggaagcctttatgcaagctgttcaacaattaaaagaaagtgaaatg

SEQ ID NO: 3937 - DNA, 939 bp, Enterococcus faecalis
aaagaagaacaagtccaagaaaaatatgaaaaaggtttggaaaaaacacgtaagacatttggtcaacggttgaacgaattgtttgctaatttccggagcgttgatgaagatttctttgaagaattagaagaaacgttaattggtgcagacgtaggctttgatacatccttaaaaattacagaagccttgcgacaagaagtgaaactgcgaaatgtgaaaaaaccagctcaagttcaaaataccatcattgaaaaaatggttgatttgtatgaagaagcaggaattaatgaaaataatgcgattaacttacagccaaatggcttaaccgtgattttatttgttggtgttaatggagttggtaaaacaaccagcattggtaaattagcccatcaatacaagttggaaggaaagaaagttttaatggccgctgccgatacgttccgagcgggcgccatcgatcaattagttgtttggggtgaacgggctagcgttgaagttgtgcgtgggaatgctggcggcgacccagcagcggtcgttttcgatgcagtggaacgtgccaaagcagagcaggccgatgttttgctagtggatacagcaggtcggttacaaaataaagtcaacttaatgaaagaattagaaaaaatcaaacgagtcatccaacgagaaattccagatgcgcctcacgaagttctcttagtcgtggacgcaactactgggcaaaatgcgatgacacaagccaaacagttcaaagaaacaaccgatgtcactggcttagttttaaccaaactagacggaacagccaaaggtggtattgtcattgctattcggaatgaattacacttgccagtgaaattagttggtctaggtgaaggcattaacgatttagaaccattcaatgccaacgatttcgcaatgggcttatttaaaggcttattaaaa

SEQ ID NO: 3938 - DNA, 525 bp, Enterococcus faecalis
atgataaaccaagttgtgttagttggacgtttaacgaaagatatagatttacgctacaccgcaagtggttctgcagttggaagctttactcttgctgtgaaccgtaactttacaaaccaaaacggcgaacgagaagcggattttatcaactgtgtaatttggcgtaagcctgctgaaacaatggctaattatgctcgtaaaggaacattattaggagttgttggcagaattcaaactcgtaattatgacaaccaacaaggccaacgtgtctatgtgactgaagttatttgcgagagtttccaattattagagccaaaaagcgccaatgagaatagaaatagcattcagacgtcacagaatgacggtacaagcgttcaaaacaatttcgagagtaattatgccacaaatcaaaataaaggcttaaatcagcaaaataacagccaacaaatgtcgtttggtggagatgtagatccgttcgcaggcgcaggtaattcaatcgacattagcgacgatgatctgccgttc

SEQ ID NO: 3939 - DNA, 3474 bp, Enterococcus faecalis
ttggctggacacgtagtaaaatacggaaagcatcgcgaacgtagaagtttcgcacgtatcagtgaagtattggaattaccaaatttaattgaaatccaaacagactcttatcaatggtttttagatgagggacttcgtgaaatgtttgaagacattttaccaattgatgatttccaaggaaacttatccttagaatttgttgactatgaattaaaagaaccaaagtacacagtagaagaagcccgcgcacatgatgccaactattctgcgccattacatgtaacattacgtttaaccaaccgtgaaacaggtgaaattaaatcccaagaagtcttcttcggcgatttcccattaatgacagaaatgggtaccttcatcatcaacggggcagaacgtgttatcgtttcccaattagttcgttctccaggtgtttacttccatggaaaagtggacaaaaacggcaaagaaggttttggctcaacagtcattcctaaccgtggtgcatggttagaaatggaaacagatgcgaaagacatttcttatgttcggattgaccgcacacgtaaaattcctttaactgtgttagttcgtgctttaggtttcggttcagatgataccatcttcgaaattttcggcgacagcgaaagcttacgcaacacaattgaaaaagatttacacaaaaacgcaagtgattctcgtacagaagaaggcttgaaagacatttatgaacgtcttcgcccaggcgaaccaaaaacagcagatagctcacgtagcttgttaactgcacgtttctttgatccaaaacgttatgatttggcaaacgttggtcgctacaaagttaacaaaaaattagacttaaaaacacgtctcttaaacttaaccttagctgaaacgctagttgatccagaaactggtgaaatcattgtcgaaaaaggcacggttttaacacaccaaatcatggaaacattaggcgaatacattgacaacggcttaaacagcgtaacttactatccaagtgaagatgcggtagtaactgaaccaatgacaatccaagtgattcaagttctttcaccaaaagatcctgaacgtatcgtaaatgtgattggtaacggctatccagacgacagcgtaaaaacagttcgtccagcagatatcgttgcttcaatgagctacttcttcaacttaatggaagatatcggcaatgtcgatgacatcgaccacttaggtaatcgtcgtatccgttcagtaggcgaattattacaaaaccaattccgtattggtttagcccgtatggaacgtgtggttcgtgaaagaatgtctattcaagacacagaaacattgacaccacaacaattaatcaacatccgtccagtggtagcaagtatcaaagaattctttggttcttcacagttatcacagttcatggaccaaacaaacccattaggtgagttaacccataaacgtcgtctatcagccttagggcctggtggtttgactcgtgaccgtgccggttatgaagttcgtgacgttcactactctcactatggtcgtatgtgtccaattgaaacgcctgagggaccaaatatcgggttgatcaatagtttatctagttatgcgaaagtgaataaatttggtttcatcgaaacgccttatcgccgtgttgatcgtgcgacaggccgtgttactgatcaagtagattacttaacagcagacatcgaagaccattatatcgtagcgcaagcgaactcacttttaaatgaagatggcacatttgccaatgatgttgttatggcgcgtctacaaagtgaaaacttagaagttgccgtagacaaagttgactacatggacgtttcaccaaaacaagtagtcgcagtcgcaacagcatgtattcctttcttagaaaacgatgactccaaccgtgccttgatgggtgccaacatgcagcgtcaagcggtgccgttaattcaaccacgctctccgtgggtaggtacaggtatggaatataaatcagcccatgactcaggtgctgctttactatgtaaacatgacggtgtcgtagaattcgtcgatgcaaaagaaattcgcgttcgtcgcgacaatggcgcattagacaaatatatggttacaaaattccgtcgttctaactcaggaacaagctacaaccaacgcccaattgttcacttaggtgaaaaagttgaaaaaggcgatactttagcggatggaccttctatggaagaaggcgaaatggctttagggcaaaacgtcttggttgccttcatgacatgggaaggttacaactacgaggatgccattatcatgagccgtcgtttagttaaagacgatgtctacacttctgtgcatattgaagaatatgaatcagaagcacgtgatacaaaattaggacctgaagaaattacccgtgaaattccaaacgttggggaagacgcattgaaagacttagacgaaatggggattatccgcattggtgctgaagttcaagatggcgacttactagttgggaaagtcacacctaaaggggttacagaattatctgcagaagaacgtttattacacgcaatcttcggggagaaagcccgcgaagttcgtgatacgtctctccgtgtacctcacggtggcggcggtatcgttcatgatgtgaaaatctttactcgtgaagctggcgatgaattatcaccaggtgtcaacatgttagttcgtgtctatatcgttcaaaaacgtaaaattcacgaaggagataaaatggcgggacgtcacggaaataaaggggttgtttcccgtattatgccggaagaagatatgccattcttacctgacggaacacctgttgatatcatgttgaacccattaggggtaccttctcgtatgaatatcggacaagtacttgaattacacttaggtatggctgctcgccaattaggtattcacgtcgcaacacctgttttcgatggggcaaccgatgaagacgtttgggaaactgttcgtgaagctggtatggctagcgatgctaaaacagttctttacgatggacgtacaggtgaaccatttgataaccgtatttccgttggtgtcatgtatatgattaaattagcccacatggttgatgacaaattgcatgctcgttcaatcggaccttactctcttgttacgcaacaaccgttgggtggtaaagctcaattcggtggacaacgtttcggggaaatggaagtttgggcactggaagcttacggtgctgcttacacattacaagaaatcttaacttacaaatctgatgacgttgtcggacgtgtgaaaacatacgaagccatcgttaaaggtgaaccaattccaaaaccaggtgtgcctgaatcattccgagtattagtgaaagaattacaatcacttggtttagacatgcgtgtcttggacattgaggaagctgagattgagttacgcgatatggacgatgacgatgat

SEQ ID NO: 3940 - DNA, 3162 bp, Enterococcus faecalis
ttgatcgatgtaaataaattcgaaagtatgcaaatagggcttgcttcaccagaaaagatcagaagctggtcttatggggaagttaaaaaacccgaaacaattaactaccgtacattaaaacccgaacgtgaagggttattctgtgaacgcatttttggtccaaccaaagactgggaatgtgcttgtggtaaatataaacgtatccgttataaaggtattgtctgtgaccgttgtggcgttgaagtcactcgttcaaaagtacgtcgtgaacgtatgggacatattgaattagccgcaccagtttcacatatctggtactttaaaggaattccatctcggatgggtcttgttttagacatgagccctcgtgcattggaagaagtcatttattttgcttcatacgttgtcatcgaaccaggtgacacaacattagagaaaaaacaattgttaacggaacgcgaatatcgtgaaaaacgtgaacaatatggccaagccttcaaagctgctatgggtgccgaagccgtgaaacaattattagataacgtcgatttagatggcgaagttgcgcaattaaaagaagaattaaaaacagcttctggtcaaaaacggacacgtgccatccgtcgtttagacatcttagaagccttccgtgcttctggtaaccaaccaagctggatggtaatggatgttatcccagttattccaccagatttacgtccgatggttcaattggaaggtggtcgttttgcaacaagtgacttaaacgacttataccgccgtgttatcaaccgtaacaaccgtctaaaacgtttattagacttaaatgcgccaagcatcattgttcaaaacgaaaaacggatgttacaagaagcggtcgatgctttaatcgataatggtcgtcgtggccgtccagttactggaccaggtaaccgtccattgaaatctctttctcacatgttgaaagggaaacaaggtcgtttccgtcaaaacttactaggtaaacgtgttgactattctggtcgttccgtaatcgtcgttggtccgttcttaaaaatgtaccaatgtggtttaccaaaagaaatggcgattgaattattcaaaccatttgtaatgcgtgaattagtacaacgtgaaattgcgacaaacattaaaaatgcgaaacgtaaaatcgaacgtggcgaagatgaagtttgggatatcttagaagaagttatccaagaacacccagttttacttaaccgggcacctacgttgcatagattagggatccaagctttcgaacctgttcttgttgaaggtcgtgcgatccgtcttcacccattagtttgtgaagcctacaatgccgatttcgatggagaccaaatggcggttcacgtgcctctaaatgaagaagcacaagcagaagctcgtatgttaatgcttgctgcccaaaatatcttgaacccgaaagatggtaaaccagttgttacaccatctcaagatatggtcttaggtaactactacctaacaatggaagaagaaggccgtgaaggggaaggcatgatcttccgcgacatgaacgaagctgttttagcatggcaaaatggctacgtgcatttacactcacggattggggttcaaacaacacttttaggtgacaaaccatttactgattggcaaaaagaacgaatcttaatcaccacagttggtaagatcatctttaacgaaatcatgcctgttgagttcccttacttgaacgaaccaacagactataacttaactgttcaaacaccagataaatacttcgtagaagctggtacagacattcctgcacacattaaagagcaagaattagttttaccattcaagaagaaaaatcttggaaatatcattgctgaagtcttcaagagattccacattacggaaacctctaaaatgcttgaccgcatgaaagacttaggttacaaacactcaacgtatgctgggatgacggtagggattgccgatatcatggttcttcatgaaaaacaagcaatcattgatgctgcccacaaacaagttgaaacaattactaaacaattccgtcgtggtttaattactgatgacgaacgttatgaacgtgtaatcggcgtttggaacggtgccaaagacgaaatccaacaaaaactgatcgaaagtatggaagctcgtaacccaatcttcatgatgtctgactctggagcccgtggtaacatctccaactttacacagttagctggtatgcgtggtttgatggccgctccgaatggacgaatcatggaattaccaatcatctcaaacttccgtgaaggactttctgtcttagaaatgtttatctcaactcacggggctcgtaaagggatgaccgatacggccttgaagacagccgattcaggttacttaacacgtcgtttagttgacgttgcccaagacgtaatcattcgtgaagacgactgtggcactgaccgtggtcttgaaatcgaagccattcgtgaaggtaacgaaattatcgaaccattagacgaacgtctattaggtcgttatacacgtaaatcagttgttcatccagaaactggtgcaatcatcattggtgcggatcaattaatcactgaagatcttgcaagagaaatcgtggacgctggtattgaaaaagtaaccatccgttctgtctttacatgtaacacaaaacatggtgtatgtaagcactgttacggacgtaacttggcaactggttctgacgttgaagtcggagaagcagttggtacaatcgccgctcaatctatcggggaacctggtacacagttaaccatgcgtacgttccataccggtggggttgccggtgacgatatcactcaaggtttacctcgtatccaagaaatctttgaagcacgtaatccgaaaggacaagcagtgattacagaagtaaccggtgaagttatcgatatttctgaagatcctgccacacgtcaaaaagaagtaaccatcaaaggaaaaacagatacacgtacctatactgtcccttacactgcacgtatgaaagttgctgaaggcgacatcatccaccgtggtgcaccgttgacagaaggttcaattgatccaaaacaattattacaagttcgtgatgttttatctgttgaaaactacctattacgtgaagtacaacgt

SEQ ID NO: 3941 - DNA, 2742 bp, Enterococcus faecalis
atgaaaatgaaagaaacattgcaattaggaaaaacagcttttccaatgcgtgggaacttgccaaaccgtgaagcagaatggcaaaaagactgggaagaaaaaggcttatatgaacaacgtcaaaaattaaacgaaggaaaaccaacctttgttttacatgatggccctccgtatgcaaacggaaatattcatttaggacattctttgaataaaatcagtaaagatattattattcgttcaaaatcaatgtctggtttccgttctccttatgtgcctggttgggatactcatggtttaccaattgagcaagtgttaaccaataaaggggttaaacgtaaagaaatgactgtcgctgagtatcgcgaaaaatgtaaagagtatgccttatcacaagtcgataaacaacgtaacgattttaaacgtttaggtgtgtcaggcgattgggaacatccatatattacgttagatccagagtatgaagcagcagaaattcgtgtttttggtaagatggcagaaaaaggctatatttataaaggtttaaaaccaatttattggtctccttcaagtgaatcttctttagcagaagcagaaattgaatacaaagatgtaaaatcaccttctatttacgtagcttttaatgtggccgatggtaaaggtcttttagataacgagacagccttcgtcatctggacgacaaccccttggacattaccagccaacttaggtatttcagttaatcctgattttacgtatgttgaagtgaaggcagacggtcgtaaatttgtaattgctaaagatttattaacaacagttaaagaagcgattggttgggaagaagtagaagtcttgcgagaattttctggtgaaaaattagatcgtatgacagctcaacatccattctatgatcgaacatcacttgttatgctaggcgaccacgtgacgctagatgccgggactggcttagttcataccgcaccaggacatggtgaagatgactatatcgttagccgtaaatatgatttacctgttatttctcctgttgacagccgtggggtctttacagatgaagcacctggttttgaaggaattttctatgacaaagcgaatccaatgattactgagttattagaagaaaaaggcgcgttattaaaattagatttctttacgcatagttatccacatgattggcgtaccaaaaaaccagttatctaccgtgcaacgccacaatggtttgcttcaatctctaaattccgtcaagatattttagatgaagttgagaaagttgactggctaattccttggggaaaaacacgtttatataatatgattcgtgaccgtggtgattgggtaatctctcgccaaagagcgtggggtgtaccattaccgatcttctatgctgaaaacggggaagccatcattacgccagaaacaattgaacatgtagcgaatttatttgcagaacatggatcaaatatctggtttatgcgtgaagcaaaagagttactaccagcaggctttacacatccaggttcaccaaatggcgagtttaccaaagaaacagatatcatggacgtttggtttgactcgggttcttcacatgaaggggttttacgagaaagagaagagttaactttcccagcagatatgtatttagaaggttctgaccaatatcgtggttggtttaactcaagtattacaacaagtgtcgctatcaatggagtagcgccttataaatcaattatttctcaagggatggttctcgatggcgaaggccgtaagatgagtaaatcgttaggcaatactatcttacctgaaaaagttatcaatcaaatgggggcagatatcttacgcttgtgggtaagtagtgttgacgcggaagccgatgtgcgtgtctcaatggatatcttaaaccaagtatctgaagtgtaccggaaaatccgtaatactatgcgtttcttgttagcgaatacgagtgatttcaatccagctgagcatactgtagcttatgctgatttacgttctgtagataaatacatgacggttcgtttaaatcaagtcattcaagaaatccgtgaaaatggttatgaaaaatataatttcatgcatatttatcggacagttatgaacttcttaactgtggatctatcttctttctatttagactttgcgaaagatgtcgtttatattgaagctgaaaacgattatcaacgtcgttgtatgcagactgttttctatcaaacattggtttcattaacaaaactattgacaccaattattccacatacagcggaagaaatttggagtttcttacaagaagaagaagagtatgtgcaattagctgaattcccaggttacgaaacgtttactaatgaagaagaattgatggatacatgggcagcctttatggatttccgtgacaatgtcttaaaagcgttggaagaagctcgtcattctaaattaatcggtaaatcgttagaagccaaagtgaccgtttatccaaatgaacaaattcgtcaattaatgacagctgttgatgcagatattgctcaattactaattgtttccgactttgaagtatcaaaagaagtagcacctagtgaagctgttcaatttgaagacatggctattttagttgaaaaagcagaaggcgaaacgtgtgaccgttgtcgttccgttcgtcaagatgtcggctcagatgaaaaattaccaacactttgtggccgttgtgcacacattgttgaa

SEQ ID NO: 3942 - DNA, 1401 bp, Enterococcus faecalis
gcaaataacatgaaatatcaatttccagaaaatttttggtggggttctgcagccagcggtcctcaaacagaaggcgtttttgaaggtgatggtaaaggtcaaaatatttgggatttttggtatcaagaagcgccagaaaaattttttcaacaagtcggtccagataagacctcacaattttataaaaaataccaagaagatattcagttaatgaaagaaacgggacataactcttttcgaacatccattcaatggagccgtttaattccagatcctacaacaggaaaagtcaatcaaacagcagttgatttttataatcaagtcattgatgatttattagaacacgggattgagccctttatgaacttgtatcattttgatatgccgatggtacttcaagaaaaaggcggttgggaaagccgtgaagtggttgatttgtatgttgactttgccaaaacctgttttgaattgtttggcgatcgcgtgaaaaaatggtttacgcacaatgaaccaattgtaccagttgaaggtggttatctctatggctggcattatcctgataaagtgaatctaaaagaagggattcaagtactctatcatgaagctttagctagtgccaaagcgattgccgtctatcactctatgaacttatcaggtgaaattggcattattttaaacttaacgccgacttatcctcgtgatgagcacaacgaagccgatgtaaatgcggctaaatttgtcgatggtttctttaatcgttcgtttttagacccggctgttaaaggtcattttccagaagatatggttgcttgggcgaaagcaaatgacttattgccagaaacaacgccagaagatttagcaataattgctgaaaatactgtggacttattaggagtaaactactatcaaccacgtcgtgccaaagcaaaagaaacacctgttgaaacacgaccagaaggcttacttccagaagatttttatgatgtctacgatatgcctggcaaaaaaatgaatccttaccgtggctgggaaatctacgaaaaaggtatttatgatacattaatgaatttaaaagaaaattatggcaacattcgctgctacatttcagaaaatggcatgggcgtagaaggagaagaacgctttgtcaatgaacaaggagtcattgaagatgattatcggattgaattcgtgcaagatcacttgaaatgggtgcaccaagcgattcaagaaggtagtaatgttcaaggatatcatatgtggacgtgtatggataactggtcttggctcaatgcctataaaaatcgttatggcttcatcgctgtggatttagatgatgatgcgaaacggaccattaagaaaagcggtcgttggttcaaagaaatgacagcaaataacggcttt

SEQ ID NO: 3943 - DNA, 417 bp, Enterococcus faecalis
gtgcgtacaacatatatggccaaagctggcgaagtagaacgtaaatggtacgtagtagatgcaacagatgttcctttaggacgtctatcagcagttgttgcttctgtactacgtggtaaaaataaaccaacattcacaccacatgtggatactggagatttcgtaatcgtaattaacgctgataaagtaaaattaacaggtaaaaaagctacagacaaaatttactaccgtcactcaatgtatcctggaggattaaaatcagtgacagctggtgaattacgcgacaaaaactctcgccgtcttatcgaaacttctgtaaaaggtatgctacctaaaaacactttaggacgtaaacaatttactaaattgaacgtatacggtggagctgagcatccacatgctgcacaacaaccagaa

SEQ ID NO: 3944 - DNA, 390 bp, Enterococcus faecalis
ttggcacaagtacaatatagcggcacaggtcgtcgtaaaaatgcagttgcccgcgtacgcttagtaccaggtactggtaaaattactgtaaacaaaaaagacgtagaagaatatattccacatgctgacttgcgtgaagttatcaaccaaccatttggcgtaactgaaacaaaaggcgcttacgatgtaatcgtaaacgtaaacggtggtggctatgctggacaatcaggagctatccgtcacggaatcgctcgtgcattgttacaagtagatcctgacttccgttctgctttaaaacgcgctgggttacttactcgtgacgcacgtatggttgaacgtaaaaaaccaggtcttaaaaaagcccgtaaagcttcacagttctcaaaacgt

SEQ ID NO: 3945 - DNA, 114 bp, Enterococcus faecalis
atgaaagtaagaccatcagtaaaaccaatgtgtgaacattgtaaagtaattcgccgtaaaggacgtgttatggttatttgcccagcaaatccaaaacataaacaacgtcaagga

SEQ ID NO: 3946 - DNA, 363 bp, Enterococcus faecalis
atggctcgtattgcaggagtagacatccctcgtgacaaacgtgtagtagtttctcttacttacatttatggtattggtaacactacagctaaaaaagttttagcaaacgttggcgtatctgaagatgttcgtgtacgtgatttaacaaacgaacaaacagatgcgattcgtgcggaaattgataagttaaaagttgaaggggatcttcgtcgtgaagtgaacttaaacatcaaacgcttgatggaaatcggttcataccgtggaatccgtcaccgtcgtggattaccaactcgtggacaaaacacgaaaaataatgcacgtactcgtaaaggccctactaaaacagtagcaggcaagaaaaaa

SEQ ID NO: 3947 - DNA, 174 bp, Enterococcus faecalis
atggctgaattaaaaattactttaaaacgcagtgttatcggacgtcctcaaaaccaacgtgctacagttaaagcgttaggtttaggtaaagtgaatagtactgttacaaaacctgccaatgaagcaatcaaaggtatggttaacactatctcacatttagtggacgtagaagaa

SEQ ID NO: 3948 - DNA, 1686 bp, Enterococcus faecalis
atgaaacagtcaaaaatgttaattccaacgttaagagaagtaccaaatgatgcagaagtcttaagtcatcaaattctgttgcgcgcaggctatattcgtcaagtcgctgcagggatctattcttatttacctttagccaatcgtgttttagaaaaattaaaaacgattatgcgagaagaatttgagaaaattgatgcagttgaaatgttaatgcctgcgttattaccagcagaactttggaaagaatcaggccgttatgaaacttatggacctaacttgtatcgcttaaaagatcgcaatgaccgtgactatatcttaggcccaacgcatgaagaaaccttcacagaattaattcgtgatgaaatcaattcttacaaacgattacctttgaatttataccaaattcaaacaaaatatcgtgatgaaaaacgccctcgttctggcttattaagaggccgtgaatttatcatgaaagatggctattctttccatgccgatgaagctagtttagatcaatcataccgtgattacgaaaaagcttactcacgcatttttgaacgctgtggactagaattccgtgccattattggggacggtggtgccatgggtggtaaagattctaaagaatttatggcgatttctgaaattggggaagatactatttgttattcaacagaaagtgattatgctgccaatttagaaatggcaacaagtctttatacgccgaaaaaatcacatgaaacacaattagatttagaaaaaattgcaacaccagaagtgggtacaattgccgaagtggcaaacttctttgaagttgagccacaacgaattattaaatcagtactatttattgccgatgaagagccagtaatggtcttggttcgtggcgatcatgatgtcaatgatgtcaaattgaaaaacttcttaggcgctgatttcctagatgaagcaacagaagaagatgctcgccgtgtcttaggagctggctttggttcaattggtccagtcaatgtttccgaagatgttaaaatttatgcagatttagctgttcaagatttagccaacgccattgttggagctaacgaagatggctatcatttgacaaatgtaaatccagatcgtgatttccaaccaattagttacgaagatttacgctttgttcaagaaggcgatccttctcctgatggcaatggtgtcttagcctttactaaaggaatcgaaattggtcatatctttaaattaggaacgcgttatagtgatgctatgggcgcaacagttttagatgaaaacggtcgtgaaaaatcagtgatcatgggttgctatggcatcggcgttagtcgtttactttcagcaatcgttgaacaaaatgcagacgagcgcggtattaattggccaacaggaattgcgccatttgatttacacgtggtccaaatgaatgtgaaagatgagtaccaaacaaaactatcacaagaagttgaagcaatgatgaccgaagcgggctacgaagtattagttgatgaccgcaatgagcgcgcaggcgtaaaatttgctgatgctgatttaattggttgtccaatccgtatcacagtcggtaaaaaagcagtcgatggtgtggtagaagtcaaaatcaaacgtactggtgaaatgttggaagtacgcaaagaagaattagaaagtacactttct

SEQ ID NO: 3949 - DNA, 4329 bp, Enterococcus faecalis
cgcgatttatttgataaactgatgacgcaaattcagttagatgacacagcgaaagaacatcccttaattcaaaatggccggattgacaaggtcattgttcaccaacaaagtcgcttatgggaatttcatttaagttttgatgaattgatgccagtgatgctatatcaaacatttatgcaacaattggaactagcttttcaacaaattgcgcaggtttccgttcaaataaccacaaatcagacaacatttacagaggaacaattaacggattattggcagttggccttgttaaatagtcaatgcaatacaccgttagttcagaaagtcttaaaaacacagacaccacaatttgaagatcggaaaattatcttacctgttgataatgaagcagttattccttatttgaagcaacaatatttaccaattattgaggaactttatttctcttatgggtttcctaaatttcatattgaaccaaaaatggatcaacagcaagctgcagaagtgttgaaaaagtttgaagagcaaaaattagaacaagccgcagcctttcaacaacaagctgctgaatcgcttgttaaacatgaacaaatgaaaaaagaaaaacaacaacaagcgcctgcgtttgatggtccaattcgtttaggtcggaatattcccaatgatgaacccattatgcccatgggaaatatactggaagaagaacgtcgtataacgattgaaggctttatttttgataaagaagtgcgtgaattgcgttctaaacgaaaaattttaattttgaaaataactgattatacttcctctttcgtggtgaagaaattttcgaatggggaaaaggatgaacaagtttttgatgcgattcaaccgcaaagttggattcgtgttcgtggtagtgtacaagaagataccttcatgcgtgatttagtcatgaatgctcaagatttgatggaagtcgcccatgcgccaagaaaagactacgcgccagaaggtgaaaaacgtgtagaattacacatgcatagtaacatgagtacaatggatgcgaccaataaagtcggtgacttggtggcgcaagcggggaaatgggggcacaaggccatcgcaattacggatcatggcggcgcccaagcgtttcctgatgcccatgctgcaggtaaaaaagcaggcgttaaaattttatacggcgtggaagccaatattgttgatgatggtgtacctattgcttacaacgaagaacatattgaattaacagatgctacctatgtggtctttgacgtggaaacaacggggctttccgctgtttatgatacaattattgaattggccgcagtcaaaatgcacaaaggaaatgtcattgagacttttgagcagtttattgatcctggccatccattatctcaaacgacaattaatttaactgggattacagatgaaatggtgcgcggttcaaaatccgaagaagaagttttacgcatgtttaaagagttttcagaaggaactattttagtggcccacaacgcttcttttgatatggggttcttaaatacaagttatggcaaacatggaatacctgaagcggctaatcccgtcatcgatacattagaattatccagattcttgtatccacatttcaaaagccatcgtctaaataccttatcgaaaaaatttggcgtcaacttagaacaacatcaccgcgccatctatgactcggaatcaacaggtcatttgtgctggattttcttaaaagaagcgaaagagaatcatgatatgcatttccatgatgatttgaatcgtcatattggcgaaggagattcatacaaacgagctcgacctttccatgcaacgattttagcaacaactcaagcaggattaaaaaatctttttaaattgatttcgatgtccaatgtagattattttttccgagtaccacggattcctcgttcgcaattatcgaagttaagagaagggcttttaatcggttccgcatgttcaaacggcgaaatttttgaagcaatgatgcaaaaaggtgtcgaagaagcaaaaaatcgtgccaaattctacgattatattgaagttatgcccaaaccagtttacgcgccattaattgaacaagaattggtgaaaaatgaagcagatttggaagaaattattagtaatctagtgaaaatcggtgacgaacttggcaagctggttgtcgccactggaaatgttcattatttaaatgaagaagatgccatctatcggaaaattttagtcgggtctatgggtggcgctaatccgttaaatcgccatagtttaccaaaggttcatttccgaaccaccgatgaaatgttaacggaattccaatttttaggacaagacgtcgctaagcgaattgtagtagaaaatcccaacaaagtcgctgatttatgtgaagaagttattccagtaaaagacgatttatatacgccaaaaattcctgggtctgaacaagaaatcactgatttaagctacaatcgtgcgcgcgaattgtatggcgatcctttaccagaaattgtcgaaaaacggttagaaaaggaactgaattcgattaacgggaatggtttctcggtcatttatttaatttctcaaaaactggtgcataaaagtaatgaagacggctatttagttggttcacggggctctgtcggttcgagttttgttgcgacaatgacagggattactgaagtaaatcctttagcgccacattattattgtcctgagtgtcaatattctgagttctatgaagatggttcctatggttcagggtttgatatgcctgaaaaagcctgtccaaaatgtggcgctcgattgtttaaagatggtcacgatattccttttgaaacgttcttaggattccatggcgacaaagttcccgatatcgatttgaacttttctggcgattatcaagccgaagcccataactacacgaaagttctttttggtgaagaatatgtctaccgggcaggaaccattggtacagtagccgacaaaacagcgtatggctttgttaaaggatatgaaagagatcataatttacatttgcgtggcgctgaaattgatcgcttagccaaaggttcaacaggggttaaacggacgactgggcagcatcccggcggtattattgttattcctgattacatggatgtttatgattttacgccaatccaataccctgcagatgatcaagaggcagaatggaaaacgacgcactttgatttccattccattcacgataatattttaaaacttgatattctgggacatgatgatccaaccgtgattcggatgttacaagatttatctgggattgagccaaaaaccatcccaacagacgatccagaagtgatgcgtatttttgaaggacctgatgttctaggtgtggatgcagagcaaatttattctaaaacaggaactttaggaattcctgaatttgggacacgtttcgttcgaggtatgttagaacagacccatccatcaacttttgcagaattacttcaaatttctggactgtctcacggaaccgatgtgtggctagggaatgcagaagagttgattcgccgtggcgaagccaatcttgctgaagtaattggttgtcgggatgatatcatggtatatttaattcatgctggtttggacagtgggatggcctttaagattatggaaacggtacgtaaaggacaatggaataagattcctgatgaactacgggatacgtatttaaatgcgatgaaagaaaacaacgtccctgactggtatattgattcttgttctaaaattaaatatatgttcccgaaagcccatgcggcagcatacgtattaatggcgttgcgggtcgcttactttaaagtttatttcccaatcttatattactgtgcgtttttctccgttcgggcggatgacttcgacttagtggcaatgtcacaagggaaagaagctgtgaaagcacgaatgaaagaaattacggacaaagggatggacgcctccactaaagagaaaaacttattaacggttttagaattatgtaatgaaatgctggaacggggctataaatttggcatgattgatttgtacaaatcggatgctgaaaattttgtgattgaaggggataccttgattgcacctttccgagcagtgccaagtttaggcctcaacgtagcgaaagccattgtcgctgcgcgagaagagcaaccgttcttgtcgaaagaagatttggcaacacgaggtaaagtttctaaaacattgattgaatacatgaatgaaaatggtgtcttaaaagacttgccagatgaaaaccaattatcattattt

SEQ ID NO: 3950 - DNA, 876 bp, Enterococcus faecalis
gaacgtttaagaagaacaatgatgtttgtccctggagcgaacgcagcaatgctaagagatgcacctttgtatggggcagattcaatcatgtttgatttagaagatgcagtttcattaaaagaaaaagactctgcccgtgttttagtccattctgctttgaaaactttcgattatggcaatattgaaattgttgttcgaatcaatgctttagatgccggtggcgcagaagatattgaagcaatggtcttagctggtgtcgatgtgattcgtttaccaaaaacagaaacagcccaagatatcattgatgtcgaggcagtcattacagaagtagaacagcaaaatgacattcccgtaggaacaacgaaaatgatggctgctatcgaatcggccgaaggtgttctaaatgcgcccgcgattgccaaaagttcaactcgcttgattggcatcgcgttaggcgccgaagactatgttaccaatatgaaaacacgccgccatccagatggccaagaactattctttgctcgtagcatgattttacatgccgctcgagcagctgggattgcagctattgatacggtctattcagatgtagacaatacggaaggctttgaagccgaagttcgtttgattaaacagctaggtttcgatgggaaatcggtgattaaccctcgtcaaatcccattggttaataatatttatgcgccaacagaaaaagaaatccagaatgctaaggaagtaatctggggcattcgggaagccgaagcaaaaggttccggtgttatctccgtaaatggaaaaatggttgataaaccaattgttgaacgagctgaacgggtcattgcgttagcattggcggctaaattaattaccgaggag

SEQ ID NO: 3951 - DNA, 234 bp, Enterococcus faecalis
atggcacaacaaagaagaggcggacgtaaacgtcggaaagtcgactacatcgcagcaaaccacatcgaatacatcgactataaagatactgaattgttaaaacgattcatttcagaacgtggcaaaattttaccacgtcgtgttacaggtactggcgctaaaaaccaacgtaaattaacgattgctattaaacgcgcacgtatcatgggattattaccattcgttagtgacgaa

SEQ ID NO: 3952 - DNA, 1500 bp, Enterococcus faecalis
gtggcagaagaacaacaagcgcatttagaggatttaaatgatcaaatgctcgtgcgccgcgaaaaaatggaagctttacgtgaagaagggattgatcctttcggtaaacgtttcgatcgcactcataattcagcagaacttcatgaacaatatgataatcatacaaaagaagaacttagtgaaatgaatacagaagtcagcgttgctggacgtatgatgacaaaacgtggtaaaggaaaagctggtttcgcccatttgcaagaccgtgaaggccaaattcaaatttatgttcggaaggaccaagttggagacgaagcctatgaactatttaaacatgctgacttaggcgacttctttggtgtgactggtcaaataatgaaaaccaatacgggggaagttactgttaaagctcaaacaattacgttattaactaaagctttgcgtccgttgccagataaataccatggattaacgaatgtggaacaacgttatcgtcaacgctatttggatttaatcagtaacaaagaaagttttgatcgtttcatgaaacgcagtcaaattattagcgaaatccgtcgttatctagatggcaatggctatgtcgaagtagaaacgcttgtcttgcataacgaagcaggaggagctgctgctcgtccatttatcacacaccataatgcattagatatggacttatacttacgcattgccctagagttacatttaaaacgtttaattgtcggtggcatggaaaaagtatatgaaattggtcgtgtcttccgtaatgaaggaatcgataccactcataacccagaatttacaatgctagaagcttataccgcttatactgattatcaagatgtgatggatttaacagagggaattattcgtaatgctgcggaaaaagtcttaggaactactgatatcacgtacgatggtcaagcggttgacttaggaagtcctttcaaacgtctacacatggtagatgcggtcaaagaacaaacgggcgtagatttttggcaagagatgacgatagaagaagcctgtgcgttggctaaagaacataatgttgaaattacagatgccatgacagtcggtcatatcattaatgaatttttcgaaacatttgtagaagatacgttgcaacaaccaacatttatttatggtcacccagtcgctgtttcaccattagcgaagaaaaatccagaagatggtcgtttcactgaccgctttgaactgtttattatcggaaaagagtttgctaatgcatttacagaattaaatgatccaattgaccaacgtgaacgttttgaagaacaagaaaaagaacgggaacaaggaaatgatgaagcacacggagtagatgaagatttcatcgaagccttagaatatggcttaccaccaaccggaggattaggtattgggattgatcgactagttatgttattaactgatgcacaatcaattcgtgatgtcttgctattcccaacaatgagataaaaa

SEQ ID NO: 3953 - DNA, 1419 bp, Enterococcus faecalis
atgacaaaacaacaatttggcgtagtcggcatggctgtcatgggaaaaaatcttgctttaaacattgaaagcagaggctatacagttgcgctgtataaccgtacaggatcaaaaacaacagaagtggttgaagaacatcctgacaaaaactttcaagcaacatactcaattgaggaatttgtgaatgcaattgaaaaacctcgtcgaattatgttgatggttaaagctggacctgcaacagatgcgacaatccaagaattgttaccacaccttgataaaggcgacatcttaattgatggcggtaatacgttcttcaaagacacaatgcgacgtaatgaagaactagcaaactcaggaattaactttattggtactggcgtttctggcggagaagaaggagccttgaaaggaccatctatcatgcctggtggacaaaaagaagcgtatgagttagttgcgccaattcttgaaaaaatttcagctaaagcagaagacggtgaaccatgtgtgacttacattggcccaaatggtgctggacattatgtaaaaatggttcataatgggattgaatatggggacatgcaattaattgctgaatcctacgacttaatgaaacaaatcttaggtttatctgttgatgaaatggcagagattttcaaagaatggaacgaaggcgaattagacagttaccttatcgagatcacggctgacattttgacacgtaaagatgatgaaggaaccgaccaaccaatcgttgatgttattcttgatgcagcaggcaacaaaggaacaggtaaatggacaagccaaagtgcgttagatcttggcgtaccattaccattaattacagaatcagtatttgcacgttttatttcggcttacaaagaagaacgcgtaaaagcaagtggcattttatcaaaacctgcagcctttaactttgcaggcgataaaaaagaattgattgaaaaaattcgcgaagcattatactttagtaaattaatgagttatgcgcaaggttttgcacaactccgtacagcttctgaagaatacggatgggatttaccatttggtgaaattgcaaaaatctggcgagcaggttgtattatccgtgcacaattcttacaaaaaattaccgatgcatatgaaaaaaatccagcacttgaaaacttgttgttagatgaatactttgtagaaattacgaaaaaatatcaacaagccgttcgtgaagttgttgcgattgctgttcaagcaggtgttcctgtaccaacattctcatctgcaattgcttattacgattcttatcgttcagatcgcttaccagcgaatttaattcaagcacaacgtgattacttcggtgctcatacgtacgaacgcacagacaaagaaggaatctaccattacagctggtacaacgaagaa

SEQ ID NO: 3954 - DNA, 957 bp, Enterococcus faecalis
atgtcgaaacattattttgatccaagattgaaaatcttttctttgaactctaatcgtcccttagcagaaaaaattgcggatgctgtgggtgtggagctaggaaagtgctctgtaacacaatttagtgatggcgaaattcaagtgaatattgaagaaagtattcgtggtgcacatgtttacgtcattcaatcaacaagtagccctgttaacgataacttaatggaactattaatcatgattgatgcgttaaaacgtgcgagtgctaaaacaattaacgtggttatgccttattatgggtatgcacgtcaagaccgtaaagcacgtgcccgggaaccaatcactgctaaacttgttgcaaacatgattgaaaaagctggtgcaacaagaatgttgacattggacttacatgcggtccaaattcaaggattctttgatattccagtggatcatttgatgggtgcaccattaattgccgattacttcatcgaacacggcattcaaggcgatgacgtcgttgttgtttcccctgaccatggtggtgtaacgcgtgcacgtaaattggcagaattcttaaaagcaccaattgcgatcattgacaaacgtcgtccaaaagcgaacgtagcagaagtaatgaatatcattggtcatgtggaaggcaaaacatgtgtcttaattgatgacatgattgacacagcggggacaatttctcttgctgcaaacgcattgaaagaagccggagcaaaagacgtttacgcttcttgtacacatcccgttttatcaggaccagccttacaacgtattgaagattcagcaattgaacgcttagttgtaacagactctatttacctatctgatgatcgtaaaattgctaaaattgacgaagtcagcgttggtgaattaatcggagatgcgattaaacgtatccacgaaaacaaaccagttagtccgttatttgaa

SEQ ID NO: 3955 - DNA, 1335 bp, Enterococcus faecalis
atgcccgacgtggaaagtttttggcatagccttgaagaagcctatcaagcgattttgtcggcgccaagttttgatgcttggattaaaaccacacgccctttgaaattagacaacaatcaattgtggctagaagtcccttctgcagttcatcgtgattactgggaaaaaaatctttcggcaaaaattgtcgaaactggatttaaattgaccggtgcagaagtgatgccccattttgttgttgccgatgaaaaagacgcagcactggcacaagaactcgaagaacctgccgaagaagaagttgtttttagtgaacaaagtaaaaaagcgatgcttaatcctaagtacactttcgacaccttcgttattggtaaaggaaaccaaatggcgcacgctgcagcgcttgttgttgccgaggatcctggttcgatttacaatccccttttcttctatggtggtgtagggttagggaaaacccatttgatgcatgctattggtcatcaaatgttagtgaatcaaccagatgccaaagtcaaatatgttagtagcgaaacgtttacgaatgaatttatcaactcaattcaaacaaagacatccgaacaatttcggaaagaatatcgcaatgttgacttattattagtcgatgatattcaatttttggcggaaaaagaagcaacattggaagaatttttccataccttcaacgatctttacaatgaaaataaacaaattgttttaacaagtgatcgcccgccgaatgatattccaaaattacctgaacgattagtttctcgctttgcttggggtttgtctgtcgatatcaccccgcctgatttagaaacacggattgcaattttgcgcaaaaaagcagatgccgagcgtttagaaattccggatgatacactaagttatatcgctggtcaaattgattccaacatccgtgaattagagggtgctttggtccgtgttcaagcctttgcaactattaatggagaagatattaccactagtttagcggcggacgccttgaaatctctaaaatcagttggtagtaaaaatcaattgtccattttacaaattcaagaagaagtatccaaatattatcatgtgcctcttaaagatttaaaagggaaaaaacgggtgaaaacaattgtggttcctcgtcaaatctcaatgtatcttgctagagaaatgaccgacaattccttgccaaaaattggtgccgaatttggcggcaaagatcatacaacggtgattcatgcgcacgaaaagattcagcaattattggaaaaagatccagcgattcaaaaagaagtcagtgaaattaaaaatttattg

SEQ ID NO: 3956 - DNA, 361 bp, Enterococcus faecalis
atggcacgtgttaaaggtggaacagataacccgtaaacgtcgtaaaaaagtccttaagttagcgaaaggctactacggatcaaaacatactttatttaaatcagcaaaagaacaagtaatgaactcttattactatgcattcagagaccgtcgtcaaaagaaacgtgacttccgtaaattatggattgcacgtatcaacgcggcagctcgtatgaatggcttaagctattctaaattaatgcacggtttgaaattggcagagattgatatcaaccgcaaaatgttagctaacttagccgttaacgatgcagcagcatttacagcgttatctgaacaagcaaaagacgctttaagcaaataa

SEQ ID NO: 3957 - DNA, 1287 bp, Enterococcus faecalis
atgtcaattattactgatatttacgcacgcgaagtcttagactcacgcggtaacccaacaatcgaagtagaagtttacactgaaagcggagctttcggccgtggaatggttccttcaggagcttcaactggtgaatacgaagcagttgaattacgtgatggcgacaaagctcgttacttaggtaaaggtgttactaaagctgtagataacgtaaacaacatcattgctgaagcaatcatcggttacgatgtacgcgatcaaatggctatcgataaagcaatgatcgatttagatggaactcctaacaaaggtaaattaggtgctaacgctattcttggtgtgtctatcgccgtagctcgtgctgctgctgattacctagaagtgcctttatatcattacttaggcggattcaatacaaaagtattaccaactccaatgatgaacatcatcaatggtggatcacatgctgacaacagtattgacttccaagaattcatgattatgcctgtaggtgcgcctacattcaaagaagctttacgtatgggtgcagaagtattccacgcattagcttcaatcttaaaaggccgcggcttagctacttcagtaggtgacgaaggtggtttcgctcctaacttaggttcaaacgaagaaggtttcgaagtaatcatcgaagctatcgaaaaagctggctatgttcctggtaaagacgttgttcttgctatggatgctgcttcttcagaattctacgacaaagaaaaaggcgtttacgttttagctgactcaggcgaaggcgaaaaaacaactgaagaaatgatcgcgttctacgaagaattagtttctaaatacccaatcatttcaatcgaagacggcttagacgaaaacgactgggacggattcaaaaaattaactgaagtattaggcgacaaagttcaattagttggtgacgatttattcgtaacaaacacaactaaattagctgaaggtatcgaaaaaggtatcgctaactcaatcctaatcaaagttaaccaaatcggtactttaactgaaacatttgaagcaatcgaaatggctaaagaagctggctacactgcagttgtatctcaccgttctggtgaaacagaagattcaacaatctctgatatcgctgttgcaacaaacgctggccaaatcaaaactggttcattaagccgtactgaccgtattgctaaatacaaccaattattacgtattgaagatcaattaggcgatgtagctgaatacaaaggcttaaaatctttctacaactta

SEQ ID NO: 3958 - DNA, 1752 bp, Enterococcus faecalis
atggcaaaacgcacaacctattgcggcaatgtatctgccgaatttattgaaaaagaagttgtattaaaaggatgggttcaaaaacgtcgtgacttaggaggggttatctttattgatttacgtgaccgtgaaggaatcgtccaagtggtctttaacccagaaaagtcaaaagaagcatgggaaattgctgataaatgtcgtagtgaatacgtcatcgaagttaaaggtcaagtcgtttatcgtgataaagaagcgattaatcccaaaatgaaaactggcgagtttgaagtgatggcgactgacattacgattttaaatactgcgaaaacaacgccatttaccattgaagatgacaataacgttaatgacgaattgcgcatgaaatatcgttatttagatttacgtcgtccatcaatgacaaacaacattaaattacgtcaccaagtaacgaaaacaatccgtcactatttagataatcatgactttttagacattgaaactccttatttaggcaaatcaacaccagaaggcgctcgcgattatttggttccttctcgtgtccatgccggtcatttttatgctttaccacaatcaccacaactctttaaacaattattaatgggggcaggcttcgatcgctattaccaaatcgttcgttgtttccgtgatgaagatttacgaggcgaccgtcagccagaatttacacaaatcgatatcgaaacgacctttttaacaccagaagaaattcaaacatatacagaaaatatgttggctgaagtgatgaaagagacaaaaggaattgagatttctgttccgtttccacgaatgagctatgacgaagcaatggcacgctatggtagcgataaacccgacactcgttttgctatggaattaattgatgtcgcagatgtagtgaaagacgtagacttcaaagttttccaagcagcgttggaaaatggcggacatgtgaaggctttgaatgcaaaaggcgccgcagataagtattctcgtaaagatatggataacttaggtaagtatgtgagtcaatttggtgcaaaaggcttagcttggttaaaagttgaagaagatggcttaaaaggaccaattgctaaattcttaacagaagttagtgatgaattaattgctgctaccaatgcagaagtcggtgatattttaatgtttggtgccgataaacctgaaatcgtagccgctgctttaggtgcggtacgtacacgtttaggtaaagaattaggtttaattgatgaatcgaaattcaatttcttatggattgtggattggccgttgtttgaatatgatgaagaagctggccgctatgtttctgctcatcatccatttacacaaccaaaagcagaggatgtggcccgcttagcaacagacccagcctctgtgtatgctgaagcttacgatgttgtcttaaacggctacgaattaggtggcggctcattacggatccatacacgagaattacaagaaaaaatgtttgaaacgttaggttttacaaaagaagaagcacaagaccaatttggtttcttgctagacgcattagattacggcttcccgccacatggagggattgctttagggctagaccgcttagcaatgctattggctggggaagaaaatattcgtgaagtgattgccttccctaaaaacgggaaagcaattgacccaatgaacaacgcaccaagtttagtttctccattacaattgtttgaattaaacattgatgta

SEQ ID NO: 3959 - DNA, 669 bp, Enterococcus faecalis
atagctgaaaacttaacaaatattaataatcaacttcagctagcatgcaaaagctcacagcgctctgttgctgatgtgacaatgattggcgtcactaaatcagtaggaattgaggaagcagcagagcttgttcagcttggtgtccagaatttagctgaaaaccgagtagataagttactagaaaagaaagctggattggaaaaatttaatgatattcagtggcatttaattggtaatttacaacgtaggaaggtaaaattaattattaatgagatagattattttcatgcattagatagtctgagtctagccaaagaaattcaaaaaagagcaacgaaagttattcgttgttttgttgaagtgaatataactggggaagaaagcaagcacggctttcgtaaagaagacgtcttacctttcattcaagaacttgctgatttggacaaaattcaaatcgtcggtctaatgactatggcaccttttggggcaagtgaagaagtattacatgcaacatttagagaattaaaagagctgcaaatgaccgtaaatgagaaacatttatcttttgctccttgtacagaacttagcatgggaatgagtaacgatttcccaatcgcagttgaagaaggtgcaacttttatacgaatcggaacagcgttattcagagat

SEQ ID NO: 3960 - DNA, 420 bp, Enterococcus faecalis
gtggctaaaaaagtagaaaaaatcgttaaattacaaattcctgcggggaaagcaacaccagctccaccagtaggtccagcgttaggtcaagcaggtatcaacatcatgggattcactaaagaattcaatgctcgtacagctgaccaagcaggcttaattattccagtagtaatctctgtatatgaagatcgttcatttacattcattactaaaacaccacctgctgcagtcttattgaaaaaagctgcaaaaatcgaaaaaggttcaggtgaaccaaacaaaactaaagttgcaacagtttcaagcgatcaagtgaaagaaatcgctgaacttaaaatggcagacctaaacgccgctgacgttgaagcagcaatgcgcatggttgcaggaactgcacgaagcatgggtatcatcgtagaa

SEQ ID NO: 3961 - DNA, 477 bp, Enterococcus faecalis
gtaattgacttgttaactgatcaggattaccgtgccgacttgttcccagttggtcgcttggataaagataccgaaggcttgcttctattaacaaatgatggccagttagcgcatcaattattatcacccaaaaagcatgtggataaagaatatttagctgaagttgagggacttgtgacagtggaagattgtcaactgtttgcgcaaggatttgccttgaaagatggagaaatggttaaaccaagtcgtttagtcattgagacgatcaatgaggaagaagggacttccgtagtccgtttagtgattcaagagggaaaattccatcaagtcaaacggatgttagccactgtaggcaaacctgtgacgtatttaaaacgattacgaatgggcgaactatggttggatgaaacgttagaactaggggaatatcggcccttaacagaagccgaattgcaacaactacaacctaaacaatca

SEQ ID NO: 3962 - DNA, 687 bp, Enterococcus faecalis
atggctaaaaagagcaaaaaaatgcaagaagcattgaaaaaagttgatgctacaaaagcttactcagttgaagaagcagtagctttagcaaaagatacaaacatcgcgaaatttgacgcaacagttgaagttgcttacaaattgaacgttgaccctaaaaaagcagaccaacaaatccgtggagcagttgtgcttccaaacggaactggtaaaacacaaactgttttagtattcgctaaaggcgaaaaagctaaagaagctgaagctgctggtgcagatttcgtaggcgacgacgacatggttgcaaaaatccaaggtggatggttcgactttgacgtagttgttgcgactcctgacatgatggctacagttggtaaattaggccgtgtcttaggaccaaaaggtttaatgccaaaccctaaaactggtactgtaacaatggacgttacaaaagctgttgaagaagttaaagctggtaaagtaacttaccgcgttgacaaagctggtaacatccacgtaccaatcggtaaagtttcatttgataacgaaaaattggttgaaaacttcaacacaattaacgacgtattattgaaagctaaaccatcaactgctaaaggtcaatacatcaaaaacatttcagtaacaacaacatttggacctggaatccacgttgaccaagcttctttc

SEQ ID NO: 3963 - DNA, 2007 bp, Enterococcus faecalis
atggctaaaaagacaattaaagatgtagatttaaaagacaaaaaagtccttgtccgtgttgactttaacgttccgttaaaagatggcgtgatcacaaacgataatcgtatcgtagcggctttaccaacaatcaaatacgtgattgaaaatggcggaaaagcaattcttttctctcatttaggtcgtgtaaaaacagaagaagacaaagctggcaaatcattaaaaccagtggctgaacgtttaagcgaattactaggtcaaccagttacttttgttccagaaacacgtggtaaagaattagaagacgctgttaacaatatgaaagacggcgacgttttagtatttgaaaacactcgttttgaagatgttgacggcaaaaaagaaagcggcaatgacgctgaattgggtaaatactgggcttctttaggcgatgtatttgtcaatgatgcttttggtactgcacaccgtgcacatgcctcaaacgttggaattgcttcaactggtatcccaacagttgctggtttcttaatggaaaaagaaattaaattcatcggcgaagctgttgaaaatccaaaacgtccattcgtagcaatcttgggtggcgcaaaagtttctgacaaaatcgctgtcattgaaaacctaattgaaaaagccgacaaaattttaatcggtggcggtatggcttacacattcatgaaagcacaaggctatagtgttggtttatctttacttgaagaagataaagtggacttagcgaaaagcttaatggaaaaagctggcgacaaattagtattaccggttgatacagttgtctctaaagagttcagcaatgacgctcctttccacacggttccttcaactgaaatcccagatgatgaagaaggcttggatattggtgaaaaaacaattgaattattcgctaacgaattacaaggtgcgaaaacagttgtttggaatggaccaatgggcgtatttgaaatgagtaactttgccaaaggaacaattggtgtttgtgaagcgattgctaatttagaagacgcaacaacaatcatcggtggcggggactctgctgctgcagcaattcaattaggctacgaaaacaaattctctcacatctcaacaggtggcggagcaagtttagaattattagaaggcaaaactttaccaggtttagcttctattaacgataaataattagtttaaaagacaatatttttaaaaaaagaaaaggatgtgcttttcatgcgcaaaccaattatcgctggtaactggaaaatgaacaaaactttaagcgaagcacaaagctttgcagaagcagtaaaaaatgctgttccatcaaacgacgttgttgacgctgtgattggatctccagcattattcttagctcctttagcttggaacctaaaagattctgaagtgaaattagctgcacaaaactgctactgggaaaacgctggtgccttcactggtgaaaactcaccagctgcaattgcagatttaggtgtaaactatgtgattatcggacactctgaacgtcgcgaatatttccacgaaacagatgaagatatcaataaaaaagccaaagcaatctttgcaaatggtatgataccaatcttctgttgtggtgaaactttagaaacgtatgaagctggtaaaacagcggaatggatcgaaggtcaaatcactaacggcttagttggtttatcaaacgaacaagttgcttcaatggttatcgcttacgaaccaatctgggcaatcggaactggtaaatctgcagatgctaatattgcagatgaaatctgtggtgttgttcgttcaacagttgaaaaattatacggcaaagaagtttctgaagctgttcgtattcaatacggtggttctgttaaaccagaaaacatcgctgaatatatggcaaaagaaaacgttgacggtgctttagtcggcggcgcaagcttagaagcagactcattcctagctttattagatgctgtaaaataagaaatcact

SEQ ID NO: 3964 - DNA, 366 bp, Enterococcus faecalis
atggcattaaacattgaaaacatcgttgctgagttagaaacagcaactatcttagaactaagcgaattagttaaagctatcgaagaaaaatttgacgtatcagcagcagctcctgtagcagtagctggaccagcagcaggtggagcagcagaagaacaaactgaattcactgttgaattaacagcagctggcgatcaaaaagttaaagttatcaaagcagttcgtgaagcaactggcttaggcttgaaagaagctaaagctgtagttgatggcgctcctgcaccagttaaagaagctgtttctaaagaagaagcagaagctttaaaagctgctttagaagaagttggcgcttcagtaacagtaaaa

SEQ ID NO: 3965 - DNA, 270 bp, Enterococcus faecalis
atggcacgttaaattcgtttaaaacgtatggggtctaaaaagaagtccttttaccgtattgtatcagctgagtctcggtcttctcgcgaaggacgtttcattgaaactgttggtacttacaaccctttggaagaccctgcacaaattgatttaaaagaagatttagttttagattggttatctaaaggtgcgcaaccttctgatacagttcgtaacatcctttcaaaagaaggcgttatgaaaaaacatcatgaagctaaaaacgttaag

SEQ ID NO: 3966 - DNA, 675 bp, Enterococcus faecalis
gcagtcgatacgtattttgaatctgaagaaggtcaaaagttcttaatgattgatacgtctggtatgcgtaaacgtgggaaagtatacgtatcaactgaaacatatagcgtcatgcgcgcaatgcggtcgattgaacgctcagacattgttttaatggtcttgaatgcagaagaaggtattcgtgagcaagacaagcgtgtgtcgggctacgcccatgaagcaggtcgcggtattattatcgtggtcaacaaatgggatacagtcaaaaaagatacaaatacaatgcgtgattttgaagctgaaattcgtgatgaattccaatatttagattatgcacccattatttttgtgtctgcattaaccaaacaacgtttaaacaaactgcctgaactaattgaaacagtaagtatgaatcaaaacttacggattccttcagcgttgttaaatgacgttgtaatggatgctgtagcaattaatccgacaccaaccgataaaggaaaacgtttgaagattttttatgcaacacaagtggcagtcaaaccacctacatttgttatttttgtcaacgaagaagaactaatgcacttttcttatgcccggtttttagaaaatcaaatcagaaaagcatttacgtttgagggcacgccgattaaaatcattccgcgacgccgaaaa

SEQ ID NO: 3967 - DNA, 273 bp, Enterococcus faecalis
atggcaaataaagcagaattaatcgaaaacgttgcatcttcaactggtttaactaaaaaagatgctactgcagcagtagacgctgtcttttcaacaattcaagaaactcttgctaaaggtgaaaaagttcaattaatcggttttggtaactttgaagttcgcgaacgcgcagctcgtaaaggacgtaacccacaaactggacaagaaattcgtatcgctgcaagcaaagtacctgcattcaaaccaggtaaagcattgaaagatgcagtgaaa

SEQ ID NO: 3968 - DNA, 411 bp, Enterococcus faecalis
atgcctacatttaacctattagtacgtaaacctcgtaaatctaaagtagaaaaatctgattcaccagccttaaacaaaggatataacagttttaagaaaactcaaacaaacgttaactctccgcaaaaacgtggagtttgtacacgtgtgggtacgatgacacctaaaaaaccgaactcagctttacgtaaatatgcccgtgttcgtttgtcaaacttaatcgaagttacagcttatatcccaggtatcggtcacaacttacaagaacacagcgtggtattattacgtggtggacgtgtaaaagacttaccaggggtacgttaccatatcgttcgtggtgcgcttgatactgccggtgttaacgaccgtaaacaaagccgctctaaatacggtacaaaacgtcctaaagct

SEQ ID NO: 3969 - DNA, 279 bp, Enterococcus faecalis
ttattgactatgaatttcaattatgttgcccataaaaaaggtggcggttctacatcaaacggccgtgactctgaatctaaacgattaggcgctaaaagtgctgatggccaaacagttacaggtggttcaattttataccgtcaacgcggaactaaaatttatccaggtgtgaacgttggaatcggtggcgacgatacgttatttgcaaaagttgacggtgtggtacgtttcgaacgtaaaggccgcgacaaaaatcaagtatcagtttatccagtagct

SEQ ID NO: 3970 - DNA, 698 bp, Enterococcus faecalis
atgagaattgatgtattaactctttttcctagaatgtttgaaggaccaatgggggaatcaattattgggaaagctcgggaaaagcagttattagaattgaatgtctctaattttcgcgatttttcagataacaaacaccaaaccggtcgatgattatccgtatggcggttgcgcggggatgcttttaaaagtacaaccgatctatgataacctaaaggcaattgaagaagagacaaaccagcaaccaaaacgggtcatcttattagatccagcaggaaaaccgtttaatcagaaaatggccgaggaattttcacaagaagaacatttagtttttatttgtggacattatgaaggctatgatgagcgaattcgcacgatggtcacagatgaagtttcattgggggattacgttttaacagggggcgaattaggcgcaatggtcatgattgatgcgacagtccgtttattacctgatgtcttaggtaacaatctttctgcacaaacggattcacattccactggcctattagagcatccacaatataccagacctgctattttcaacgatatggaagtccctgccgtgctaacgaatggtaaccataaattaattgcagaatggcaactaaaagaatcattacgacggacctttttgcgtcgacctgacatgttggaatcagtagaaatgacgcctgaaa

SEQ ID NO: 3971 - DNA, 284 bp, Enterococcus faecalis
aaggcgtatgaacacccgtattttagatcaatcagcggataaaatttgtggaaccagcaaaaagacttgaagctaacgtatcaggtccgattccattaccaccagaacgctcactttacacagttattcgtgcgactcataaatccaaagattctcgcaaacaattcgaaatgcgtactcacaaacgtctaattgacattgtgaacccaacaccaaaaacagttgacgctctaatgaagcttgccttacggtcgggtgttaatattgaaatcaaactataaaat

SEQ ID NO: 3972 - DNA, 198 bp, Enterococcus faecalis
atgccaaaacaaaaaacacaccggggattagcaaaacgtgtaaaacgtactggtggaagcggcttaaaacgtggccgtgcctttacatctcaccgtttccacggtaaaactaaaaaacaacgccgtcaattgcgtaaagcaagcatggttgcaaaaggcgattacaaacgtatccgccaacaattagcaagaatgaaa

SEQ ID NO: 3973 - DNA, 306 bp, Enterococcus faecalis
atgtacgcaattatcaaaactggtggtaaacaagtgaaagttgaagtaggtcaagcaatctacgttgaaaaattaaacgttgaggctggcgagaaagttgtttttgacgaagttatcttagtaggtggcgaatctacaaaagttggtgcgccaactgttgcaggcgcaactgttgaaggaactgttgaaaaacacggcaaacaaaagaaagtcgtgactttccaatacaaacctaaaaaacactctcaccgtaaacaaggtcaccgtcaaccgtatacaaaagttatgatcgaagcaatcaacgct

SEQ ID NO: 3974 - DNA, 330 bp, Enterococcus faecalis
atgattaaaggttcttttaaacgaacaggctccggccgaatcgtttcattcgaattaaccgggcatgctgaagcaggtccttatggcagcgatgtggtttgcgcggcagttactgccttaaaatttaccaagtaaaagggaatagacccttaagagggtttgaacccgattgtcgaaattgacgatgtagaaggtggctacctttatgtcgagatgttaacaactgtcaatcaggaacaaaaaaatattgcccaaattctattagaaaatcttttattaggtttacaatcaatagagaacgaaaatactgaatttattcaaataacaaca

SEQ ID NO: 3975 - DNA, 603 bp, Enterococcus faecalis
atgtctcgttatactggaccatcatggaaagtatctcgtcgtctaggtatctctttatcaggtactggtaaagaactagctcgtcgcccttacaaaccaggacaacacggacctaacagccgtggtaaagtttctgaatacggaatgcaattaactgaaaaacaaaaattacgtcatatgtatggcatgaacgaacgtcaattccgtacgttgttcattaaagcaagcaaaatcaaagaaggtaaacacggtgttaacttcatggttttactagaacaacgcttagataacgttgtttaccgtttaggtcttgcaactactcgtcgtcaagcacgtcaattagttaaccatggtcacatcactgtagacggcaaacgtgttgatattccatcataccacgttgaagttggtcaagtgatcggtgttcgtgaaaaatctcaaaacatctcaacaattaaagaagcggttgaagcaactgttggacgtccagcattcgtaagctttgacactgaaaaattagaaggtagcttcactcgtttaccagaacgtgatgaactttacccagaaatcgacgaagcacttgtcgttgaatactacaaccaa

SEQ ID NO: 3976 - DNA, 474 bp, Enterococcus faecalis
atgaaaaaggtattagttgccaatcgtggcgaaattgcgattcgaatttttagagcttgtacagaattagatatccgtacagtagcgatttatgctgcagaagatgagtattctgttcatcgtttcaaagcagatgaagcgtatttagttggtaaggagaaaaaaccaattgaagcctatttagacattgaaaatattatccaaattgccaaaaaatcgggagcagatgccattcatcctggttatggctttttatcagagaacttacgcttcgccgaacgttgtgaagaagaaggaatcatttttgtcggacctaaaacacatcatttagatatttttggcgataaaattaaagcgaaagaagcagctgtagctgcggggattgcttcgattccaggctcagacgggccagtagcaacggtggaagaggtcgtagcttttggtgaaacgcatggctttcctatcatgattaaa

SEQ ID NO: 3977 - DNA, 348 bp, Klebsiella pneumoniae
ctgggggtagtcagccagaacttccgtccggagttcatcaaccgtatcgacgaagtggtggtcttccatccgctgggcgagaaacatattgcctctattgcccagatccagctgcagcgtctgtataaacgtctggaagagcgcggatatgaagtgcagatgtccgatgaggcgctgaagctgctgagcgccaacggttacgatccggtatacggcgcgcggccattgaaacgtgctattcagcagcagattgagaacccgttagcccagcagatcctttccggtgagctggttccgggtaaaaccatcgagctggtagtaaaagacgaccgcattgtggcagtgcag

SEQ ID NO: 3978 - DNA, 659 bp, Klebsiella pneumoniae
ttgcaatggattatctctggttttctcaccaccgtctgggtcagcgtcgccgggatcctgctcgccaccctgctggcggtcctgctgctggccctgcgcctcggcggcggacgcgcggggcgcggactggtggccgcgtgggtctcgttgtttcgcaacactccgctgctggtccagctgctgttctggtactttgccgcctggaacctgctgccgctggcggtgaaggaggtggtgaacgacgaacacgcctggtccattctgccgggcaacgtctggtggctgacgccggagttcctctgctcaatgtgggggctgggggtctttacctccgcctttctggtggaagagatcgcctccggactgcgcgccgtcagccacgggcagcgggaagccgcgctgtcgcagggctttacgccgtggcaggagctgcgctttatcctcctgccgcagggctggccaacgcctggcagccgattgtcggccagtatcttaacctgatgaaactctcatcgctggccagcggcatcggctttgcggaactgacctatcaggtgcggcagattgagagctataacgcgcacgccctggaggcgtttgccgtcggcaccgcgctgtacctggcgctgggggtggcgatgggcgtggcgctcacgcgt

SEQ ID NO: 3979 - DNA, 670 bp, Klebsiella pneumoniae
gcgctggccgaagcgatcgtgggtgtcgccaacgggccggcgtgcgcaccaccgcgctgctgaccgatatgaatcaggtactggcctccagcgccggcaacgccgttgaagttcgcgaaggctgcagttcctgaccggcgaataccgcaacccgcgcctgttcgacgtgacaatggcgctgtgtgtggaaatgctgatctccggcaagctggcggcggacgatgccgaggcgcgcgcgaactgccaggcggtgctggataacggtaaagcggcggaagtgtttggccgtatggtcgcggcgcagaaagggccgagcgactttatcgagaattatgctaattatctgccgacggcgatgctgagcaaagcagtctatgctgataccgaaggttttatcagcgcgatggatactcgcgcgctgggcatggcagtggtttctatgggcggcggccgccgtcaggcatcggacaccattgactatagcgttggctttaccgagatggcgcgtctgggtgaccgcgtcgacggacagcgtccgctggcggtgatccatgccaaagacgagaacagctggcaggaggccgcgaaagcggtcaaagcggccattaaactggacgataaagccccggaaattacaccgacagtctatcgccgtatcactgaatagcga

SEQ ID NO: 3980 - DNA, 726 bp, Klebsiella pneumoniae
accaccttcaatgatattgatgccgtcatccatctggcgggtgaccccatcgctgataaacgctggacggccgagcagaaacaacgcttgtgccatagccgctgggatctcacgcagcggctggtgggcctgatccacgccagcgacccccctccctccgtgctgatcagcgggtctgccatcggctactatggcgacctcggcgaggtggtggtgaccgaagaagagccaccgcacaatgagtttacccataagctgtgcgcccgctgggagcaaattgcctgcgaagcgcaaagcgagcgcacccgcgtctgcctgctgcgcaccggcgtggtactggctccgcggggcggtattctcggcaaaatgacacccgcctttaagctcggcctcggcgggcctatcggcaacggcagacagtacctggcctggatccatatcgacgatatggttaacggcattctgtggctgctggataacgatctgcgcggtccgttcaatatggtttctccctacccggtgcataacgagcagttcgcccatgcgctgggtcatgcgctccatcgaccggcgattttccgcgttcccgccgccgctatccgcctgttgatgggggaatccgccgtcctggtgctcggcggccagcgcgcgctgccaaagcgtctggaggccgccggctttgccttccgctggtacgatctggacgaagcgctaaaggatgtgctg

SEQ ID NO: 3981 - DNA, 168 bp, Klebsiella pneumoniae
atcaataaaaccgaccttgccccctatgttggcgcgtcgctggaggtgatggcgagcgatacccagcgtatgcgcggcgatcgcccatggaccttcaccaatctgaagcagggcgacggcctgagcaccattatcgccttcctcgaagacaaaggcatgcttggcaaa

SEQ ID NO: 3982 - DNA, 621 bp, Klebsiella pneumoniae
attccggttgccatccgcaccaccatcgcccggctgattattttctttatcggcaccgtgtttgtgctggcggcgctgatcccgatgcagcaggcgggagtggagaaaagccccttcgtgctggtgtttgagaaggtgggcatcccttatgcggcggacatgttcaacttcgtgatcctgacggcgatcctgtcggcggctaactccggcctgtacgcttcggggcggatgctctggtcgctatcgaacgagaagacgctgccggcctgctttgccaaagtcaataaacggggcgtgccggtgaccgccctgtcggtgagtatgctgggcggcgtgctggcgctgttctccagcgtggtggcgccagatacggtgtttgtcgcgctgtcggcgatctccggttttgcggtggtggcggtgtggttgagcatctgcgcctcgcactttatgttccgccgccgccatctgcagcagggtaaggcgctgagcgatctgcagtatcgcgctccctggtatccggtggtgcccgttctgggctttgtgctgtgcctggtggcctgcgtgggcctcgcttttgacccgagccagagaattgcgctgtggtgcgggatcccctttgtg

SEQ ID NO: 3983 - DNA, 561 bp, Klebsiella pneumoniae
gtttacgttactggtaatattaccgtagatgaaacctggtccattccggatataccgaaaaaaggagcctccattcacggcgttaaagtgtcgcaggatatcggcggtaaaggcgcgaaccaggcgattatattatcccgctgcggaatagagacgcgtttaattgccgccacgggaaatgacagcaacggcgcgtggatccgccagcagataaaaaatgaaccactgatgctactacccgacggccatttcaatcaacatagcgatacctcgattattttaaatagcgctgatggcgacaacgccatcattaccactacggcggcggccgatacattcagcctggatgaaatgattccgcatatggcggatgccgtcgctggcgatattctgctacagcagggcaatttctccctcgataaaacgcgggcgctgttccagtacgccagaagccgcggcatgacgacggtattcaacccctcacctgtcaatcctgacttttgccatctgtggcccctcatcgacatcgcggtggtcaatgaatccgaggccgagctgctc

SEQ ID NO: 3984 - DNA, 1263 bp, Klebsiella pneumoniae
accttccagctggcgaaagaagatgcgcagatggccctgttctcgccttatgacgtcgaacggctgtacggcaaacctttcgccgattgcgccatcgggacctctatccgcagctggtggccgacgagcgggtccgcaagcgctggatccgcgcccgcgacctgttccagcgcctggcggagatccagtttgaatccggctacccgtacatcatgtttgaagacaccgtgaaccgcgccagtccggtggccgggcgggtcaccatgagcaatctgtgttcggagatcctgcaggtcagtacgccgtccgcctataatgaagacctcagctatgcgcatatcggggaagatatctcctgcaacctcggctcgctgaacatcgcccacaccatggactcgccggatttcggccgcacaatcgccaccgcggtgcgcgccctgaccgccgtgtccgacatgagcgatattcagtcggttccctcggtggcggccggcaacgcggcctcccacgccatcggcctggggcagatgaatctgcacggttacctggcgcgggaaggcattgcctacggcagcccggaggggctggacttcaccaatatctacttctacaccgtgacctggcacgcgctgcacacctcgatgcagctggcccgcgagcgcggccagcgcttcgccggcttcgagcagtcgcgctacgccagcggggcgtacttcgacaaatatctgcaggaggagtggcagccgaaaaccgaacgggtgcgcacgctgttcgcccgcgccggcatctctctgcccgaccgggaaagctggcgccactgcgcgacgatgtcatgcgctatggcatctacaatcgctatctgcaggcggtgccgcccaccggctcgatctcgtacatcaaccatgccacctccagcattcacccgctcgtctcgaagattgagatccgcaaagaggggaaaaccggacgggtgtactaccccgcgccatttatgaataacgacaatctggccctctaccaggatgcgtatgagatagggccggagaagatcattgacacttacgccgaggcgacgcgccacgtcgaccaggggctgtcgctgaccctgttcttccccgataccgccaccacccgcgatatcaacaaggcgcaaatttacgcctggaagaaaggcatcaagacgctctactacatccgtctgcgccactggcgctggaaggcactgaaattgaaggctgcgtgtcctgcgcgctgtaaggagaa

SEQ ID NO: 3985 - DNA, 1485 bp, Klebsiella pneumoniae
atgaacaaagaaattttggctgttgttgaagccgtttccaacgaaaaagcgctgccgcgtgagaaaattttcgaagcgctggaaagcgcgctggcaacggccaccaagaaaaaatacgaacaagagatcgacgttcgcgttgaaatcgaccgcaagagcggcgatttcgataccttccgtcgttggctggttgtagaagaagtcacccagccaacgcgcgagatcacgctggaagcagcgcgtttcgaagatgaaagcatgaacgtcggcgactatgtcgaagatcagatcgaatctgttaccttcgaccgtatcaccacccagaccgctaagcaggttatcgtgcagaaagtccgcgaagccgagcgcgcgatggtggttgatcagttccgcgagcacgaaggtgagatcatcaccggcgtggtgaaaaaagtgaaccgcgacaatatcacactggatctgggtaacaacgctgaagccgtgatcctgcgtgaagatatgctgccgcgtgaaaacttccgtccgggcgaccgcattcgcggcgtactgtacgctgtccgtccggaagcgcgtggcgcccagctgttcgtcacccgttccaaacctgagatgctgatcgaactgttccgcatcgaagtgccggaaatcggtgaagaagtgctggagatcaaagcggcggctcgcgatccgggctctcgtgccaaaatcgcggtgaaaaccaacgacaagcgcatcgacccggttggcgcttgcgtcggtatgcgcggtgcgcgtgtgcaggccgtgtcgactgagctgggtggtgaacgcatcgatatcgtcctgtgggatgataacccggcgcagttcgtgattaacgctatggcgccggcagacgtcgcgtccatcgtggtggatgaagataaacacaccatggatatcgcggtagaagcgggcaacctggcgcaggcgatcggccgtaacggtcagaacgtccgcctggcttcacagctcagcggctgggaactcaacgtcatgaccgttgacgatctgcaggctaagcaccaggcggaagcgcatgccgctatcgataccttcaccaaatatcttgatattgatgaagatttcgcgacagtgctggttgaagaaggcttctcctcgctggaagagctggcctatgtgccgatgaaagaactgctggaaatcgacggtctggatgaagccaccgttgaagcacttcgtgagcgtgcgaaaaacgcactgactacgctggcgctggctcaggaagaaagcctgggagataacaaacctgccgatgatctgttgaatctcgaaggtctggatcgtgccctggcattcaaactggctgcccgtggtgtttgtacgctggaagatctcgccgagcagggcgttgatgacctggctgatatcgaagggatgaccgacgagaaagctggcgagctcatcatggccgctcgcaacatttgttggttcggcgacgaagcg

SEQ ID NO: 3986 - DNA, 267 bp, Klebsiella pneumoniae
atgaaatttgaactggataccaccgacggtcgcgcccgccgcggtcgcctggtgtttgagcgcggcgtggtggaaacaccggcctttatgcccgttggcacctacggcaccgtcaaagggatgacgccggaagaggtggaagccaccggcgcgcagattattctcggcaacaccttccacctgtggctgcgcccgggtcaggagatcatgaagctgcacggcgatctgcacggttttatgcagtggaaaggaccgatcctgaccgac

SEQ ID NO: 3987 - DNA, 489 bp, Klebsiella pneumoniae
atgcgccggatattatcggtattactggaaaacgaatcgggcgcattgtcccgcgttatcggcctcttttcccagcgtggctataatatagaaagcctgactgtcgcgccgacggacgatcccactctctccagaatgaccattcaaaccgtgggcgatgaaaaagcgattgagcagattgaaaagcaactgcacaagctggtggatgtcctgcgggtcagcgagctggggcagggggctcatgttgaacgcgaaattatgctggtgaaggttcaggccagcggctatggccgtgaagaagtgaagcgcaacaccgaaatcttccgcggacagattatcgacgtgacgccttctatctataccgtccagctcgccggcaccagcgataagctggatgcatttctggcctcgctgcgcgatgtcgctcggattgtggaagtggctcgctccggcgtggtcggcctgtctcgcggtgataaaatcatgcgc

SEQ ID NO: 3988 - DNA, 458 bp, Klebsiella pneumoniae
ctgcccgatgaaggttattgtggtcctggcgccgttgaccctcaatgcacattcctgccgatgtcttgcctatttctccatatggctggagaatttgtagcggcctgcgcacaatgtacaggtgaagaaacatcgggagagacggtggcaatgcaacacgcagagatatgtcggacattaacggagaagattaacctgctgaaagataagcacgaaatgttaagttcgttgctgcctgacgtccgtttgctgtacggaacgcaaccggggccccggacgccggtgatgtatcagccggggatcgtttttctcttttcgggccataaaattggttatatcaatgaacggacttttcgctacgatacaaacgaatatttactgttgaccgtgccgctacctttcgagtgcgaaaccttgtccaccccggagtgcccctcgccgggatgcgcctgaacgtc

SEQ ID NO: 3989 - DNA, 1020 bp, Klebsiella pneumoniae
atgatgcctcgatctctttcgcaaaccggcccggagaagcgacgcttcacctggccgaagggcaccccgcagattattgccctgctgctggttctgctggtagacagcctggtggcgccccatttttatcaggtggtgctccaggatggccgcctgtttggcagcccgatcgatattctcaaccgcgccgcgccggtggcgctgctggcgattggcatgacgctggtgatcgccaccagcggcatcgacctgtcggtaggggcggtgatggcgattgccggcgcgacggccgcctcgatgaccgtcgccgggcacagcctgccggtggtgctgttggccgcgctggccgcgggcgcgctggccggattgtggaacggcatcctcgtggcggtccttaagatccagccctttgtggcgacgctgatcctgatggtggccgggcgcggggtggcgcagttgatcaccgccgggcagatcgtcacctttgattccccggccctggcgtggctcggcagcggatcgtttctgctgtttccgacgccggtgatcgtcgccgccgctacgctgctgctgttctggctgtttacccgtaaaacggcgctgggcatgtttattgaggcggtagggatcaacatccgcgcggcgaaaaacgccggtgtcaatacccgcatcgtggtgatgctggcctatgtcctgagcggcgtctgcacggcgatcgccgggatcatcgtggcggcggacatccgcggcgcggatgccaataacgccgggctatggcttgagctggacgccattctggcggtggtcatcggcggcgcctcgctgatgggcgggcgctttaacctgctgctctcggtggtgggggcgctgattatccagggaatgaacaccgggattttgctctccggcttcccgccggagctcaaccaggtggtgaaagcggtggtggtgctgtgcgtactgattgtccagtcgccgcgctttatcggtttactgaaaggggtacgcggccatgataaa

SEQ ID NO: 3990 - DNA, 1518 bp, Klebsiella pneumoniae
atggtcagcaataatagcgaacggtcaggcgaatatttgttggagatgagcaacatcaacaaatcgtttcctggcgtcaaggctcttgataatgtcaacctgaaggttcgtccgcactccattcatgcgttaatgggtgagaacggcgccggtaaatcgacattattaaaatgcctttttgggatctatcaaaaagattccggtagcattctttttcagggaaaagagatcgatttccattcggcgaaagaagccctggaaaacggtatttcgatggtgcatcaggaattaaacctggtattacagcgttcggtcatggataacatgtggctcgggcgctatccaactaaaggcatgtttgtcgatcaggacaaaatgtaccgggataccaaggccatttttgatgagctggatattgatatcgatccgcgcgcccgcgtcggtaccttatcggtatctcagatgcagatgattgagatcgcgaaggcgttttcctatgacgccaaaatcgtcatcatggatgagccgacgtcatcgctgacggaaaaagaggtcaaccatctgtttaagatcatccgtaagctgaaagatcgcggctgcggtatcgtctatatctcgcataaaatggaagaaattttccagttgtgcgatgaaataaccatcctgcgcgacggccagtggatcgccacccagccgctggaagggctggatatggataagatcatcgccatgatggtcgggcgttcgcttaaccagcgttttccggatcgcgaaaacactccgggcgaagtgatcctccaggtgcgcaatctcacctcgctgcgccagccctccattcgcgatgtctcctttgacctgcataagggcgaaattctcggtatcgccggcctggtgggcgctaaacgcaccgacatcgtggagaccctgttcggcatccgtgagaaggccagcggcaccatcacgctgcacggcaagaagatcaacaaccacagcgccaacgaggcgattaaccacggttttgcgctggtgaccgaggagcggcgctctaccgggatttacgcctatctggatatcgggtttaactcgctgatctccaatattaagaaatataaaaacagcgtcggcttgctggataactcgcgaatgaagagcgatacccaatgggttattgactcgatgcgcgtcaaaacccccggtcagcatacgcagattggctcgctttccggtggtaaccagcaaaaggtcattataggccgctggctgctgacccagccggagatcctgatgctggatgagccaacgcgcggtatcgacgtcggcgccaagtttgaaatctatcagctgattgccgaactggctaaaaaagacaaagggatcattattatttcttccgaaatgccggaactgctggggattaccgaccgcattctggtgatgagcaacggcctggtcgcgggcattgttgagactaaaaccaccacgcaaaacgaaatactgcgtcttgcgtcattgcacctt

SEQ ID NO: 3991 - DNA, 234 bp, Klebsiella pneumoniae
gtgaaactgagtcttaacacatccggattgccgctgcaggacctggtgttcggcgcatccgtctatttccctccgctgttcaaagccgtcttgttgggtttctttatctggttgtttttacatcgccagctgcgtgactggatgtatgcgggcgacatctggcacccgctactaatggatctctccctgttcgcgctcttggtctgtctggccctggtattgctcattgcctgg

SEQ ID NO: 3992 - DNA, 579 bp, Klebsiella pneumoniae
ttctggaatattgcgaaccgcttcggcagcggcgttaacggttcgtttcccggtagcccggacactgggcctggactgacagcggcaggtatcgatctgattaagcaggccaatgccttgaagatgcagatggacgtgtctcatatgaatgaaaaagcgttctgggataccgcccatcactcgacgtcaccgctggtggccacccactccaatgcccacgccctgtgcccgcagccgcgcaatctgaccgaccagcaactgcgggcgatccgcgacagcggcggcgtggtgggcgtcaatttcggcaatgctttcctgcgcgccgacggccggcgcgatagcgacacgcccttaaccaccattgtccggcatatcgactatcttattaacataatgggtgaggatcatgtggcccttggctcggattttgacggcatcaccctgccggacgagctgggcgatgtggccggcttaccgcggcttatcaatacgttgcgcgctacgggctatgatcaattggtgctggataagctgctgtggcgtaactggctacgggtattaaaaaatgtttggcaacaa

SEQ ID NO: 3993 - DNA, 190 bp, Klebsiella pneumoniae
caggcgctgcagctgcgcaccagactgcgcgacttcgagataccggaagatgtgtgccgcttcctgctgaagcggctggatcgcgagatgcgttcgctgtttatgaccctcggatcagctggatcatacctcgattaccgctcagcgcaagctgacgatccccttcgtgaaagagatccttaagctttag

SEQ ID NO: 3994 - DNA, 415 bp, Klebsiella pneumoniae
gtcgacagcattgaagagcacaccatgcactccgaatatgccgaagtgccgcagaggtggtcgatgcggtgctggcggcgaaacgcgcggcaaccgcgtgatcgcggtgggcactacctcggtacgttcgctggagagcgcggcgcaggcggcgaaagacgcgctgatcgcgccgttcttcgacgatacgcagattttcatctacccgggttatcagtaccaggtgatcgatgcgctggtgactaacttccatctccctgaatccacactgattatgctggtgtcggcgtttgcgggttatcagcacaccatgaacgcctataaggtggcggttgagcagaaatatcgcttttttagctacggggatgcgatgtttatcacgtacaatccgcaggctatttctgagcgtccctga

SEQ ID NO: 3995 - DNA, 611 bp, Klebsiella pneumoniae
cgttttgacttcctcaaaatgtttatgcgggagaatctctgttcctgctcccgattaagaccagctacaatagcacactatattacaacgcaaagccgtaaaacccaacgttaaacgaagaagctgtatatggcacaacgagtacaactcaccgcaacggtgaccgaaaatcaactcggtcaacgcttagatcaggctttggccgaattgttccctgattattcgcgatcgcggataaaagaatggatcctcgaccaacgcgtattagtcaatggcaccattggcgataaaccgaaagaaaaagtgctggggggagaacgcatcgctatcgatgtcgaaatcgaagaagaggcgcgcttccagccgcaggatattccgctcaatatcgtttacgaagatgatgacatcatcgtgatcaataaaccgcgcgatctggttgtacatcctggcgcgggcaaccctgacggtactgtgctgaatgcgctgctgcactactatccgcctattgccgatgtgccgcgcgcgggtattgttcatcgtctggataaagacaccaccggtctgatggtggtggcgaaaaccattccggcgcaaacccggctggtggagtc

SEQ ID NO: 3996 - DNA, 264 bp, Klebsiella pneumoniae
gtgatgcgcaatgttatcgctgccgtcatggcctcaacgctggcgctaagtgcatatagccaggccgctgaagtcgttaccagcgttaactggctccccggagacgaagggggacagcgcggtagccaaagccatatgtttgacggcataagtttaaccgagcagcaacgtcagcagttacgggatcttatgcaacgggcacgccacgacaggctccccgttaatgttagcgaaatggagacaatgcatcggcttgtcaccgca

SEQ ID NO: 3997 - DNA, 390 bp, Klebsiella pneumoniae
gatcgggtgctgactgcgctgcgcgaagcggccaaactcgataatacggtggtaattattaccggcggccacggcaagccgctgaatgcgaaacacgacgcgttcgactggtcgcgcgacagctgcaggtgccgctggttattcactggccgggcacgccggcgcaggagattgccaccctgaccggtaacaaagatgtgatgactacgctgatgcagcgcctgcttcacgtttcgacgccggccaatgagtactcgcagggagaagatctgttcagcgccgcgcggcgtgcgtaacttgggtcaccgcggccaacggcgatacgctggccatcacgaccccgaccatcaccgtggtcctcaaccataacggcacctataccacctggag

SEQ ID NO: 3998 - DNA, 603 bp, Pseudomonas aeruginosa
gtgaagcgctggctcggcgttgccctcggctgcagcgggctggcgatcgccctggcctgcgccggcgtgttgctggcgcctgccgatatggccgcttcctcgtcttctccgtcgccagccaggacggttgcggcactgcccgcggtcgacgaccgtccgccgccgccggcgccggtgcgatcgcaagcggcagcaccggcgtacgaggcggagccgccggtggcggaactggatcgcgagcaggcgatccagttcatgcagatgctgcgcgacgagggcgacccgcgcagcccgccgctcggcggcctgcaaccacgccagggcgcgacggcgcaggagctggccgatccgaagcagtaccaggccttcgaggaacgacagacccgcgaactggtacaggcctacaccagcggcgtacagcagataccggaaatccgcgcgcggatcgaggcggccgaacagggtggcgagcgcagcgccgaggaaatcgacgaggctcgcgccgcccttggacagttggagatgatgcgcgacaagctgcagcgggaatcgccgcaactgctgcccggcgacagcgcaccgacatcgccggcggcgccctga

SEQ ID NO: 3999 - DNA, 687 bp, Pseudomonas aeruginosa
atgttttcttcgtccaagctggtcaacgcggttgcccagcgcctgctcgacaccatcgagcagggtcgctgggtcgccggccagatgttgcccggccagcgcgagctggctgaacagatggaaatcagccggccgagcctgcgcgaggcgatcatggtcctggagaccctgggcgtggtccgttcgctgccgggcaagggcgtgatggtcctcgaacgcagcgaaccgctgcgcgaggtcgcggcgcccggcgaggcgaccatggaagacgtcctgcaactgcgctatgcgctggagccgttcatcgtcggcatcgtcgcgcagagcgccggggcggcggagatcagcgaactgcggctgttgctgctggacctgcgcgaagcggtcgaggatggcgacccgcaggctctggttgaggcctacacggccttccaccggcgcctggtgaagctcacctcgaacccgatcttcctcagcgtttccgaacagatcggcagcgccctggaacgcagcgacaacctggtgcgccgccagccggaatacgccgaggagatcctccaggaacacgacgccatcctccgtgcgatccgccagcacgacagcgagcgggcgagccaggcgatgcgccagcacatcctcaacgaaggcgcgcgcctgaacatcgacctgcgcttgccgcaggtctga

SEQ ID NO: 4000 - DNA, 1428 bp, Pseudomonas aeruginosa
atgtccaaagtcgtactggcttcacaactgccgaacaagcgcaacgcctcgctcgcgcccggcctgaaacaacgccacgtcaccatgctgtcgatcgccggggtgatcggcgccggcctgttcgtcggctccggccatgccatcgccgccgccggcccggccgccctgctcgcctacctgatcgccggcaccctggtggtgctggtcatgcgcatgctcggcgaaatggcggtcgcctcccccgataccggttccttctccacctacgccgaccgctccatcggccgctgggccggtttcaccatcggctggctctactggtggttctgggtgctggtgatcccactcgaagcgatcgccgccgcggccatcctcaacgcctggttcccggccatcgacacctggatcttcgccctcgcggtgaccttcctgctcaccgtcaccaacctcttcagcgtggcccgctacggcgagttcgagttctggttcgcgctgctcaaggtgatcgccatcatcgccttcatcgtgctcggcgcggtggccatcgtcggcggcctgccggagcgtgaggtcagcggcctgtccagcctgatggcgagccacggcggcttcgtgccgaacggctacggcgcggtgctcggcgccctgctgacgaccatgttcagcttcatgggcaccgagatcgtcaccatcgccgccgccgagtccaaggacccggcgaagcagatcacccgcgccaccaactcggtgatctggcggatcggcctgttctacctggtgtcgatcttcattgtgatctccatcgtgccgtggaacgacccgctgctgatccaggtcggctcctaccagcgcgccctggagctgctggacatcccgcacgccaagctgatcgtcgacctggtggtactggtcgccgtggccagttgcctgaactcggcgatctacacctcgtcgcggatggtcttctccctggccaagcgcggcgacgccccgagcgtgctcaagctgaccaacaccgcccacgtaccacgcccggcggtgctggccagcaccgcggtgggcttcctcaccaccatcgtcaactacttcgcaccggagaaggtcttcaccttcctcctcgccagctccggcgccgtggcgctactggtgtacctggtgatcgccgtggcccagttgcgcatgcgcaagcaattgcaggccagcggccagcccatcgagttccgtatgtggctatatccctggctgacctgggcggtgatcctgttcatcgtcgccgcgctgagcatcatgctgatcatgccggagcaccgacacgaggtgttcgccaccgctctgctgacgatcttcaccgtctgcctcgggctgctcaacgcgcgacgcaagccgcgcctcggcgaggactacgccgggaagacggcgcgggtctga

SEQ ID NO: 4001 - DNA, 897 bp, Pseudomonas aeruginosa
gtggccctgcaggtcgccagtgcgccccacggcagcagcgaggacagcacctcggcgagcctgccggcgaactatccctatcacacgcggatgcgccgcaacgagtacgagaaggccaagcacgacctgcagatcgaactgctcaaggtgcagagctgggtgaaggagaccggccagcgcgtggtggtcctgttcgaaggccgcgacgccgccggcaagggcggcaccatcaagcgcttcatggaacacctgaacccgcgcggcgcgcggatcgtagccttggagaaaccgtcctcccaggagcagggccagtggtatttccagcgctacatccaacatctgcccaccgccggcgagatggtcttcttcgaccgctcctggtacaaccgcgccggcgtcgagcgggtcatgggcttctgttcgccgctgcaatacctggagttcatgcgccaggcgccggagctggagcgcatgctcaccaacagcggcatcctgctgttcaagtactggttctcggtgagccgcgaggaacaactgcggcgcttcatctcgcgccgcgacgatccgctcaagcactggaagctgtcgcccatcgacatcaagtctctggacaagtgggacgactacaccgccgccaagcaggcgatgttcttccataccgacaccgccgacgcgccgtggacggtcatcaagtccgacgacaagaagcgcgcgcgactcaactgcatccgccacttcctgcactcgctggactacccggacaaggaccggcgcatcgcccatgagcccgacccgttgctggtggggccggcctcgcgggtgatcgaggaggacgagaaggtctacgccgaggcggccgccgcgccgggccacgcgaacctggatatcccggcctga

SEQ ID NO: 4002 - DNA, 1383 bp, Pseudomonas aeruginosa
atgaccgctcagctcaacccgcagcgcgacacccgcgactaccagcaactggacgccgcgcaccacatccacgccttcctcgaccagaaggcgctgaaccgcgaaggcccgcgggtgatggtccgcggcgatggcctgcagctctgggacaacgacggcaagcgctacctggacggcatgtccggcctctggtgcaccaacctcggctacggccgccaggacctcgccgccgccgccagccgccagctggaacaactgccgtactacaacatgttcttccacaccacccacccggcggtggtggagctttccgagatgctcttcagcctgctgccggaccactacagccacgcgatctacaccaactccggctccgaggccaacgaggtgctgatccgtaccgtgcggcgctactggcagatcctcggcaagccgcagaagaagatcatgatcggccgctggaacggctaccacggctcgaccctgggcagcaccgcgctcggcgggatgaagttcatgcacgagatgggcggcatgctgccggacttcgcccacatcgacgaaccctactggtacgccaacggcggcgagctgagcccggccgagttcggtcgccgcgcggcgctgcaactggaggagaagatcctcgaactgggcgcggagaacgtcgccgccttcgtcgccgagcccttccagggcgccggcggcatgatcttcccgccgcaaagctattggccggagatccagcgcatctgccggcagtacgacgtgctgctgtgcgccgacgaagtgatcggcggcttcggccgcaccggcgaatggttcgcccacgaacacttcggcttccagccggacaccctgtccatcgccaagggcctgacgtccggctacatccccatgggcggcctggtactcggcaagcgcatcgccgaggtgctggtggagcagggcggggtgttcgcccacggcctgacctattccggccacccggtggcggcggcggtggccatcgccaacctcaaggcgctgcgcgacgagggcgtggtcacgcgggtcagggaggagaccggcccctacctgcaacgctgcctgcgcgaggtcttcggcgaccatccgctggtcggcgaggtccagggcgccggcttcgtcgccgcgctgcagttcgccgaggacaaggtgacccgcaagcgcttcgccaacgagaacgatctggcctggcgctgccgcaccatcggcttcgaggagggcgtgatcatccgctccaccctcggccgcatgatcatggccccggcgctggtggccgggcgtgccgagatcgacgaactgatcgacaagacccgtatcgcggtggatcgcaccgcgcgcgagatcggcgtgctctga

SEQ ID NO: 4003 - DNA, 1452 bp, Pseudomonas aeruginosa
atgcaactcaaagatgccaagctgttccgtcaacaagcctacgtcgatggcgcctgggtggatgccgacaacggccagaccatcaaggtgaacaacccggccaccggcgagatcatcggcagcgtgccgaagatgggcgccgccgagacccgccgcgccatcgaggctgccgacaaggccctgccggcctggcgtgcgctgaccgccaaggagcgcgccaacaagctgcgccgctggttcgacctgatgatcgagaaccaggacgacctggcccgcctgatgaccatcgagcagggcaagccgctggccgaggccaagggcgagatcgcctacgccgcctccttcctcgaatggttcggcgaagaagccaagcgcatctacggcgacaccattcccggccaccagccggacaagcgcatcatcgtgatcaagcagccgatcggcgtgaccgcggccatcacgccgtggaacttcccctcggcgatgatcacccgcaaggccggcccggccctggccgccggctgcaccatggtgctcaagcctgcttcgcagaccccgtattccgccctggccctggccgaactggcagagcgcgccggcattccgaagggcgtgttcagcgtggtcaccggtagcgccggcgaagtcggcggcgagctgaccagcaacccgatcgtgcgcaagctgaccttcaccggttccaccgaaatcggccgccaactgatggccgagtgcgcccaggacatcaagaaggtgtccctggagctgggcggcaacgcgccgttcatcgtgttcgacgacgccgacctggacgccgccgtcgagggcgcgctgatttccaagtaccgcaataacggccagacctgcgtctgcgccaaccgcctgtacgtgcaggacggcgtgtacgacgccttcgtcgacaagctgaaggccgccgtggccaagctgaacatcggcaacggcctggaagccggcgtgaccaccggtccgctgatcgacgccaaggccgtggccaaggtcgaggaacacatcgccgacgcggtctccaagggcgccaaggtggtttccggcggcaagccgcacgccctcggcggcaccttcttcgagccgaccatcctggtcgacgtgccgaagaacgccctggtgtccaaggacgagaccttcggcccgctggcgccggtgttccgcttcaaggacgaggccgaggtcatcgccatgtccaacgacaccgagttcggcctggcgtcctacttctacgcccgcgacctggcccgcgtgttccgcgtcgccgagcaactggagtacggcatggtcggcatcaacaccggcctgatctccaacgaagtggcgccgttcggcggcatcaaggcctcgggcctgggccgcgaaggttccaagtacgggatcgaggactacctcgagatcaagtacctctgcctgggcggtatctga

SEQ ID NO: 4004 - DNA, 1035 bp, Pseudomonas aeruginosa
atgctgaccatctacagcgacgaccatcgcctgcaccacggccggcacgaactgatcggcggccagttcaccccctgcttcgaaaaacccagccgcgccgacatggtcctcgaccgcgtgaaggccgtcggcctcggcgaagtccgcgcaccgcgcgacttcggcctggaaccgatccgccgggtgcacagcgagggtttcgtgcgtttcctgcagaacgcctggcaggactggctggccaccggccgcagccacgacatgctgccgatcgcctggccgacccggcgcctgcggcagacggagccggacaacatcgacggtcgcctcggctactactccttcgacgccggcgcgccgatcaccgccgggacctggcaggcgatcaccagttcggccaacgtcgccctcagcggccagtccgaactcgccaacggcgcgcgctcggtattttcgctctgtcgcccgccgggccaccacgccgcggccgactacatgggcggctattgcttcttcaacaatgccgccatcgccgcccaggccttcctcgaccggggcgccgggcgggtggcgatcctcgacgtcgactaccaccatggcaacggcacccaggacatcttctacgaccgcgccgatgtgctgttcacctcgatccacggcgatccgcgcttcgaatacccctatttcctcggctacgccgacgagaagggcaacggcgtcggcaccggctacaacttcaactacccactggcggccggcagcgactgggcgacctggagccaggcgctgcaggcggcgatccggcagatccaggcctatgcggcggacgccctgatcgtttccctgggggtggataccttcaaggaggacccgatttcccagttccgcctggacagccccgactacctgcgcatgggcgaagccatcggcaagctcggcctggccacgctgttcgtgatggagggaggctacgcggtggaggaaatcgggatcaacgcagtgaacgtgctacagggtttcgaaggggttcaccggtaa

SEQ ID NO: 4005 - DNA, 2280 bp, Pseudomonas aeruginosa
atgctcaacacgctgcgcaagatcgtccaggaagtgaactccgccaaggatctgaaggcggcgctgggcatcatcgtgcagcgggtcaaggaagccatgggtacccaggtctgctcggtgtacctgctcgacaccgagacccagcgtttcgtcctgatggccaccgaaggcctcaacaagcgttccatcggcaaggtcagcatggctcccagcgaaggcctggtcggcctggtcggcacccgcgaggagccgctcaacctggagaacgccgccgcccacccgcgctaccgctatttcgccgagaccggcgaggagcgctacgcgtcgttcctcggcgcgccgatcatccaccatcggcgggtgatgggggtgctggtggtgcagcagaaggagcgccgccagttcgacgaaggcgaggaagccttcctcgtcaccatgagcgcccagctcgccggggtcatcgcgcatgccgaggcgaccggttcgatccgcggcctgggcaagctcggcaagggcatccaggaagccaagttcgtcggcgtgcccggcgcccccggggtcggggtgggcaaggcggtggtggtgttgccgccggccgacctggaagtggtgccggacaagcaggtcgacgacatcgacgccgagatcgccctgttcaagcaggccctggagggcgttcgcgccgacatgcgcgcgctgtcgagcaagctcgccagccagctgcgcaaggaagaacgcgcgctgttcgacgtctacctgatgatgctcgacgatgcctccatcggcaacgaggtcaagcgcatcatccgtaccggccagtgggcccagggcgccctgcgccaggtggtgatggagcacgtgcagcgcttcgagctgatggacgacgcctatctccgcgagcgcgcctccgacgtcaaggacataggtcgccgcctgctcgcctacctccaggaagagcgcaagcagaacctgacctacccggaacagaccatcatcgtcagcgaggagctgtcgccggcgatgctcggcgaggtgccggaagggcgcctggtcggcctggtctcggtgctcggctcgggcaactcgcacgtggcgatcctcgcccgtgccatgggcatccccacggtgatgggggcggtcgacctgccgtactccaaggtcgacggcatcgacctgatcgtcgatggctaccacggcgaggtctacaccaacccctccgccgagctggtgcgccagtacagcgacgtggtcgccgaggagcgcgagctgagcaagggcctggcggccctgcgcgagctgccctgcgagaccctcgacggccaccgcatgccgctctgggtcaacaccggcctgctcgccgatgtcgcccgcgcccaggagcgtggcgccgagggcgtgggcctgtaccgcaccgaagtgccgttcatgatcaacgaccgcttccccagcgagaaggaacagttggcgatctaccgcgagcagctcagtgccttccacccgctgccggtgaccatgcgcaccctggatatcggcggcgacaaggcgctgtcctacttcccgatcaaggaagacaacccgttcctcggctggcgcggcatccgcgtcaccctcgaccacccggagatcttcctggtccagacccgcgccatgctcaaggccagcgaaggactggacaacctgcgcatcctgctgccgatgatctccggcacccacgagctggaagaggccctgcacctgatccaccgcgcctggggcgaggtgcgcgacgagggcgtggacatcgccatgccgcccatcggcatgatggtcgagattcccgccgccgtgtaccagacccgcgagctggcccgccaggtcgacttcctttcggtcggttcgaacgacctgacccagtacctgctggcggtcgaccgcaacaatccgcgggtcgccgacctctacgactacctgcatccggccgttctgcatgcgttgaagaaggtggtcgacgatgcccacctggaaggcaagccggtgagcatctgcggcgagatggccggcgatcccgcggctgccgtgctgctgatggcgatgggcttcgacagcctgtcgatgaacgccaccaacctgcccaaggtgaagtggctgctgcgccagatcaccctggacaaggcccgggacctgctcggccagttgctcaccttcgacaacccgcaggtcatccacagctcgctgcacctggcgttgcgcaacctcggcctgggtcgcgtgatcaacccggcggctaccgtccagccctga

SEQ ID NO: 4006 - DNA, 1839 bp, Pseudomonas aeruginosa
atgcccgattaccgctcgaaaacctccacccacggccgcaacatggccggcgcccgcgccctctggcgcgccaccgggatgaaggacgaagacttcaagaagccgatcatcgccatcgccaactccttcacccagttcgtgcccggccacgtgcacctgaaggacctcggccaactggtcgcccgcgagatcgagaaggccggcggcgtggccaaggaattcaacaccatcgccgtcgacgacggcatcgccatgggccacgacggcatgctctattcgctgccgagccgggagatcatcgccgactccgtggaatacatggtcaacgcccactgcgccgacgccatcgtctgcatctccaactgcgacaagatcacccccggcatgctgatggccgcgctgcgcctgaacatcccggtagtgttcgtctccggcgggccgatggaagccggcaagaccaagctggccagccacggcctggacctggtcgatgccatggtggtggccgccgacgactcctgctccgacgagaaggtcgccgagtacgagcgcagcgcctgcccgacctgcggctcctgctccggcatgttcaccgccaactcgatgaactgcctgaccgaggcgctcggcctgtcgctgccgggcaacggctcgaccctggccacccacgccgaccgcgagcaactgttcctacgcgccgggcgcctggccgtggaactctgccagcgctattacggcgaaggcgacgacagcgtgctgccgcgcaacatcgccaacttcaaggccttcgagaacgccatgaccctggacatcgccatgggcggctcgaccaataccatcctgcacctgctggccgccgcccaggaggccgaggtgccgttcgacctgcgcgacatcgaccgcctgtcgcgcaaggtgccgcaactgtgcaaggtggcgccgaacatccagaagtaccacatggaagacgtgcatcgcgccggcggcatcttctccatcctcggcgaactggcccgcggtggcctgctgcacaccgacgtccccaccgtgcacagcccgagcatggccgacgccatcgcccagtgggacatcacccagacccgcgacgaagccgtgcacaccttcttcaaggccggtccggcgggcatcccgacccagaccgcgttcagccagaacacccgctggccgagcctggacgacgaccgcgccgagggctgcatccgcagcgtcgagcatgcctattccaaggaaggcgggctggccgtgctctacggcaacatcgctctcgacggctgcgtggtgaagaccgccggggtcgacgagtcgatccacgtgttcgaaggcagcgcgaagatcttcgaaagccaggacgccgcggtgaaaggcatcctcggcgacgaggtgaaggccggcgacatcgtgatcatccgctacgaaggaccgaagggcgggccgggcatgcaggaaatgctctatccgaccagctacctgaagtccaagggcctgggcaagcagtgcgccctgctcaccgacggacgcttctccggcggcacctcgggcctgtccatcggccacgcctccccggaagccgccgccggcggcgccatcggcctggtgcaggacggcgacaaggtgctgatcgacattcccaatcgctcgatcaacctgctggtcagcgacgaagaactcgccgcacgccgcgccgaacaggacaagaagggctggaagccggccgcgccgcgtgcccgccgcgtcagcaccgcgctcaaggcctacgccctgctcgccaccagcgccgacaagggcgcggtacgcaacaaggcgctgctggacggctga

SEQ ID NO: 4007 - DNA, 732 bp, Pseudomonas aeruginosa
atggccgcccccttcttccaagccaagccgcgcatgttgcgatccctgttccgccgcctgttcaagtacctgctctggttcatggccgccagcgtcgtgctggtcgcggtcctgcgctgggtgccgccaccggggaccatggtcatggtcgaacgcaaggtcggctcctgggtcgacggccagcccatcgacctgcagcgcgactggcgctcctgggagcagttgccggacagcctgaaggtcgcggtgatcgccggcgaggaccagcacttcgccgagcaccacggcttcgacctgccggccatccagcaggccctcgcgcacaacgagcgcggcggcagtatccgcggcgccagtacgctcagccagcaggtggcgaagaacgtcttcctctggtccgggcgcagttggctgcgcaagggcctggaggcctggttcaccctgctgatcgagacgctctggaccaagcaacggattctcgaggtctacctgaacagcgccgaatggggcccgggcgtcttcggcgcgcaggctgcggcacgctatcacttcggcctcgacgccgagcgcctgagccgcacccaggccagccagctcgccgcggtgctgcccagcccgctgaaatggagcgcggccaggccgggcccctacgtacgccagcgcgcggcctggattcgccagcagatgtggcagttgggcggcgacgactacctgctgcgcctggagcgctga

SEQ ID NO: 4008 - DNA, 1272 bp, Pseudomonas aeruginosa
atgaccatcagtatccgaggcgcccgcgtcatcgacccggccagtgacctggaccaggtcggcgacctccacatcgaggctggcaagatcgtcgccatcggcgccgcgccggccggcttcagcgcccagaagaccctcgacggcgccggcctggtggccgcgccgggactggtcgatctgagcgtcgccctgcgcgagccgggctatggacgcaagggcaacgtcgaaagcgagacccgcgccgccgcggccggcggcaccaccagcctgtgctgcccgccctacacccggccggtgctggacaccccggcggtggccgagctgatcctcgaccgcgcccgcgaggccggcaacgccaaggtctaccccatcggcgcgctgacccgcggcttcggcggcgagcaactgtcggaactggtggccctgcgcgacaccggttgcgtggccttcaccaatggcctgcatggcttcgccagcaaccgcatcctgcggcgcgccctggagtacgcggcgaccttcgacctgacggtgatcttcacctcgcaggacaccgatctcgccgaaggcggcctcgcccacgaaggcccgaccgccagcttcctcggcctcgcggggatcccggagaccgccgagaccgtggccctggcccgcaacctgctgctggtggaacagagcggcgtgcgcgcgcacttcagccagttgaccagcgcccgcggcatcgaactcgtcgcccaggcccaggcccgtggcctgccggtgacctgcgacgtggcgctgtaccagttgatcctcaccgacgaagcgctggtgggcttctccagcctctaccacgtgcaaccgccgctgcgcaccagggccgaccgcgaagccctgcgcgaggcggtgaagaacggcgtggtacaagccatcgccagccaccaccaaccccacgaggcggacgccaagaacgcgccgttcgccgccaccgagccgggcatcagcggcgccgagctgctgctgccgctggcgatgacgctggtgcaggacggcctgctcgacctgccgaccctgctcgcccgcctctcccacggcccggcccaggcactacgcctgcctgccgggcgcctggcggtgggccaggccgccgacctggtgctgttcgacccgcagggttcgaccctggccggtgagagctggtactcgaaggggcagaacagcccgttcgtcggtcactgcctgccgggacgagtgcgctacaccctggtggacggacacctgacccacgagggctga

SEQ ID NO: 4009 - DNA, 7419 bp, Pseudomonas aeruginosa
atgggtgaccggcacgactacgtcgctctggagtgggtgaaaggcgagatcgccgaaaccctgaaacaggcgcgccaggcgctggaagcgttcgtcgagaacccgcaggacccgacccgcatgcggttctgcctgacctacgtgcaccaggtgcagggcaccctgcagatggtcgagttctacggcgcggccctgctcgccgaggaaatggagcagttggtccaggccttgctggacggtcgcgtgccgaaccagggcgaggccctggaagtgctgatgcaggcgatcctgcaactgccggtctacctcgaccggatccagaccgcccggcgcgacctgccgatggtggtcctgccgctgctcaacgacctgcgcgccgcgcgcggcgagaagctgctctcggaaaccagcctgttcgcgcccgacctgtcgcagcgccagccgcaactggacggcgaggccatcgcgcaactgcgcaccgacgaactcggcggcttgctgcgcaagctgcgccagacccagcagatggccctggtcggcctgctgcgcaaccaggacgtggccaccagcctcggctacctggcgcgtgtctatgcgcgcctggagggcctgtgccgcgaggcaccgctggggccgctgtggagcatcgcttccggcctggtcgagggcctggccaacggtagcgtggtcaacagcgcctcggtgcgcaccctgctgcgccagctcgaccgcgaactcaagcgcctggtcgagcagggcgccgacggcctgaaccaggccgcgccggacgagctggtgaagaacctgctgttctacgtggccaaggcgccttcgcagtcgccgcggatccgcgctctgaaggaacagtaccgcctcgacgaggcgctgcccgaccacgagacggtggacgccgagcgcgcccgcctcgccgggcccgaccgcgacgcgatgcgttcggtggtcggtgccttgtgcgaggaactggtgcggatcaaggacagcctcgacctgttcgtgcgcagcgaccgtggccacccctcggaactggacgccctcctggcgccgctcaagcagatcgccgataccctggcggtactcggcttcggccaaccgcgcaaggtcatcctcgaccagttggacgtcatccacgccctggcccagggccgccgcgagccgagcgacgcgatcctgatggacgtcgccggcgcgttgctctacgtcgaggccaccctggccggcatggccggtcccggcgacgagcgcaacagcgaggaaagccgcctgcccaccaccgatgtggcgcagatccaccagttggtgatcaaggaagcgcgcaacggtctggagcaggccaaggacgcgatcatcgagttcatcgcctcgcagtggaaccacgagcacctggcccgcgtgccggagctgctgacccaggtccgcggcggcctggcgatgatcccgctggagcgcgccgcgaccctgctggaaacctgcaaccgctatatccaggaacagctgctggcgcgcaaggcggtgccggactggcagagcctggataccctggccgatgccatcaccagcgtcgagtattacctggagcgcctgagcgaggaccatgccagccagagcgacctgatcctcgacgtcgccgaggacagcctggcgaacctcggctatacgctgaaaccgaattcgtcggccccggccgagcctggcctgtccgggcccgctgccatcgagtccccggctgccgagccggagaggccggaggcggtcgtcgaggtcgccgagacagcggagcaaccgcccgccgacacggctcctgccgaggccgcgagggaagatgccccgcagctggccagcgacgacaactggacccttggcgaagtcgcgcccgacgccggcgagccgtccctcgacctggccctggacctgccgctggacgattccgccgaagtgccgccggcgttgccggaggtggtcgaggagagcggccagccgcagtcgacctcggcgcctgcccgcagcctggacgatttcagcctcgacgagatcgatctctccggcctcgacctgcccgccgatgcggccccggcctccgggccggcggccctggcggactggtcgctgccggagcagtgggggctcggcgatgacctggcgcagccggcgcaggccggcgagacgttggatctgagcctggaggagccggcgctgtccttcgacgcgccgctggaaagcctcgagccgttgccggcgctggagcctttcgacggctccgctgaacaggagctggttctcgatgcgctcgatccgctgccgctggatgtagccttgccggaggcggagggcgaggtgtccgcctgggagggctcgagcctggaggaactggatctttccgacctcgatctccccgaggtgcaattgcccgaggctgaggccgaggcgccgcctgccgccgaggcgctcgccagcgaagcgccggccctgtctctggccgaggtgatggctgcgccggtgcagccgatcaacccgccggcgcagaacgttccggtcagcctgctgccaccgccggccgacgaggaaccggtggacgaggaactgcgcgaggtcttcatcgaggaggccggcgaggtcctggagaccatcggccgctacctgccggcctggaaagccgaccacgacgaccgcgaagcgctgaccgaggtacgccgtgccttccataccctcaagggtagcggacggatggtccgtgccctggtgatcggcgaactggcctggtcgatagagaacctgttcaaccgcgtgctcgatcgcagcatcgccgccagcgagccggtgcagcgagtggtggaccaggtcgtggccctgttgccggagctggtcgaggagttcgccgccaatgcccagcgccagcgcgacgatgtcgacctgctggcggccaccgcgcatgccctggccaagggcgagccgctgccggaaccgccggcgccggacgacggcggagtaccgccggaagccggggcggagcagccgtcgagcctggacaacggcgtccaggcgccgccattggccgacgcgccgcaggccgctgccgaggcgcagagcgacgtcgaactgctcgatccgcaactgctggagatcttcaccaacgaggcggaaacccatctcgaggccctggtcggcttcctcgccgactgcgcccgcgaactgccacagccggtcaccgatgccttgcagcgtgccctgcataccctcaagggcagcgcacacatggccggcatcctgccgatcgcggagatcgccacgccgctggaaaaactggtcaaggaatacaagtccaacctgctcgccttcgacctgcgcgaagcggagttgctgcacgacgccgagcaactgttccgcatcggcctggaacaggtcggcgcgcaacggccattgaacccgatccccggcagcgacgcgttgctggagcgtatcgaggcactgcaccaggagcgcatcgcctcgctcgaggccgagcgctacagcgatgccggcgagcgccgcgatccgttgctgatcgaggcgttcctcgtcgaaggcatggacatcctgctggacgccgaggacctgctcgagcgctggcacgagcatccgcaggagcgccaggaactgagtgcgctgcgcgaggagctcagcactctggaccggggcgcccggcatgccgagctgccacaggtggaagaactctgccaggccttgctggcgctctacgatgccgtcgaggaaggccgcctggcggtcagcccggcgttcttcgaggaagcccgccaggcccacgaggcgctgatcgggatgatggaccaggtcgccgccggcctgcaggtcacgccgcgtccggagcgggtcgcggccctgcaggagctgttggaagcgcccgccgccgaggccgttccgttcatcgacccggagagcctcggcgccgacgatttccccccggaagacgaagaaccggccctccccgaggcggtctacgaagaggccggggcgcctgccgaggagaccgtaccggcagcgcctgcaccggctcccggccgcgagctggacgaggaaatggtgtcgatcttcctcgaagaggcggtggacatcctcgaaagcgccggccaggcactggcccaatggcaggccgagccgggcgcgctgtcttcgctcagcgccctgcagcgcgacctgcataccctcaagggcggcgcacggatggccgagatcgccgagatcggcgacctggcccacgagctggaggccctctacgaaggactggtcgaccgccgttaccagcactccccgcaactggccggattgctgcaagcctgtcacgaccgcctggccgaacagctcgaccagttgagcgccggccagcccctggccgacccgcacgaccttatccagtcgatccgccggttccgccagggcccggtggccgaggccgcgacaccgggcgaggcggaaagccctgtcgaggaactcgttgcacctgccgtcgaggagcccgccgcgcctgctgcggaggcgttcgaagagcgcgatcccgaactggtggagatcttcctcgaggaaggcttcgatatcctcgacagcgctgccgccgcgttgcagcgctggatggacgacgtcgacaacaccatcgaactggaagccttgcagcgcgacctgcataccctcaagggcggtgcgcggatggccgagatcggcgagatcggcgacctcgcccatgagcttgaattcctctacgaaggcctctgcggtggacgcctgcgcgccagcccggccttgttcggcctgctgcagcgctgccacgacgagctggccgagatgctcgaggcggtgcgtggccaccgcacgctgcccgacgggcaggcgctgatcgcggagatcaggcgcctgcgcagcgatcccgacgagcaactgagcgtacccaccagcgtcagcctcaagccgctggcggcgaagggcgcggcggccgacgagagcgagatcctcgacatcttcctcgaggaagccgacgacctgctggagaacctcgaactggcgctcggccgctgggacggcggcaacggcgacgcccagccgctggacgacctgctgcggatcctgcacaccctcaagggcggtgcgcgcctggccggacagaccgagctgggcaacctggcccacgacctcgagcagcatctcaccgatgcgcagcaacagggcgcgccgtggccggacagcctgctgctggatgcgcagtcggggctggagggcctgcagcggcaggtcgacctgttgcgcgagcggctggccgaggacgacgaggccggtgagcggcccgagcccgcccaggcgctggtccaggccgacgataccgaccgcgcggtggcctccgcgctggcagagctgacccgcctggccccggcggccggcgcgatcatggcggccgaggcggcgcctccggccgccccggccaccaccctgccgttcgtgcgcaaggcccaggaggcggcccaggaggccgcttcccgacgtgccccgcaggagctggtgaaggtgccggcggaactgctggagaacctggtcaacctggcgggcgagacctcgatcttccgcggccgagtcgagcagcaggtgagcgacgtcggcttcaccctcggcgagatggagtccaccatcgagcgggtgcgcgaccagttgcgccgcctcgacaccgagacccaggcgcagatcctctcgcgtcaccaggccgatgccgaacgcgccggctacgaagaattcgacccgctggaaatggaccgctattcgcagttgcagcagctctcgcgcgcactcttcgaatcggcctccgaccttctcgacctgaaggaaaccctggcggcgaagaaccgtgacgcggagaccctgctgctgcaacaggcgcgggtcaacaccgaactccaggaaggcctgatgcgcacccgcatggtgccgttcgatcggctggtaccgcgtttgcggcggatcgtccggcaggtggccggcgagcttggcaagcaggtcgaattcgtggtcggcaacgccgacggcgagatggatcgtaccgtcctcgaacgcatcgtcgcgccgctggagcacatgctgcgcaacgccgtggaccacggcatcgagtccggcgagacgcgccgcgcggcgggcaagccggagcacggtacgatccgcctgaacatcggccgcgagggcggcgacatcctcctcaccctctccgacgacggcgccggcatccgcctcgacgcggtacggcgcaaggccatcgagcgtggcctgatgagcgccgacagcgacctcagcgatcatgaagtgctgcagttcgtgctcgagtccggtttctccaccgccgaaaaggtcacccagatctccgggcgcggcgtcggcctcgacgtggccaactccgaggtcaagcagctcggcggctcggtgagcatccagaccgagccgggccagggcacccgcttcaacgtgcggctgccgttcaccgtgtcggtgaaccgggcgctgatggtgctatccggcgaggatctctacgcggtgccgctgaacaccatcgagggcatcgtgcgggtttcgccctacgaactggaggcgctctacgaccagcgcggcgaggcggggctggatacgcccagcttcgaatacgccgggcagtcctacgaactgaagtacctcggcgagctgctgaacaacggccaggaacccaagctggtcggccagtcgctgcccttgccggtgatcctggtgcgctcctcggagcatgcggtggcggtgcaggtcgactcgctggccggttcccgcgagatcgtggtgaagagcctcggtccgcagttcgccggggtcgccgggatttccggggcgaccctgctcggcgatggccgggtggtggtgatcctcgacctgctggcgaccatccgctcccggcacgcgctgctcggccaggaaagccgtcgcgaacgcctggcgctgcgccaggaaatggcggcgagcgaaagcgagcagcagcggccgccgctggtcatggtggtggacgactcggtcaccgtgcgcaaggtcaccacccgcctgctggagcgcaacggcatgaacgtgctgaccgcgaaggacggcgtggacgccatcgcccagctccaggagcatcgtccggacatcctcctgctggacatcgagatgccgcgcatggacggtttcgaggtcgccaccctggtgcgtcacgacgaacgcctgggcaacctgccgatcatcatgatcacctcgcggaccggcgagaaacaccgcgagcgcgcgctgggcatcggcgtcaaccagtacctcggcaagccttaccaggaaaccgagctgctcgaagccatccagtccctggtcggccagcatgagtga

SEQ ID NO: 4010 - DNA, 1032 bp, Pseudomonas aeruginosa
atgagtgagcgcgtcacgccacgggttgcggtgatcgccgacacctcgttgcagcgccacgtgttgcaacaggcgctgctcggccatggctacgaggtggtgctcaacgccgacccggccagggtcgacgacgccgcgctggagtgcgcgcccgacctgtggctggtggacctgacccagcaggacgactcgccgctgctggacagcctgctggagcaggaccgtgcgccggtgctgttcggcgagggccacgcgccggagcggcataccgaacattacccgcgctgggagcggcggctgatcggcaagctgaagcgcttgatcggcgaccccagcgatggcgttggcgacagcctcggtgcattgctcgacgaggagcgtccgccgcgcctggagattcccggcgacctcgcggcgatgccgctgcaggccggcgaagcggcccgcgaggtgtggctgctggcggcctcgctcggcggcccggcggcggtgaaggcatttctcgacgccttgcccggcggcctgccgatcggcttcctctatgcccagcacatcgatgccagcttcgagcagaacctgccgcaggcagtcggccggcacagccagtggcatgtgaagaacgtccgcgacggtgaagcgctgcgttgcggcgaggtcatggtggtgccggtgctgcacgagctcggtttccaccacgacgggcgactgaaatgcagccagcgttcctggccggaaccctacaccccgtccatcgaccagatgatgctcaacctggcccagcagttcggccccgactgcggggtgatcgttttcagcggcatgggtagcgacggcagcgccgctgccgcctacgtgcggcgccagggtggcgaggtatggacccagcgcgccgacagttgcgtctgttcgagcatgccggacagcttgcgcgaagccggttacagcagtttcaatgccagcccccgcgaactggccgaggcattggtcaagcatctggccgcacgctgcgcgccgacaggagtcgaaacatga

SEQ ID NO: 4011 - DNA, 723 bp, Pseudomonas aeruginosa
atgcgcctgtcccgcttcttcgtcgaccagcctctctccctcggccagcacgacctgcccgaggcccaggcccactacatcggccgcgtgctgcggcacgccacgggcgacgccgtgcaactgttcgacggcagcggccgggaatacctcggcgagctggtcgaggtcggcaagaagaatgtccgcgtcgaactccgcgagcagttcgccggccagcccgactcgcccctgcgtatccacctggggcaaggcctgtcgcgcggcgagcggatggactgggcgatccagaaggccaccgagctgggggtggcggaaatcaccccgatcgtcagcgagcgttgcgaagtgcgcctgaaggacgagcgcgccgacaagcgcctgcagcactggcgccaggtggcgatcagcgcctgcgagcagtgcggccgttcgagcctgccgctgatccatccgcctctggccctggaggactggctgcgcgggcgggacgatgacctcaggctggtcctgcacccagtagccgcccccctggccagccatgcgccgccgtcgcgcctggccttcctggtgggtcccgaaggcggcctgagcgatgccgaggtggagcaggctcaggcggccggtttccactccgcgcgcctcggcccgcgagtgctgcgcaccgagaccgcgccggtggtagcgttggcggtggcccagcaactctggggcgacttcgcctga

SEQ ID NO: 4012 - DNA, 576 bp, Pseudomonas aeruginosa
atgctgaagaagacccttgccgcgctggcgctcggctccgcactgttcaccgccggccaggcaatggccgcggactacaagatcgacaaggaaggccagcacgccttcatcgagttccgcatcaagcacctgggctatagctggctgtacggccgcttcaacgacttcgacggcagcttcaccttcgacgagaagaacccgtcggccgacaaggtcaaggtgaccatcaacaccaacagcgtggacaccaaccatgccgagcgtgacaagcacctgcgcagcggtgatttcctcaacgtcagcaagaacccgaccgctaccttcgaatccaccgaagtgaaggccaacggcgacagcgccgacatcaccggcaacctgaccctgaacggcgtgaccaagccggtcaccatcaaggccaagctgatcggccagggcgacgacccgtggggcggctaccgtgccggcttcgaaggcagcgccaccctgaagctgaaagacttcggcatcaagatggacctcggcccggcatcccaggaagtcgagctgctgctctccgtcgaaggcattcgccagtaa

SEQ ID NO: 4013 - DNA, 858 bp, Pseudomonas aeruginosa
atggccacagtggaaatactcggggcggaatgccgcgcggggggcgcggtgaacgacgatgcgctgggctgcacggcgcaggccgcctgggtgatcgacggtgccaccagcatcggtcgcagcgtgctgggcgtggaaagcgacgcgcgctggctggcccaggcggtggaccggcacctgcggttgctgctggaagtcgagcccgagcaatccagcgagaccctgctgcggcgcctgctcaacgatatccagggcgacttccgcgcccagagcggccgcgactggcacgacctcgaagacatgccggcggcctgcctgagcctgctgcggattcgcggcggagaaatcgaactgctcaacatcggcgacagccggatcctcgtcgaaggcgccgacggccaggtacgcagcttcggcgattcggccctacacgaactggatcggcaatccctggcgcatttctgccggatgcgcgaggaacatccgcagtgggatcacgccgaactgttcaaggccagccgcccgcgcgtgcggcagaaccgcctgctgatgaacaagcccgagggctactgggcgctggacatcagcgaccgctggctcggccaggtgcagcgcgagaccttgccgctcgccgcgttgcgttccttcgtgctgatgaccgacggcttcgaccggctggtcgagcctttccgccgctataccgacgaacagttgctgcggcgcctcgaggacgtcggagtgagcgccatgctcgacgagttgcgcgagatcgaacagggcgacgaccaggccctggctttcccgcgtttcaagatccacgacgacgccagcgcgctgtggggtcggatcgcggggtga

SEQ ID NO: 4014 - DNA, 519 bp, Pseudomonas aeruginosa
gtgtcagcgggtgacgtcagcaacagcgaattcgtgggtagcctgtaccgggaccaccgcggctggctgcttgcctggctgaaccgcaacctcggctgccgccagcgcgccgaagacctcagccaggacaccttcgttcgcctcctcggccgcccggagctgcccggcctgcgcgaaccgcgcgcgttcctggcgaaggtggcgcgcggtctgatgatcgaccacttccgccgcgccgcccttgaacaggcctatctcgccgaactggcgctggttccggaagcggagcagccttcggccgaagagcagtacctgattctcgaggacctccgcgagatcgatcgcctgcttggcacgctgtcgctgaaggcgcgtagcgcgtttctctatagccgcctggacggcatgccccacgcggagatcgccgagcgtctcggagtctcggtgccgcgcgtgcgccaatacctggcccagggtctgcgccagtgctacatcgccctctacggagagccccggtga

SEQ ID NO: 4015 - DNA, 1806 bp, Pseudomonas aeruginosa
atgcctgattacaaggcccccttgcgtgatatccgtttcgttcgcgacgagctgctgggctacgaagcgcactaccagagcctgccgggcgccgaagacgcgactcccgacatggtcaacgccatcctcgaggaaggtgcgaagttctgcgaacaggtgatcgctccgctgaaccgcgtcggcgacctggaaggctgcacctggagcgccgacggcgtgaagaccccgaccggcttcaaggaggcctaccagcagttcgtcgaaggcggctggccgagcctggcccatgacgtcgagcacggcggccagggtctgccggaatccctcggcctggccatcagcgagatggtcggccaggccaactggtcctggggcatgtacccgggcctgtcccacggcgccatgaacaccctgcatgcccacggcaccgccgagcagcaggcaacctacctgaccaagctggtctccggcgagtggaccggcaccatgtgcctgaccgagccgcactgcggcaccgacctgggcatgctgcgcaccaaggccgagccgcaggccgacggtagctacaaggtcaccggcaccaagatcttcatctccgccggcgagcacgacatggccgacaacatcgtccatatcgtcctggcccgcctgcccgacgccccgcagggcaccaagggcatctcgctgttcatcgtgccgaagttcctgcccaacgccgaaggcaacgccggcgagcgcaacgcggtttcctgcggttccatcgagcacaagatgggcatccacggcaacgccacctgcgtgatgaacttcgacgccgccaccggcttcctgatcggcccgccgaacaagggcctgaactgcatgttcaccttcatgaacaccgctcgcctgggtaccgcgctgcaaggcctggcccatgccgaagtcggtttccagggcggcatcgcctatgctcgcgagcgtctgcagatgcgctcgctgaccggtccgaaggcgcccgagaagcccgccgacccgatcatcgtgcatcctgacgtgcgccgcatgctgctgaccatgaaggccttcgccgaaggcaaccgcgcgatgctgtacttcgccgccaagcaggtcgacatcgtccagcgcagccaggacgaagagcagaagaaagccgccgactcgatgctggccttcctcacgccgatcgccaaggcgttcatgaccgaagtcggcttcgagtccgccaaccacggcgtgcagatcttcggcggccacggtttcatcgccgagcacggcatggagcagaacgtccgcgacagccgcatctcgatgctgtacgaaggcaccaccggcgttcaggccctcgacctgctgggtcgcaaggtgctgatgacccagggcgaggcgctgaagggcttcaccaagatcgtgcacaagttctgccaggccaacgaagccaacgaagccgtcaaggaattcgtcgctccgctggcacagctgaacaaggagtggggcgacctgaccatgaaggtcggcatggccgccatgaaggatcgcgaggaagtcggcgccgcttcggtggactacctgatgtactccggctacgcctgcctggcctacttctgggccgacatggcgcgcttggccgccgagaagctggccgccggcaccggcgaggaagccttctacaaggccaagctgcagaccgcgcgcttctacttccagcgcatcctgccgcgtacccgcgcccacgtcgccgccatgctgtccggcgccaacaacctgatggagatggccgaggaagatttcgccctcggttactga

SEQ ID NO: 4016 - DNA, 2394 bp, Pseudomonas aeruginosa
atgttgcgtcgttgctgtctgctcttcttctgtctgctgttgagcctgcccgtgcgagcggaggagtcggtcgccttgccgctgacggcggagctacggacctggctggcggagcatcgggaattgcgcgtcggggtggtcaccgaagcgccctatgcccagtacgaccgccgcctgcaacagtattccggggccaacgtggagctgatgggctggctggccacggcaatgcaggtgaccttgcggtggcagggctatcccgaccaggcggcgctcgacgatgccctgcgcgctgggcgcgtggatatcgctcccggcctcagccagaccccagccgggctgcgcttgtggctgttctccgatccctacctgcgggtttcccggctggtggtggggaagcgcgatggcagcggcagcgtcgaattggagcaactggagcgcgatacccgggttgccgtgcgggccggcagttcggtagccgactacctcagcagcacctatagcggcctgcaatgggtgtcggccgattccgaacgcgaggtgctgcgcgccgtgctcgccggacaggcacgctacgcggtgatcgacgaagcgcaactcagccgcctgacccgcgaaccggagttcgccgagctagcggtggttggcgatatcggctacccgcagctgctacgggtggcgacccgtcgcgactggccggaactggcgatggtggtcgaccaggcgttgcgctcgctgccgcgcaagtccctggaccagttgcacgagcgctggttgcaacccaagtatccgcgcctcggcgagtcgccggggttctggcagaacctgtcgatcctcctcggcctgctgctggccggcgcgctggtggcggtgttcctccagcggcgccagcagcatgcgctggaagcccggctgtacggcgcccgccgcgacctggagctgcgccaggcggccgaggaggcgctgcgcctgacccagttctccatcgacaacagcaccctgggcatcctctgggtcaactgggacagccgcgtacgctacgccaaccgcgccgccgaacagatgctcggccatgccgacggccaactcgtggaccgtccgctggccgacttcgagcccggcctggacatggaccgctggttgaatctttggcgtcgtgcgcgcaatagcgaggagggcccgctcagcttcgagacccgctgcctgcgcgccgacggcagttggctgccggccgacgtctcgcttagcttcctgcgcttcggcacgtccgagtatctggtggtgttcctcagcgacgtcaccgagcgccgccgtgcccgcgaggcattgcaggaaagcgaggcgcggatgaagggcatcgcctccaacgtgccgggcatggtcttccgcctggagcgcccgcgggccggcgcgttttccgacttcgcctatatcagcgagggcagcgaggcgctggtcggctacagcgctcgcgaactgatcgaaagcggccgcggcattcgtggcctggtccatcccgacgaccgcgagcgctactggtcgagccagatggctgccctcgacgagaatcgcgactggcattggcagggccgcatcctcacccgccagggcgaattgcgctgggccgacatcaaggcttcggcgcgctgtttcgaggatggtcgtgcggtctgggacggggtggtctgggacatcaccgcgaacaagcagatcgaactcgaactcggcgagtcgcgcgcccagctccgcgagctgtcggcgcacctggagtcggtgcgggaggaggagaaggcgcgtatcgcccgcgaggtccatgatgagctgggccaggtgctgacggtgctgaagctggaaacctcgatgtgcgagctggcctatgccgatgcccaggagggcctgcgcgaacgcctgggcaacatgaaaaagctgatcgcccagttgttccagctggtgcgcgacgtggctaccgcactgcgcccgccgatcctcgacgccggaatcggctcggcggtggagtggcaggcgcggcgcttcgaggcgcgcacgcagattccctgcctggtggaggtgccggagaactcgccgcagttggtcgacgccaaggctatcggcctgttccgcatcctccaggaggcgttgaccaatgtcatgcggcatgccgaggcgcatactgtgcaactgcgtctgctgcgcgagggcgacgagctgtgcctgagcgtcagcgacgacggtcgcgggttcgatgttgccacggtggggcgtggcagttccttcggcctggtcggcatgcgcgagcgggtgctgatgatgggcggtacgctggacatcgacagtgcccccggcgagggcaccacgctcagcgtgaggattccgctgggcgtcgcgggcccgtga

SEQ ID NO: 4017 - DNA, 789 bp, Pseudomonas aeruginosa
gtggccatcactattccatacttctggaaccttatatgtggtggccaaggtatgagtgagtatggggtcttggtaaggaatggcttggggcagactgtaatagatggagagtttcataacctttctcttctgttggaaagaaatattgaagtcgagacaagtcagtggttctcactggattttccatatgcggtcacatcagctgcacctcctgttctagcagttcaagcttggaagaataaaattctttacttcgactcagtacagtatcgaggtgggccgggaaactggacaggcgccactctgagtttttcagggtatggaacacatacatccggctccgtaagaattagagtttatgcctacgcattgcctttgctgagaggatatggacttcgtgttcgaaactcggcgggaagtgtcgttttcgattctctaagacttcccttggtttttagtgcggaactgggcggggcgccagaagattgggttagggtatctggggaaccgattataggagctggccgcatagacatatatcgcccagcgacatggggtcagcctgccgatagctacattgcagtaggcatggcacttgacgtggaatttggcagagtggcggtatctggtggtacggctaatgcaattatttatatacgctggggtttcactgaggagggagtgccaaggcttatgcagcatgcatataccgggcttccaagttcttatcctggaattccagctgctgtttattatgctatgccttcaattccgataataaaggcttga

SEQ ID NO: 4018 - DNA, 1050 bp, Pseudomonas aeruginosa
atggatatcaagggagccctcaatcgcatcgtcaaccagctcgacctgaccaccgaggaaatgcaggcggtcatgcgccagatcatgaccgggcagtgcaccgacgcgcagatcggcgccttcctgatgggcatgcggatgaagagcgaaaccatcgacgagatcgtcggcgcggtggcggtgatgcgcgaactggccgacggcgtgcagttgcctacgctgaagcatgtggtcgacgtggtcggcaccggcggcgatggcgcgaacatcttcaacgtgtcctcggcggcgtccttcgtggtcgccgccgctggcggcaaggtcgccaaacacggtaaccgcgcggtctccggcaagagcggcagcgccgacttgctggaagccgccggcatctacctggagctgacctccgaacaggtggcgcgttgcatcgacaccgtcggcgtcgggttcatgttcgcccaggtccaccacaaggcgatgaagtacgccgccggtccgcgccgcgagctgggcttgcggactctgttcaacatgcttggcccactgaccaacccggcgggagtcaggcaccaggtggtcggggtgttcacccaggaactgtgcaagccgctggctgaagtgctcaagcgtctcggcagcgagcatgtgctggtggtgcattcgcgcgacgggctggacgagttcagtctggccgcggcgacccacattgccgagttgaaggacggcgaggtacgcgagtacgaagtgcgtcccgaggacttcgggatcaagagccagaccctgatggggctggaggtcgacagtccgcaggcctcgctggaactgatccgcgacgctttggggcggcgcaagaccgaggctgggcagaaggccgccgagctgatcgtgatgaatgccggcccggcactgtacgctgccgatctggcgaccagcctgcacgagggcattcaactggcccacgatgccctgcacaccgggctggcacgggagaagatggacgaactggtggccttcaccgccgtttacagagaggagaacgcacagtga

SEQ ID NO: 4019 - DNA, 957 bp, Pseudomonas aeruginosa
atgaagaagagacctttagaagatcttttttttgcgatgtacagagggaagcagagtttcgaacactttgccaattgctctgtcgaaggtttatatgagccggtgatggtgaatggacgactcgtatataaaaccgataaggatctgcgtgcgtatcatcggtttctaaataaattcttgtttgaaaggcttcctgttgttgatgatgttgtgttttcttatcgtaaaggtgttaacgccgtagatgctgtcgaaaagcatgcaggtagtaagttttattttcaaactgatttaagggatttcttcagtagtctaactaagtctgatgttagaagaactctggaatgggcgaaagatgtttgtgttatttcagacttagatgtttgggttgagagaattctgaagttggttactattggtgattctttgccgatggggttttcgacttcccctgcaattagcaatgcatgcttatactctctggatgggatattaaagacgcattgtttaagtaatggtgttatatatactcgttatgcagatgatctgattttttcctcgtcgaacaagcaggcgcttgatcctttgtttggggtcgtgtgtcgtaccctccaatctgagttttcagggcggatgggaataaattcacagaagacaaagtacctaagaaagggggggaaaattaagctgctggggcttaatgttcttcctaatggaagagttactgtggatatgcggcataaaaaagaaatagaggttcgtcttttttattacgtaaaagacagagctaggtttttgaagatcatgggcgaggtggatgatgaaaaagctattaagaaattctctggtttaataaactacgtaaatactgttgatccggcttatcttgataagcttcgcaagaagtatggcttaacgattgttgatatgtttattcataaatcaccgaagctctag

SEQ ID NO: 4020 - DNA, 3126 bp, Pseudomonas aeruginosa
atgaattgcgcagctacaggcggtgcgagcatgggtgcatcagaacgatccacgaacgacccttccgagctgcaaccctgcagtctccctgcctccgcttctcctcgaaaaagccgtctccgccaacgcctgatgctgatcggcttcgccttgccgatcctcgccgcggtgggcatcgtggtacttcacgaagcgcacacctcgcggctgcaggcacgcgagctggcacgctatgccgcgaccctggactacgaggtgcgccagggtcccagcgaggccatcctgttcccggcggacggccccttcgaccgccgcctcggctaccagttgctgccttcgttcatgcagcgcctgtacgaccgcgactacgccatcacccgccaggcgcacttctccccggcactgatgcgctacgccgaacaccggctgttcccgccctacgcggaaaaggcccaggccgggctggacatcgccgattgccgcggcgtgccgatctacgacttccgctatccgcaacggcgctacgcgaacttcgccagcctgccgccgctggtggtgcagagcctgctgttcatcgagaaccgcgacctgctcgatcacgaacgcccctacctcaacccggcagtggactggggtcgcttcacccaggcggcgctgtcgcaggtcggcaagatgctcggcttcagcgcgcactcctccggcggcagcaccctggcgacccagatcgagaaataccgccactctgccgaagggcgcaccggcagcatcggcgacaagctgcggcagatgctctcggccagcgtacgcagctatcgcgaaggcccggccaacttcgccgcgcgccaggacatcgtgctcacctacctcaactcggtgccgctgtcggcggcgccgggctacggcgaggtcaccggcctggccgatggcctgtgggtctggtacggcgccgactaccggcaggtcggcgaggcactcgacggcaaggccggactcgccgcccagggcctggccctgcgccaggtgctggcgctgatgatcgcccaccgccggccttccttctatctggcgccgcgcggccgcgacgagctggaccggatgaccgacagccacctgcgggtcctgacccaggccggcgtcatcgaggcgccgttacgcgatgcggcgctggcgcagaagctggcgttccgcgacccacgcagccagccgacggtgcaaccgctgccgaccaacaagggcgtgaccctggctcgcacccgcctggccgggatgctcggcgtgccactgtacgacctcgaccgtctcgacctgcgggccaataccaccctccagcacgagttgcaggaaagcgtcaccgcctacttgcagaaactcgccgacccggactacgccgcccagctcgggctgatcggcgaacgcctgctgaccccgacctcgacccgctcggtacgctacagcttcaccctgttcgaacgtacgccgagcggcaaccaggtgcgggtgcagaccgacaacaccgaccagcccttcgacatcaacgaaggcagcaagctggagttgggctccaccgccaagctacgggtgctggccagctacctggagaccgtcgcgcagatccaccgcgactatggcggcatgagcgtcgccgagctgcgcaaggtggaagtggagccgctcgatttcatcctccgctggggcatcgactacctggtcgccagccgcgaccgcgatctttccgcgatgctccaggcggccatggaacggcgctattcggccagcccctacgagagcttcttcaccggcggcgggctgcacaccttcaacaacttccgcaaggaagacaacggccgccggccgatgctgctggaagccctgcgcgaatcgatcaacctgcccttcgtgcgcctgctgcgcgacctgatccgccacgatatctaccagaacgccgggagcaaggtgcagttgctggccgacgacaaggacccgcgccgcgccgactacctcgaccgtttcgtcgacaaggaaagccaggtctacctgcgccgcttctgggtcaagtaccgcgacaaggacgccaaccagcgcctggagaccttcctcgacggcctgcgtccctggccggtgcggctggccgcgatccaccgctacctgcagccacaggccgacctggcgagcttcagcgccttcctccgcgaacgcctgccccgcggcagcctgaccgacaagcgcgccgccgagctgtacgagcgctacggcccgggcaagttcaacctcaacgaccagggctacgtcgcccgcgtgcacccgctggagctatggctgctcggctatctgcagaagcagccgcaggcgaccttcggcgaggcggtggcggccagcggcgccgagcgcaaggaggtctacggctggctgttcaagtcgcggcacaagaacgcccgcgacaagcgcatccgcatcctgctggaggtggaggccttcctcgacctgcaccagcaatggaagaaactcggctatcccttcgatcacctggtgccctcctacgccaccgccctgggcagctccggcgaccgcccggcggcgctggccgaactgatggggatcatcgtcaacgatggcgtgcgcatgccgaccctgcgcctggagcacctcgacttcgccctgggtacgccctacgagacgcgcttcgccccggaagccaccctcggccagcgggtgatgacctcggaggtcgccacgaccctgcgcaacgcgctgtcccaggtggtcgacgccggcaccgcgcggcgcctgcaaggcaccttcagccgtccggacggcgcgccactggtgatgggcggcaagaccggcaccggcgacaaccgcctgcagaccttcagcgccggcggccacgtgcgcagttcgaaggcactgaaccgcaccgccactttcgtcttctacatcggcccgcggcacttcggtaccctcaccgcctacgtcgacggcagcgagtcgagccagttcaagttcacctcggccctgccagtgcaggtactcaagggcatggcaccgctcctcagggactacctcgacccacgcaccgccacccgctgccaggtaccgttgtcgccgcaacagatcggccgcctgtag

SEQ ID NO: 4021 - DNA, 1203 bp, Pseudomonas aeruginosa
atgacacaatcccaccgaccgcgcccgctcgacggcatcaccgtggtcagcctggagcacgccatcgccgcgccgttctgcacccgccaactggccgatctcggcgcgcgggtgatcaagatcgaacgccccggcgtcggcgatttcgcccgcggttacgacgagcgggtcaacggcctgtcgtcgcacttcgtctggaccaatcgttccaagcagagcctcagcctcgacctcaagcaggccgaggcgctgccgttgctggagaagctgctggccggcgccgacgtgctggtgcagaacctcgcgccgggcgccgccgcgcgcctgggcctgtcctacgaggcgttgcgcgagcgcttcccgcgactgatcgtctgcgatatctccggctacggcgaaggcggtccctacgagaagaagaaggcctacgacctgctgatccagagcgagggcggcttcctttcggtgaccggcggcgccgggccgaacgagatggccaaggccggctgttcgatcgccgatatcgccgccggcatgtacgcctacagcagcatcctttcggccctgctgctgcgcgagcgcaccggcgagggcagccgcatcgacgtgtcgatgctggagagcctggtggagtggatgggctacccgatgtactacgcctaccaggacgcgccgccgccgccgcgcgccggcgcttcgcactcgaccatctacccctatgggccattccccgccggcgacggcggcacggtgatgctcggcctgcagaacgagcgcgagtggcgggccttctgcgacaaggtcctgcgccgcccggaactggccgacgacgaacgcttctcggcgaacttcaagcgctcggccaaccgcgaggagctgcgtgcgctgatcgtcgaagccttcgccgccttgccggccgccgaggtggtggcgcgcctggaacaggcgcagatcgccagcgcccacgtcaacgacatggccggggtctgggcgcacccgcagttacaggcgcggcaacgctggacctccatcgacagcccggccgggcgcctgccggcgttgttgccgccggccagcagcagcgccttcgttccgcgcatggatgcggtgccggcgctgggcggcgacagcgacgcgctgcttgccgaactgggctgtaccgcggccgatatccagcgcctgcgcgcgaccggaacggtatga

SEQ ID NO: 4022 - DNA, 2244 bp, Pseudomonas aeruginosa
atggtacaggtgagagcgcaccagccggtcaacaccgacggcagtatcaacctcgaggcctggctggaccacgtccagaacctcgtccccgggctcgatcgtcagggcttgctggaggcttgcgagttcgctcgcgaatccgagcagcgagcgatcgccgcacagaactcctgggcggaaggcacgtccagcttccagaccggactggaaatcgccgagatcctcgcggatctcaagctggatcaggagtccctggtcgccgcggtcatctatcgaggcgtgcgggaaggcaagatcaccctggaagcggtcaacaagcatttcgggccggtggtggccaagctgatcgagggcgtgctgcgcatggccgcgatcagcgccagcctcaatccgcgccattccatggtgctgggtacccaggcgcaggtggagaacctgcgcaagatgctggtggcgatggtcgacgacgttcgcgtcgccctgatcaagctggccgagcgcacctgcgccattcgcgcggtgaagaacgccgacgaggaaaagcgccaccgcgtcgcccgggaagtcttcgatatctacgcgccgctggcccaccgcctgggcatcgggcatatcaagtgggagctggaggacctgtccttccgttacctcgagcccgaccagtacaagcagatcgccaagctgctgcacgagcgccggctggatcgtgagcagtacatcgccaacgtgatgagccagttgaaggaagctctcgcggccaccggcgtacaggccgatctcagcggacgggcgaaacacatctattcgatctggcgcaagatgcagcgcaagggcctggacttcagccagatctacgacgttcgcgccgtgcgcgtgctcgttccggagatgcgcgactgctacaccgcgctgggcatcgtgcataccctctggcggcacattcccaaggagttcgacgactacatcgccaaccccaaggaaaacggctatcgctcgctgcataccgcagtgatcggccccgaggggaaggtgctggaagtacagatccgtacccactccatgcacgaagaggcggagctcggagtctgcgcgcactggcgctacaaggggaccgacgtcaaggccagctccaaccattacgaggaaaagatctcctggctgcgccaggtgctcgaatggcacgaggaactgggcgacatcggtggcctggcggagcaactgcgggtcgatatcgagccggacagggtctacgtcttcactcccgacggccatgccatcgacctgcccaagggcgcgaccccgctggatttcgcctatcgggtccacactgaagtcgggcacaactgccgcggggcgaagatcaacggacgcatcgtgccgctgaactacagcctgcagaccggcgagcaggtcgagatcataaccggcaagcacagcggtccgagccgcgactggctgaacagcaacctgggctacgtcaccacctcccgggcgcgggcgaagatcgtccactggttcaagctgcaggcgcgggaccagaacgtcgctgccggcaaggccctgatcgaacgcgagctgtcgcgcctggcgctgccgccggtggatttcgaccggctggcggagaaggccaacgtgcgtaccgccgaggatatgttcgccgctctcggcgccggcgacctgcgcttggcgcacctggtcaactatgcccagcaactggtcgagccggaccgcgacagcgagcaactcgaactgatcccgcgcaagccgagcaagatcggccacggcaagcgcggcgacgtgcagatccagggtgtcggcaacctcctgacgcagatggccggctgctgccagccgctgccgggagatcccatcgtcggctacatcacgctgggccgtggggtcaccatccaccgccaggattgcgccaccgcgctgcaactggcgggacgcgaaccggagcggatgatccaggtcagctgggggccggagccggttcgcacctatccggtggatatcgcgatccgtgcctatgatcgttccggcctgttgcgcgacgtgtcccaggtgctgctcaacgagcggatcaacgttctggcggtgaatacccgttcgaacaaggaagacaacaccgcgaccatgcaactgaccatcgagattcccggtctggacgctcttggacgcctgctggcgcgcgtctcgcaactgcccaacatcatcgaggcgcggcgcaaccgtacgccttga

SEQ ID NO: 4023 - DNA, 1329 bp, Pseudomonas aeruginosa
atgccttcctcacagcttccgggggcttcgccctcggagatcgatctcgttcagctgttccagcaattgtgggcgtcgaaatggctgatagcgctgatcgcggccttggcgaccgccgctgcgctcgcctacgcgctgttggctgttccaacctaccaggtggatgtcctgttgcggccaatccagaccaaggccctggaggctgtcaatgtcaacgggctgtatgccctgactccgcgggaagcgctggatcgcgtcggcaacgagctggcagcctactccggcaggctggagtatttcgaagcccatccagagctattccagcaattgaacgccgagggcttgtcccccgagcaggctttctggaagttcaaccaggatgccttcagcatgcagcaggcggacttgaagaaggacccccaggcggcgcctttcttccgcttgtccatgcagtatccccagggcatggatggtgccgccattctcaacggcatgctcgcgtcgaccatcgagaacgagcgtcagcgaatcctggacgacctccaggcgcgtatcgacggtcgcctgcaattcctcgagcaggatatcgaaggcaagcgtgccagttaccaggctaccaaggagggcaagatcgcccggttgctggaagcggacagcatccggcgggccggcctggaggatgagctcaaggcgttgcgcgggcggctgaagatggtgcgcgattcgcgtatccagcagctcaacgaggctatccagatcgccacccggctggggatcgtcaagccgacgaccccgggcgcactgggagaggtcgggcaggatggctcgcgcagcgttttccgcaccgaggtgaataaccagcagatacccctgtatttcatgggtgtcgatgccttgaccgccgagcgcgataccttgctcaaacgcaagggcgatgacttcaccgagccccgcgtggcgaagatccagcaggagctgaagcagctggagaacaaccgtgaagtgcaatacctgcaggctcgaaagggcgaggagcgtttcttcgaaaacatcgacaagctgcgtggagagcaggcgcgcctcaagactctgaaggcgagcgagctgaagatcgaactggtgcggatcgaccagaaggcttcgacccctctgaaaccgatcaagccgcgcaaggccttggtggtggccttgggcctcctgggcgggttggtgttcggcgtgctggtggctctggttcgggcgatgttgcgtacccctcggcaacgggtacaggaagatagcctgccgccgggagtcgtcagcctcgaccggagcctttcagggacctga

SEQ ID NO: 4024 - DNA, 1356 bp, Pseudomonas aeruginosa
atgaatgcaaccgcgctttccccgaacccggcgccggccatttcccggcgcaccatgctgatcgccttcgtcttctgcttcctcggcctgctcgccgacggcgtcgacctgatgttcctggcctacagcctcaacagcctgaaggccgaattcggcctgagcaacttcgaagccggctccctcggcagcctgactctcgccggcatggccgtcggcggcatctatggcggctggtgctgcgaccgcttcggccgggtgcgggtggtgacctggaccatcgtgctgttctccatcggtaccgcgttgctggggctgacccagaactactggcagttcgcgctgatccgcttcgtcgcctcgctcggcctcggctcgctgttcgtcgcctgcaacatcctgatgtccgagtgcgtcggaaccaggtaccgcaccaccatcctcgccgccatgcaggccggctggaccgtgggctacctggtggcgaccctgctggcggggcagatcatccccgagttcggctggcgcaccttgttcttcaccgccgtggcgccggcgctggtctgcctggccctgcggccctgggtgccggagtcgccgtcctggctcgcggcccaggccgggcgccagcgtcccggcgcggctccgcagagccacgccgaggctggcggtgccggcccgctgggacggatgttgggcgatccggaaacgcgcggcatgttcctgctctggagcctcacctcctgcttcctgctgttcggctactacggcaccaacaactggatgccgtcctacctggagagcgagttggggatgaacttcaagtcgatgaccggctacatggtcggcacctacagtgcgatgatcctcggcaaggtcgccgccggtgtctgcgccgatctcttcggtcggcgcctgaccttcgccgccggggccatcggcagcgccgccttcatgccgttgatcgtgttctaccactcgccctccaacatcctctggatcctcatcaccttcggcttcatctacggcgttccggtcggggtgctggccacctacatgaccgagagcttctccacccgcgtccgcggctcggcggtgggcaccgcctacaacctggggcgtatcggcgcggcggtggcgcccgccggcatcggcctgctggccacccacgtgtcgatcggcgcgggtttcctggtgatgggcatcacctacgtgctcaccgggctgatcccggcgctgttcattgcggaccggctctacgacccgaaccgcgagtcccgcgatgccgagagcgcttcccgacggcaagcgccgggcagtgccgtggataccgccgagcggcgcgcggccaaggcctga

SEQ ID NO: 4025 - DNA, 1254 bp, Pseudomonas aeruginosa
atgagccagtccctcaagcgcgcgctgttcagcgccctcctcgtgatcctggtgtcctatccgatcctaggcctgaagctgcgcaccgtcggcatcaagctcgaggtcctcggcgccgatgcgcagaccctctggaccatcgccgcggccgccctggccatgttcgtctggcagctgttccgcgaccgcatcccgctcaagctgggtcgcggcgtcggctacaaggtcaacggcagcggcctgaagaacttcctcagcctgccatcgacccagcgctgggcggtcctcgccctggtcgtggtggctttcgtctggccgttcttcgcctcgcgcggggcggtggacatcgccaccctgatcctgatctacgtgatgctcggcatcggcctgaacatcgtggtcggcctggccggcctgctcgatctcggctacgtcggcttctacgcggtaggtgcctacacctacgcgctgctcgccgagtacgccgggttcggcttctggaccgccctgccgatcgccgggatgatggccgcgctgttcggcttcctcctcggcttcccggtgctgcgcctgcgcggcgactacctggcgatcgtgaccctcggcttcggcgagatcatccgcatcctgctgcgcaacatgaccgagatcaccggcggccccaacggcatcggctcgatccccaagccgaccctgttcggcctgaccttcgaacgccgcgcgccggaaggcatgcagaccttccacgagttcttcggcatcgcctacaacaccaactacaaggtcatcctgctctacgtggtggccctgctgctggtgctgctggccctgttcgtgatcaaccggctgatgcgcatgccgatcggtcgcgcctgggaagcgctgcgcgaggacgaagtggcctgccgcgctctcggtctcaacccgaccatcgtcaagctctccgccttcaccatcggcgccagcttcgccggtttcgccggcagcttcttcgccgcccgccagggcctggtgacgcctgagtccttcaccttcatcgagtcggcgatgatccttgcgatcgtcgtgctcggcggcatgggttcgcagctcggcgtgatactcgccgcggtggtgatggtgctgctccaggaaatgcgcgggttcaacgaataccgcatgctgatcttcggcctgaccatgatcgtgatgatgatctggcgtccccagggactgctgccgatgcaacgcccgcacctggagctgaagccatga

SEQ ID NO: 4026 - DNA, 2325 bp, Pseudomonas aeruginosa
gtgcgtccactcagccgttggctctcatcttgcggctcgcttctggcgctggccgcgctgttcctggtcgttcccctcgccggccgctactggctcggctggtcgacgccgttcggctatctctcggacctggccctcggcagcctgctggtgctgctcctgcatcgacgctccctgtggttcgcgctcccggtcatgctgctctggtgcctgttcctgatcggcaatgccgaactggtcgcagcggtcgggcgcatgccggaaccttccgacctcaagtacctgctggatccgcagttcgtcagcagctccacccagggcggcggcctcgcccacctgccactggcgctcggcctcggtggcgcgacattgctttgcgtgctgctctggcgtcgccgcggtccgcgcctgccgcgctatgcctacgcgctgccggcggcgttcctggcggcgcatgtcggcctgcaatacctgcgtccgagcgatgccgaccaatggcagcagtacaacctgccgcacaagctgctggccagcgcgctcagcagtggccaactggcggtcgaagactggctcgccgacgaccgtccggacaccccgccggacgtcgccgggctcaaccagctcgacctttccggaacgccgctgctggccggcggagggcgcgcgcgcaacgtcctgatcgtggccatggagggaatccccggcgcgtatatcgccgccaaccgcgccgccatcaacagcagctaccacgaagcgccgatgcccaggctgagtggctgggccgaacgggcgatgaccaccccggactacgtgctgcacagccaccagaccatccgcggcctctacgccatgctctgcggcgactacagcaagctcgactcgggcacgccgaagggcgtcgagctgctgaacaacccggcccgggccagggagtgcttgcccgcccagctgcgccagcacggtttcagcacgcacttcctgcagggtgccggcctgcgcttcatggccaaggacaaggtcatgccgcagatgggcttcgacaagaccctcgggcgcgactggttccgcaacacgtcctacctggagtttccctggggcatggacgacaaggccttcttcgagggcgccgcgacctacgtgaagcagctgcgccagcagaagaaaccctggatgctgaccctgctcaccgtcggcacccaccagccctactcggcgcctgccgactacctggcccgctacccgagcgccaagcaggccgcggtggcctatctcgacgacgcgatcgacgccttcctcgccgacctggagaaacagggcgtgttgcgcgacaccctggtggtgctcacttccgacgaatcccacggtgtcgaccaggtgcgcctcgcctcggcctggggcttcaacctggtactggcaccggaacaggcggcgctgccgccgatcaagagcggcgtctacggccacgtcgacctcgccgcgtccgtcctcgactatttcggctaccgcgtgccggcggggatttccgggcgctcgctgttccgcgactacgccagcggccgcgaaatgatgtcctacaccaacggcatgctgcgtcaccacgacggcaaggacaccttcgtcgaatgcgatttccagcaggtctgccggcgctaccgcagcgagggcttcatcgccgacgaagccgagttcctcggtcgcttcagcggtcgccaggcacgcctggtcagccagcgcgccgccgtcctcgaccactccgtgcaacaggccggccagttgggccaggagttccagttcgccacccacgaacgcatccgcctgaagccggaaacccacaacgactggaccgacaacctgatcggcgcgcaatacctggagatgccgaagaacagcaggaccacggtcaccctgaagatccgcgccttgcagatggaccgcaacggcgcccgggtgacgctgaagaccaaggagttcgaacgcgacgttcccataccggtaccggacatcccgcgcctgctcaaaggcaagccgctggacatgagcttcaccttcgacaacccggaagcgcgcaaggccttctccttccacttgctcgccgagggccgcgggatcatcgagatcagcgacttccacgtggtcacggcggccaacccggaacccgtggaaagccgcagccaggtcgccgaagcggcgaaggaacagccgctgctgagcaccctgaaaagcctgttcgccaaccgccccgaaaccgaggaagcggaacgcgcggacgcccctcgggagcgcaccgtcatccccgagcagaaggccctgatcctttcgcactga

SEQ ID NO: 4027 - DNA, 2040 bp, Pseudomonas aeruginosa
atggccaagccttccttcttttcctccgacctggtgcaggtgctgctgtgcccgcgtctgcacgaactgcagttcgccgtgaaggccctgctggccggcgggttggccctgtacctggccttcggcctggagctggagcagccgcaatgggcattgatgacggtgttcgtggtcagccagccctatagcggcatggtcctggccaagggcatgttccgcctgatcggcacctgcgccggtgcgctggtgtccatcggcatggtcgcactctatggccaggcatcgctgcccttcctcctgctgatggccctctggctggcgttctgcaccgccggcgcgtcgctgctgcacaatcatgcgtcctacggtttcgtcctggccggctacaccgcggccatcgtcgccctgccggccagcgccgatccggcgacggtgttcgaccaggcggtggcccgctgctcggagatcggcctgggcatcctctgcgcggcgctggtgaatgtgctgctctggccgcggcgcctggaacgccagttggcgaaccagggcaaggcggcctgggaggccggcttgcaggcggccgcggcggagctgcgcggtgccgacgaacgcggcgagctgctcgcggcgctggggcggatcgccgcggcggacgcccagcgcgaccacgcctggttcgagggtgcgctcggccgcgcccgttcccaggccttgcgcgtgctaggcctcgacctgctcggcctgctgcgcgcggcgcgcaaggtggctcgcgagcggaggctgctcgatccggccagcgcgcacgccttgcagccctggctggaagaactcgaggcactgttgcgcgagggccgccaggccgagttcgaggcctgccggcagcgcttgcgcctggcgctggacgcggcgcacggacagttgcacctgtgcctggtctgcctcgaacgcctgctcggcgaggcgagggcggccgggcgcagcgtcgaggcgctggtctatggcgcgcccacccgccaggcgccgggcgccatcgcctggcaccgggacatcgagcgcggcgtgctgttcggcctgcgcagcgccctggcgttcctctgcgtggccgcgttctggctggccagcgcctggccgagcgggttgggcgcggtgtcgatcaccggcgtggtgctgagtctcttcgccagccgcgacaacccggcccaggccggcctgaacttccttcgcgggatcctcctgtcgatcccgctggccggcttcgtcgcactgttctacctgcccggcgtggacggcttcccgctgctctgcctgggcctgggcgtaccgctgttcttcgccgcgctgtgcgtgaaccgggcgagcctggccgggatcgcctcgccgttctgcatcttcttcgtgaagaacgtcgcgccgagcaacagcatgagctacgacctcgcgcacttcctcaacaacgccctgtcgacggtgctcggggtggccttcgccgtgctggtgttcaacctggtcagcctgcggccgggcgaacgccattaccggcgcatgctgcaggccaccctcggcgacctggcgcggctcaccctgcgctcgccggcgcaggccgaggcctggttcggcgggcgcaccgcggatcgcctgatccgcctggcgcagcgctacgaccgtttgccggaggggcgccgccagccctggtcggacggcctgatgggactcgacttcggcgacgagctgctctacctgcggcagtgcctggaggaggtcccggcgtccctggcgcaggcccgcgaccgctacctgcggcgcctgcgcctggcgctgctgggcgatggcccgcgggctgagcgtgaacacgccctcgacccgccgaccgcgcgcctgctcaaggccctggccgccagcccgctggccggcagcgaacgcggcgagctggccggcgccgcgctggtgcagttgcaggccacctggcggcagtggtgccgcagccatgctccggccgggacggcgctgcgcgcggacccgctccccggagccgggcgctag

SEQ ID NO: 4028 - DNA, 984 bp, Pseudomonas aeruginosa
atgaagccgctggaacgactggaaccgctgttcgcagacgaaaccgaagaggacatcgatcaccgcgccgcctactggttcagccggcgtcgttccgggcatttcagcgctgcctgccgggccgagctggaggattggctacgcgccgatccgcgccatcgcgaagcgctcgagggcatggagcggctctggcgcgaattcgacggcctgccgcgcccggcgctggacgatattcccgagccggtgccggcctggcgcctgccccgggcgctggcggcggcgttcttcgtgttctgcgcgctgctcgtcgccaccctgttctggcgcgaccagtcgctcggaccgaacctcgcctacggcacggcacctggcgagcagcgcgaggtggtcctggcggacggatcgaagctgttcctcgacgtcgatacccaggtgcaggtgcgttacgccgagcgcacccgcgacgtgctgttgaagaaaggcgaggtgttcttcgtggtcagccacgatccggcccggcctttccgggtcggcagcggcgacagccgggtcaccgtactcggtacccagttcagcgtccggcgcaacgcgcaggccctcgccgtggcggtgaaacaggggcgcgtggcgttgcagccgtccctggagaaggatgccgaacatgtgctgctggctggcgacagcgcgcgcctggacctcgccgagcagcgcctggaactcggccatgtggcgccggagcaggtcgccagttggcgcgatgggcaactggtgttccgcgacaagccgctgggcgaactggtggaggaactgtcgcgctatcgcgccgcgccgatccgcctgggagatccccggcttgccggcaagcgggtctccggtacggtgcggatcgcccgccccgacgattttctcctcgccctgccggcgctattgccggtgcgggtgcagccgcaggctggtggcgaggtgctgatcctggcgcgctga

SEQ ID NO: 4029 - DNA, 894 bp, Pseudomonas aeruginosa
atgacctccacctcccgcggcctcgccggaacgctgttgccggtcggcctgctattgatcgccatggcctcgatccagagcggcgcctccctggcgaaaagcatgttccccctggtcggcgcccagggcaccacggccctaaggctgttcttcgccgcgctgatcctgctgctgctcctgcgtccctggcgcaagcgcctgagcctgcaatcgctgcgctcggtggtggtctacggcatcgccctgggcggcatgaacctgctgttctatctctcggtgcgcaccgtgccgctgggcatcgcggtggccctggagttcaccgggccgctgctggtggcgatcctctcctcgcggcgcctgctggacttcctctggatcggcctggcggtgttcggcatctggctgttgctgccgctgggcaacagcgccgagccgctcgacctggtcggcgccgcctatgccctcggtgccggcgtgtgctgggcgctgtacatcctcttcggccagcgcgccggcgccgaccatggcgcccagggcgccgcgctgggggtgctggtggcggcgatcctggttgtgccgatcggcgtcgcccacgccggcgccgacctcctcgacccggcgctgatcccgttggcgctgggcgtcgcggtgctctccacggccttgccctacaccctggaaatggtcgcgctgacccgcctgccggcgcgcaccttcggcaccctgatgagcatcgagccggccttcggcgcgctctccgggctgctgttcctcggcgagcggctgagcccgacccaatggctggccatcggcgcgatcatcctcgcctcggtcggcactaccctcagcgtcaagtcgcgtggcgccgccccggcgctaccggccaaggactga

SEQ ID NO: 4030 - DNA, 2442 bp, Pseudomonas aeruginosa
gtgcatttttccctccgcagtcgccacctgcgtccttcattgctcgccagcagcctgctcctggcggtgtcggcccagggccaggaaaagctcgacgtggatctgcccgccgcgccgctcggccaggcgatcaacgccctcgcgcaacaatcctcggtacagatccttttcgccggcgatctcggcgccggccgccaggcgcccgcgctgaaggggcgtttcacccccgaagaggcattgcgccagttgctcagggatagcggcctgaaggcgcaggccagggacgaacataccttcatcgtcgttccggccagcgaagccgccgtgcccgctacgcaagcccgcagcgaaccgctggacatggagcagatggaaatcaccgcctcgcgcaccagcagcgacctggtctccgccacgcgccagtccaccgtcatcgagcatgcccaactggaggagctgcgccagggctccgacagcctggccaccgtgctggccaaggcggtgccggggatgtccgattccagccgcaccatcaccgaatacggccagaccctgcgcgggcgcagcatgctggtgatggtcgacggcgtgccgctgaacaccaaccgcgactcctcgcgcaacctggccaacatcgacccggcgctgatcgagcggatcgaggtcatccgtggcagcagcgccatctacggcagcggcgccaccggcgggatcatctccatcaccacccgtccggccggcggcgagaaccgcgcggaaacccgcctcagcgccacctcgccgctgacccggctgggcagcgatggcctcggcggccagttccagcaatacttcgccggctccctgggggcgctcgactattcgttcgacttcggcacccgccacgtcggcgcttcctacgacgcccatggcgaccgcatcgccccggaacccagccagggcgacctgttcgactcgaacgtctacaacatcggcggcaagctcggcctgcgcatcgacgagaaccagcgcgtgcagctcgccctcagccactacgacgcccgccaggacaccgactacgccaccgacccgagggtcgccaggctgccgccgggctcggtcccggccaacgcgatcaaaggcctggagctggacgagcagaaccgcatccgcaacaccctggcgaacctcgagtacgagaacctcgacatcctcggcagccggctctccgcgcagctctactaccgcgactatttcacccgcttcactccgttcgacgcccgcgccgtctccacccgcggcggcaatgtcgaccagatcatgcagaacagcgaagtgttcggcagccgcctgaccctgcgcacgccgctgggcgaaagcggcaataccgaactggtctggggcggcgactacaaccaggaacgcagcgacatgccgctcgacgtgttcgacccggcggcctacgacgccagcggcgggctggtcttcgacaagatcggcaagctcacctacatgccgccgctacgcacccgcagcgccggcgcgttcgcccagttgcagcatcgcttcgacgaacactggtcgatcgacggcggcctgcgctacgaatactccaccgccgaattcgacgacttcatcccgctctccgagtccaaggccgcctcgccggtgaccgtcaagggcggcgacctcgactacgacgcggtgctgtcgaacctcggcatcgtctattcgccggtggctggccaggaaatctatgcctccttcagccagggcttccagttgcccgatgtcggcatccagctgcgcaacgcccgccgtggcttcgatatcggctcctcgaacctcgaaccggtgaagaccaacaactacgaactcggctggcgtggcgccatcggcggcaacaccctgggcagcctggcgctgttctacaccacctccaagctgggcgacgtgcagagcttcaacaacggcctgatcctcacccgcaccaaggagcgcatctacggcgtcgaggccagcgccgactggctcagcgacgacgaagtctggggcgcgggcggcagcgccacctggatgcgcggacgcgagaagccggacggcaaggactggcaggacatgaccggctaccgcgtgccgccgctgaagctgaccgcctacctgcaatacaagccggatgccgactggaacaaccgtctgcaggccaccttcttcgactccaaggactaccgtctcgacggcgtggaaagcttcggccggcgccaggtcagcacctacaccacggtcgacctggtcagccagtaccgcatcacccccgacgaccagttgagcctgggcatccagaacctgttcaaccgcgactactacccgctctacagccagttgctgcgcaacaacaacaacaccagccacctgccggcgccgggcacggtgctgacggcgagctatacgcacaactggtga

SEQ ID NO: 4031 - DNA, 342 bp, Pseudomonas aeruginosa
atgcgtagcccgcttgccacgattgcctgcgcctgcctgctgctcggcggctgctccaagtccgccgaggacagcgccaacccattgctgggcaaggatgccgagtgcctcgaactgttcgcccgcagcaatgcgctgtactgcgacatccgcgaggacgaacgcgaatcccaggcgaacggtacgccgcgccggcacaccgactacgaggtagccgatgccgcttacctgctcaaggccaccggggagcgctgcgcgatcgatacgacctatgtcacggagtgttcggcgaaggccgggcagtggctgcagaaggcccgcgccaaggcggcgaagccctag

SEQ ID NO: 4032 - DNA, 789 bp, Pseudomonas aeruginosa
atgaaagtctgggcagtcgccaatcagaaaggaggggtcggcaagaccacctcgtccatcgccctggccggcctgttggcggatgccggcaagcgcgtggtcgtggtcgacctggacccccacggctcgatgaccagctatttcggctatgacccggacaccctcgagcacagcgccttcgacctgttcctgcaccagggcaacgtccccgaggggctgccggcctcgctgctgcgcagcaccagcaacgaacgcatttccctgctgccgtcgagtaccgcgctggccaccctggagcgccagtcgccgggcaagagcggtctcggcctggtggtctcgaagagcctggcgcagctctggcaggatttcgaccatgcgatcatcgacagcccgccgctgctcggcgtgctgatggtcaacgccctggccgccagccagcacctggtgatcccggtgcagaccgagttcctcgcggtgaaagggctggagcggatggtcaacaccctggcgatgatcaaccggtcgcgcaaacaggcgttgccctataccatcgtacctacgctgttcgaccggcggacccaggcttcgctgagcacgctgcggattctcaacgagaactacccggacaacctgtggcaggcgttcattcccatcgatacccgcctgcgcgatgccagccgggccggggtcacgccgtcgcagcacgacggcaagagtcgcggggtgatcgcctaccgcgccttgctcaagcatctgctggcgcagcagccggccacccgggtggcctga

SEQ ID NO: 4033 - DNA, 999 bp, Pseudomonas aeruginosa
gtgaaacgactgttcagcgcctccctgctggccgccggcctggcgctcggcggcgccgctcacgccgcccagcccctgctcaacgtctcctacgacgtgatgcgcgacttctacaaggaatacaacccggccttccagaaatactggaaagcggagaaaggcgagaacatcaccatccagatgtcccatggcggttccagcaagcaggcgcgctcggtgatcgacggtctgcccgccgacgtcatcaccatgaaccaggccaccgacatcgacgccctcgccgacaacggcggcctggtgccgaaggactgggcgacccgcctgccgaacaacagcgcgccgttcacctcggccaccgtgttcatcgttcgcaagggcaaccccaaggccctgaaggactggccggacctgctcaaggacggcgtccaggtagtggtgccgaaccccaagacctccggcaacggccgctatacctatctctccgcctggggctacgtgctgaagaacggcggtgacgagaacaaggccaaggaattcgtcggcaagctgttcaagcaggtaccggtgctcgacaccggcggccgcgccgccaccactaccttcatgcagaaccagatcggcgacgtactggtgaccttcgagaacgaagccgagatgatcgcccgcgaattcggccgaggcggcttcgaggtggtctacccgagcgtgtccgccgaggccgagccccccgtggcggtggtcgacaaggtggtcgagaagaaaggcagccgcgcccaggccgaggcctacctgaagtacctgtggtcggacgagggccagaccatcgccgccaacaactacctgcgcccgcgcaacccggagatcctcgccaagttcgccgaccgcttcccgaaagtcgacttcttctcggtggagaagaccttcggcgactggcgcagcgtgcagaagacccacttcatcgacggcggcgtattcgaccagatctacagccccaactga

SEQ ID NO: 4034 - DNA, 684 bp, Pseudomonas aeruginosa
gtggctgaactggcgccgctgctggtttccgcgctgatcctcggcctgctcgggggaggccactgcctgggcatgtgcggcggcctgatgggcgccctgaccctggccattcccgccgaacagcgcggccgtcgtctgcgcctgctgctggcctacaacctcggccgcatcctcagctacgcctgcgccggcctgctgctcggcctggccggctgggcggtggcgcgcaccccgttggccggcgcgctgcgggtggtcgccgggctgctgctgatcgccatgggactctacctggccggctggtggagcggcctgacccgcgtcgaggcgctcggtcgcggcctctggcgccacctggaacccttcgcccggcgcctgctgccggtctccagcctgccacgggccctgctgctcggagcgatctggggctggctgccctgcgggctggtctacagcaccctgctctgggccaccagccagggatcggcactggacagcgcgctgctgatgctggcgttcggcctcggcacctggccggttctgctggccaccggcatggccgccgaacgggtgaccgccctgctgcgccgtcgcggcgtacgcatcgtgggcggcctgatggtcatcctcttcggcctctggaccctcccaggaccgcaccaggcctggctgatggggcattga

SEQ ID NO: 4035 - DNA, 2658 bp, Pseudomonas aeruginosa
atgaccgacaccgcacgcgccgacgcgctgctggccgacctgcccgctgacgggcgcggccgcctgaaagtctttctcggcgcggcgccgggggtgggcaagaccttcgccatgctgcaggccgcccaggcccagttgcgccagggcgtgaaactgcgcgccggggtggtcgagacccactcgcgggcggaaaccgagtccctcctcgcaggcgtgccgcagcagccgctgcgcagcctcgagtatcgagggatgaaactgcaggaaatggacctcgacggtctcctcgccgacccgccggcgctggccctggtcgacgaactggcccacagcaacgttcccggcagccgccacgccaagcgctggcaggacatccaggagttgctggcggcgggaatcgacgtctacacaacggtcaacgtccagcacctggagagcctcaacgaccaggtccgcgacatcaccggcgtgcaggtccgcgagacggtgccggactgggtgttgcaggaggcctacgagatcgtcctcatcgacctgccgccgcgcgagctgctggagcgcctgcgcgagggcaaggtctacgtgccggaacaggcgcgggcggcgatcgatgcgttcttctcgcagaccaacctcaccgcgctgcgtgaactggcgatgcagaccgccgccgcgcgggtcgacgccgacctcaaccaccgctaccgccagcgcggcgaggaagcgccggcgttgcgcgggcggctgctggtgggcatcgacggtgacgaacaggccgaacgcctggtgcgccacgcctgccgggtcgccgaacgtcggcacctgccctggagcgtggtacacgtcgataccggcggcttgcgcggcgagcaggcgcggatgcgcctgcagggtgcgcagcaactggccgagcggctcggcggcgagatcgtcgtgctgcgcgccggcgaggtggcgcggaccctcctgcaacatgcccgcgagcgccgcgccagcctggtcctggttggccagtcgcggcgccgctggtatcgccgggccttcggcggtggtctcgccgggcgtctgctgcgcgacggccagggcctggagatcagtgccctggacagcgaggccgacctgcgcccggcggaaccgcggccacgctatccggtggtgtggaacgactatctgctggcgctgctggcgaccgccctggccagcggcctggcctggatcgtggcgcacctgctggagctgccgaacatctccctggtgttcctgatggcggtgctgctggtggcagtgcgcagcagcctgatgccggcactgctgtgcgcggtggcgtcgttcctggcctatgacttcctgttcatcccgccgcatttttccttcgccatccatcgccacgaagacctgctgagcctggcgttcttcctgttcatggccggcctcaccggcaacctggcggcacgccagcggcgccagctggaggcgctgcgcgatacccaggaggaaaccagcctgctgctggagctgtcgcgcaagctcaccgccgccaccgaccgccaggcggtgctggccgccgccgcccagcagttcgacgactggaaggacgtcgaggtctgcctgctcggtcaggtcaatggcgagtggaagaccgaggccggcgtgcagcggcaactcgccgaccaggaacgggtcgccgcggactgggcctgggcccacgaccagccggccggcctcggtactggcacgctgcccggaggacgctggtggtggtggccgctgtcggcggaagagggaccgctggcactgctcggtgtcgcgccgctggacggccagccgctgagcccgcagcgccggcgcctgctcgccgccctcggccagcctctggcccaggccctggcgcgggctcgcctggccgaggacctggaggccgcgcgcctgcacggcgagaccgagcaactgcgcagcgccttgctcgcctcggtgtcccacgacctgcgcacgccgctgacggccatgcgcggctccatcgacagcctgctggcgctgggtgaggcgatcccgccggcggatcgtcgcgaactgctggaaagcacccgcgacgaggccgagcgactggaccgctatatccagaacctgctcgacatgacccgtctcggccacggtggcctgaagctggcgcgcgactgggtggcgccgggcgacatcgttggcagcgcgctgaaccgcctgcgcgcggtgctggcgccgtaccgggtgcaggcgatcgtggccaacgacctgccgttgctctacgtgcatgcggcgctgatcgagcaggcgctgatcaacgtgctggaaaatgccgcgcgcttctcgccgaaccacggccggttgcgcatcgaggtcagccaggatgccgccgagctgcgtttcgcggtgagcgacgaggggccggggattcccgaggccgagcgggagaagatcttcgacatgttctacaccgctgcccgtggcgaccgcggtggccagggcaccggcctgggcctggcgatctgccagggcatgatcggcgcccacggcgggcgcatcagcgtcggcgaaggcctcgacggtcgcggcaccacgctggtcctgcacctgccgctgcatccgcagccggacctcgggcaactggagggcgacgaatga

SEQ ID NO: 4036 - DNA, 546 bp, Pseudomonas aeruginosa
atgagcagccttaccgtctatcacgagaaccagccggagcagccgctgaagctgctgacccatgccgaggacatcgcttcgaccctggccgaggtcggcgtccgtttcgaacgctgggaagccgccgcgccgatcgccgccggcgccagccaggacgaggtgatcgccgcctacgcccacgagatcgagcggctcaagcgcgagcgcggctacatcaccgtggacgtggtcagcctgaacagcgaccacccgcagaaggccgaattgcgcgccaagttcctcgacgagcaccgccatggcgaagacgaggtgcgcttcttcgtcgccgggcgcggcctgttcgtcctgcatatcgaggagcatgtctacgccgtgctctgcgagcgcaacgacctgatctcggtgccggccggcacccgccactggttcgacatgggcgagcacccgcatttcgtcgccgtgcgcctgttcaacaacccggagggctgggtcgcccagttcaccggcgacgacatcgccagccgcttccccctgctggaagactga

SEQ ID NO: 4037 - DNA, 2331 bp, Pseudomonas aeruginosa
atgccacgttgtagtacccgttccgcccagcgcctgtctccgctgttcctggtcctgtcgctggccgtcctcggcctggcgccgccggtccatccggcacctgccgagactgccgccgcgcaagaggaagagcagtggacgatcaacatgaaggatgccgagatcggcgacttcatcgagcaggtatcgagcatcagcggccagaccttcgtcgtcgatccgcgggtgaaggggcgggtcacggtggtatcccaggcgcggctcagcctggcggaggtctaccaactatttctttcggtgctcgccacccacggctacgcggtgctgccgcagggcgaccaggcgcgtatcgtgccgaacatggaggcacgccaggacgccgcgcagaagaccgtccgcgatgggccgggcagcctggagacgcgggtggtccaggcgcagcagacctcggtggcggaactgatcccgatgatccggccgctggtcccggcccatggccatctggccgccgtaccgtcggccaacgcgctgatcgtcagcgaccgccgctccaacatcgagcgcatcgaggcgatcgtgcgcagcctcgaccgggccggcgaacatgactacagcatctacgacatgcgccatgcctgggtcgcggaaatcgccgaggtgctcgatcgcagcgtcaccccggccgccgggaagagcgccgccaccgtccaggtccttgccgacagccgcagcaaccgcctggtcctgctcggtccgccgcaggcgcgagcgcgcttgctgcggctggcgcagtcgctcgacgtcccctcgtcgcggtcggcgaacagccgggtgatccgcctgcgccatggcgacgccaagacccttgccgccaccctcggggagatcggcgaatcgctgcacggcgagcggggccaggatggccggggaagcggcaagcgcggcctgctggtgcgcgccgacgaatcgctgaatgccctggtgatcctcgccgacccggaggatgtcggcctgctcgaggacatcgtccgccagctcgacgtgccgcgcgcgcaactgctggtggaggcggcgatcgtcgagctgtccggcgagatcggcgacgccctcggggtgcaatgggcgctgcgtagcgggcatgtcgccggcggcgctggcttcgccgacagcgggttgtccatcggcaccctgctgggcgcgctgcaggccggcaagccgccggcagagctgcccgacggtgcgatagtcggcctcggcagtcgcgatttcggcgcgctggtcaccgcgctgagccgcaatagccgcagcaacctgctgtcgacgccgagcctgctgaccctggacaaccagaaggcggaaatcctggtcggccagaacgtgccgttccagaccggcagctacaccaccagcgccagcggttcgagcaatccgttcaccactgtcgagcgcaaggatatcggggtgaccctcaaggtcacgccgcacatcggcgaggaccgcatgctgcgcctggagatcgagcaggaaatatcctccatcgcgccaaccgccaccctggcggcgaaggcggtggacctggtgaccaacaagcgctcgatcaagagcaccgtactggctgacgacggccaggtcatcgtcctcggtggattgatccaggacgacctgcagcgcagcgattcgcgggtaccgctgctgggcgacatccccggcgtcggccggctgttccgctcgtcccgcgagacccgggtgaagcgcaacctgatggtcttcctgcgaccgagcatcgtccgcgatgccgccggcctggagcgcatcagccatggccgttaccgttccatccagttgctgcgcggtgccgccggcgaaccggcgcgcccgctgttcgaggatgccggcgccatcgacctgcgtcccgccgcccaggtcgcaccggcacctattggctcgccgcgcagctatccggctccagccccggtgctgatggagaagccgcgcctggcggacccggcgtccctgggcgacggtcgcggcggcgaggtgctggaggttcgccagggcacgcacgcgccgcagccgccgtcaccccagcgctacgccgtgcgattggtcgagggcagcagcgaagccttcatgcgcgcgctgatcgagcggcatccgggcctgtcgttgcgtttgcgccgcgaactgcgcgatggccaggagctgttcgcggtggagcggggcgactacctcgacccggagcaggcacgccgggccctggcggaactgcccgaaagcctgccgcgagggaaggcgcgggtgattgcgcatacgccgggaagcgccctgtga

SEQ ID NO: 4038 - DNA, 2172 bp, Pseudomonas aeruginosa
atggaagctgagaaaaccccggataacgtcgtgatcctcaaccacgaccccatcgtcgacccgttgcgccagggcttgttgctgctctgccggcagcttggccgaccgctcggcgacgccgaactggtggacggcatgccgctggagcacggtcgcctgccgttgcacctggtggcccgcgcgttgcgccgcgccgacatcaccgcccaggtcacccgccagccgttgcgccggatcgatcgctacctgctgccggccctgctgctgctcgacgacggccgcgccctggtgctggtgggcaacgacggcgagcacgccgaggtgctggtaccgcagagcgacggcggaagccagaggatgccgctggccgagctggaagcgctgtacagcggcacggcggtcttcgccaagtgccgctaccgcccggacgggcgggtcggcgactacgccagcgccttgcccgaacactggttcttcggcccgctcaagcggctctggcgttcctacgccgaggtcaccgccgcggcgttggtggccaacgtcctggcggtcgcctcggcactgttcgccatgcaggtctacgaccgcgtggtgcccaacgcggcgttcgacaccctgtggatcctcgccagcggcgtggccctggcgatcgtcctcgacggtgtcctgcggatcatgcgcggccacctgctcaacgtgctcggcaagcgcctcgacctgcaactctcgaccctgctgttctcccgcgtgctgagcacccgggtcgccgccaagccggcgtcgatgggcgccttcagtacccaggtgcgggagttcgagtcggtgcgcgagttctttacctcgtccagcgcggcgctgatcagcgacctgccgttcgtggcgatcttcctgctgatcatcgccgtgatcggcggccatgtggtctgggtgccgctggtggcctgcgtgctgatgatcctgccggggctgctgacccagcgcctgctcggccacctgtcgcggcagaacctgcgcgaaggggcgatgaagaacggcgtgctgctggaagccttcgagcacctggagacggtcaaggcgacccgcgccgaaggccgctgcctgcaccagtgggaaaccctgaccggcgaactggccggtacggcgatgaagacccatactctggcctcgaccctgagctactcggcgagcatcgtccagcagctctgctacgtcggcgtggtggtcttcggcgtctatcggatcagcgagggcgcgatgaccgtcggcggcctggtggcctgctcgatcctcgcctcgcgggccatcgcaccgctgtcgcaggcggccggcatcctcggtcgctggcagcacaccaaggtggcgatggaaggcctcgaccaactgatgagcgccgagcaggagcgaccccagggcaagcgcttcgtgcacaaggagcgcctgcagggacattaccgcctggagggcgtgcgcctggcccacggcgacagcccgccggtggtcgacgtgcaggccctgaacatccgcgccggcgagcgggtggcgctgctcggcggcaacggcgccggcaagtcgaccctgctgcgcctgctcagcggcctgctcgacgcgcaggcgggacgcctgctgctggacgacgtcagcctgacccagatcgacccggccgaccgccagcgcggtatcggctacctgccgcaggacgtggcgctgttccatggcagcctgcgcgacaacctcaacctggagaacgccgcgctgggcgacgaggaactgctggagaccctcgacggggtcggcctgggcgccttcgtccgcggccacccgctggggctggacatgccgatccagggcaacgccagcctgtccggcggccaacgccaggccgtcgggctggcccgggtgctgctacaggaccctccgatcctgctgctcgacgagccgaccgcggccttcgaccagggcagcgagaaacaggtcatcgactacctgcagcaatggttgggcaagcgcaccctggtcatcaccacccacaagaaaagcatgctcgccctggtcgagcgtgcggtggtcctgcgccagggcagggtgatcatggacggcccgctggagcaggtggtgcagggcaaccaggtacaggcaccgcaggccgccgaaggaggcaaccatggactctga

SEQ ID NO: 4039 - DNA, 1401 bp, Pseudomonas aeruginosa
atgaaactcacgctcacccctcccctgacccccagccactggatgcgctcgaccgacctggccgacgccaccagcgcccccctcgtcggcacccactcggcggacgtggcgatagtcggcggcggtttcgtcgggctctggaccgccatcaccctcaagcaactggagccggacgcacgggtcctgctgctggagcaggacgtctgcggcggcggcgcttccggcaggaacggtggtttcgtgatgtcctggtggccgaagatcggcaccttgctgggcttctgcagcgaggcgcaggcgcgcttccttggcgaaagcgcggagcgggcgatccaggaactcggggagttctgcgcgcggcatgacatcgatgcgcacttccagcagaagggctggctgtggaccgccaccacggcgcaccacctcgacgcctggaacgataccctcgccgcctgcgaacggctcggcgtcagtcccttcgaacgcctcgacgccagcgaagtggcacgccggaccggttcgccggtgcatctcgccggggtcttcgagcgcagcaatgccaccgtgcaaccagccttgctggtgcaaggcatgcgccgcgtggcgctggccctcggcgtggaaatccacgagcgttgtggcgtcagccagatcgttcccggccagccggcacagctgctgagcgccggggcccgggttcaggccaaggcggtggttctcgcgaccaacgcctggtcggccgccctgcccaggctctccaggctgatcgtgccggtgaacagttccatcgcggttaccgaggcgataccgcaacggctggagcgaatcggctggaccggcggggaagccatcaccgattcccaactgatggtggactactaccgcaccacccgcgacgggcgcatcgccttcggcaagggcaccggcgccctcagctacggctcgcgcatcggccgggtattcgacgtcgaccgggagagcctggccctgaccgaggccgacttccgccgcacctatccctcgctaggcgacatcccgctggtcgacggctggtccggccccatcgaccgtacctacgacagcctgccggtcttcggccgcctgcacgagaacatccactacggcatcggctggagcggcaacggcgtgggaccgagccgcctgggcgggcggatcctcgccagcctcgccctcggccgcgacgacccgtggagccgttgtccgctggtagaacgccgctgccggagcttcccccccgagccgctgcgctacctgggtggctccctggtgcgcaacgccgtcctgcgcaaggaacgcgcggaactcgccggtaccgcgccctcggccaccgaccgctttctcgcgcgcttcgcccccgccggccttgaagacaaatcctga

SEQ ID NO: 4040 - DNA, 915 bp, Pseudomonas aeruginosa
atgcacatccgtattctcggttcggccgccggcggcggcttcccccagtggaactgcaactgccgcaactgtcgcggggtccgcgacggcagcgtagcggcccagccacgcacgcaatcctccatcgccctgtccgacgacggcgagcgctggatcctctgcaacgcctcgcccgacatccgtgcccagatcgccgccttcccggccctccagccggcgcgtcggccgcgcgatacggcgatcggcgcgatcgtcctgctcgacagccagatcgaccacaccaccggcctgctcagcctgcgcgaaggctgcccgcacgaagtctggtgcacgcagatggtccaccaggacctcagcgaaggcttcccgctgttccccatgctttcccactggaacggcggcctgcgccaccggccgatcgccctcgatggcgagcctttcgccattccggcctgtccgcgcctgcgcttcaccgcgatccccctgcgcagtagcgcgccgccgtattccccgcatcgcggcgatccgcatccgggcgacaacatcggcctgttcgtcgaggacctcgatagcgccggtgcgctgttctatgcaccgggcctcggcgaggtggacgaggcgctgctcgaatggatgcgccgcgccgactgcctgctggtggacggtacgctctggcgcgacgacgagatgctggtctgcgaggtcggcgacaagctcggccggcagatggggcacctggcgcagagcgggccgggcggcatgctcgaggtgctggcgaaggtgccggccgcgcgcaaggtgctcatccacatcaacaacaccaatcccatcctcgacaccgcttcggccgaacgcgccgagctggatgccagtggcatcgaagtggcctgggatggcatgcacatccagctgtag

SEQ ID NO: 4041 - DNA, 1299 bp, Pseudomonas aeruginosa
atgaacctcgactccactgccctcgcctatcaatcgggcttcggcaacgaattcagcagcgaagcgctccccggcgccctgccggtcggccagaactccccgcagaaagcgccctacggcctgtacgccgaactgctctccggcaccgccttcaccatggctcgcagcgaggcccggcgcacctggctgtaccgcatcacgccgtcggccaagcatccgccgttccgccgcctggaacgacagatcgccggtgccgaactggatgcgccgactcccaaccgcctgcgctgggacccgctggcactgcccgagcagcccaccgacttcctcgacggcctgctgcgcatggccgccaacgcgcccggcgacaagcccgccggcgtgagcatctaccagtacctggccaaccgctcgatggagcgttgcttctacgacgccgatggcgaactgctgctggtcccgcaattgggccgtctgcgcctgtgcaccgaactcggcgcgctgcaagtcgaaccgctggagatcgcggtgatcccgcgcgggatgaagttccgcgtcgagctgctcgacggcgaggcacgcggctatatcgccgagaaccacggcgcgccgctgcgcctgcccgacctcggcccgatcggcagcaatggcctggccaatccgcgcgacttcctgaccccggtggcgcgctacgaggacagccgccagccgctgcaactggtgcagaaatacctcggcgagctgtgggcctgcgagcttgaccactcgccgctggacgtggtcgcctggcacggcaacaacgtgccctacaagtacgacctgcgccgcttcaacaccatcggcacggtcagcttcgaccacccggacccgtcgatcttcaccgtgctgacctcccccaccagcgtccccggcctggccaacatcgacttcgtgatcttcccgccgcgctggatggtggccgagaacaccttccgtccgccatggttccaccgcaacctgatgaacgaattcatgggcctgatccagggcgcctatgacgccaaggccggcggcttcgtgcccggcggcgcctcgctgcacagttgcatgagcgcccacggcccggacgcggaaagctgcgacaaggccatcgccgccgacctcaagccgcacaggatcgaccagaccatggccttcatgttcgagaccagccaggtcctccggccgagccgtgccgccctcgagacgccggccctgcagaatgactacgatgcctgctgggcgtcgctcgtatccaccttcaacccgcaacggagataa

SEQ ID NO: 4042 - DNA, 1275 bp, Pseudomonas aeruginosa
gtgagtgaatatatcgagaccgacgacgcaagttacttccgggtcaggcgccaggcctatgtttccgcggaactgcaccggcgcgaactgcacgagatattcgacgacagctggctgtatgccgcccacctcagcgaactgcgcgagcccggcgacttcatcacccgcgacgtcggcgggcgcaacctgatcatccagcgtcgcgccgatggcgagccggcggtctacctgaacgcctgcgcgcaccgtggggccaaggtctgcgccgagcgccagggcaacagccagcgtttcacctgtccctaccatggctggacctacgacagccacggcagcctgatcggcctgccggacaaggccgcctaccagcatgccgggcaatgccatccggagctgtccctgacacaggtgaaacacgcggtctaccgcaacttcctgttcatccactacggcgcccggcaagcgtccctggaaacctacctgggccaggcgaaggactatatcgacctgatctgcgaccagtccgaggcggaactggagatcatccccggcggcttcgagcattcgatcaaggccaactggaagctgctcgcggaaaacggcgtggacgcctaccacctgccgttcgcccacaagcgctacctggaatacctgaataccctcggcaccgatccggagtcgcacaagcgccatggccgcggcgaagcgctgggcaacggccacgcgctgatcatcagcggcccgccgtccaccggacggccgatcgcctactggagtccgttgttcccggaagcgctcaagccgtccatcgccgccaagttcgaacgcctggtggaacgcttcgggcaggcgcgggcagaggacatcgcccacaccaacaaaagcctgttcatctttcccaacctggtgatcaacgacatcctcggcctgaacatccgctcgttcttcccgaccgccgccgatgaggtcagcgtcaccgtatggggcgccggcttcgccgatgagacccgcgaggagcgggcggcgcggatcaatgggttgatctcgttcatcggcccgggcggtttcggcacccccgacgacgtcgagatcctcgaatcctgtcagcgcgcctacgcccacgccgccctcggctacagcgatttttcccgcggcatgggaccggcaacccgccgccacgtcgacgaggagcagaaccgcggcttctggcgcgagtggagccgccggctcgggcagcagcccgccgccctgcggcgtctcgccgtggccgtctga

SEQ ID NO: 4043 - DNA, 891 bp, Pseudomonas aeruginosa
gtggccagcctggtgaccgctgttctatttctagtggtgtgtatcagctgggggactacctggctcggcatcaagatcgccgtggagagcgtgccgccgctaactgccgccggattgcgctttctgatcgcatttccgcttttcctgctctttgcgcggctgcgccacgagacgatctttttcccgcggcgactcctggccttcttcgtcttcgtgacgctcggctacttcagcgtgccctactacctgctgaactatggcgagcaatacgtcgcttcaggtcttaccgcgctgctgttcagcagcatgcccgtgttcatcctgatcttctccgcgatcttcctgcgcgagcgcatctacctgtcgcagatccttggtattgcgattggcttcggcagcctgttcatgatcatcaggtctcaagggctgcatctggactacacggagttgttaggcgtacttgccatcctgctcgcggcgatcatgcacgcactcagctacgtcatcaccaaaaggcaaggtgctgacatcggcgtgatcaccttcaatacgctgcccattggcatcgccggcttggggctgttcatggccggactcgtgatggaacacccgaacctgtctgccgtcacaagccgatcttgggctgccctgatctatctcggtctggtggcatcagtcgggggattcatcgtgtacttcttcctgctcaagcgtttgagtcccgttgtgctgtcgtttgtcttcatcattttcccggtgttcgccgtgatcatcggcgcctggtacgaaggggttgccatctctcgcgagttgattggcttcaccgtgctcctattggctggatttgccatcaccaagcttcccatcgagaagctgctcggcaggaggtga

SEQ ID NO: 4044 - DNA, 1773 bp, Pseudomonas aeruginosa
atgtccagcacggttgccgatcaattgctcgaacgcttgagccagtggggggtgaagcgcgtcttcggctaccccggcgatggcatcaacgggatcatgggcgccatgggccggcgcgccgaggcattcgactatatccgcgtgcgccacgaggagatggcggccttcatggccggcgcccacgccaagttcaccggagaggtcggggtgtgcctggccacctcggggccgggcgcgatccacctgctgaacgggctctacgacgcgcgcatggatcatcagccggtgctggccatcgtcggccagcaggcggctaccgcgctgggcagcgactaccagcaggaagtcgatctgcagagcttgttcaaggacgtttccgcctatgtcgagaccgtggtcagcccggcacaactgctccatgtgctggaccgagccctgcgcgtggcggtcggcgagcggcaggtggcgacggtgatcgtgcccaacgacgtgcaacagatggcggccccgaagcgccagccccacgagcacggccacgtgatgtcggcggtgggcttcgtccagccgcgaccctacgcgcgcgacgccgacctggaggccgccgcggcgatcctcaatcgcggccggcgcgtggcgatcctcgccggtgccggggccctgggcgcgcaccggcaactggaagcggtcgccgagcgcctggccgccggagtggccaaggcgctcctgggcaaggcggcggtttccgacgacctgccgtacgtgaccggctccatcggcctgctcggcacccgcgccagcagcatgctgatggagcattgcgacaccctgctgatcgtcggcagcactttcccctacagcgagttcctacccaaggccggccaggcgcgggcggtgcagatcgacctgtatccgcgcaacatcggtatccgctatccgatcgaccaggccttgctcggcgatgcaggggaaaccctggagcgcctgctgccgctgctcgagcagaaaaagcacggtgcctggcgccgccgggtcgagcgggcggtgacggccagtcgcgaggaagcccggcgccaggccgaagagccagccgacccgatcaacccgcagcgggtattccgttccttgtcggagcaactgccggacgatgcgattctctgcggcgacagcggctcgcataccaactggtacgcccgcgacatccgcatgcgcccgggcatgctcggctcgctgtcgggcaagctggcgaccatgggcagcggcgtgccctacgccatcgccgccaagctcgcctatccgcagcggccggtggtggcgatggtcggcgacggcgccatgcagatgaacggcaacgccgaactggtcaccgtgcagcagtactggcagcgctgggactcgccgaccttcatcgtgctggtgctgaacaacggcgatctcaaccaggtgacctgggagcagcgtgccctggccggcgatccggagttcagcccggcgcaggaagtgatcgatttcccctacgcgcgttatgcggacatgctcggcttcaagggcatccgcgtggatcgcccggaggacatcgacgccgcctgggccgaggccttcgccgccgaccgcccggtgctgctggaggtggtcaccgacccgaacgtgccgccgctgccgccgcacatcagtttcgagcaggccaagcacctgcttggcgccatgctgcaggacgatcccaagcgctggggggtgattcgccagagcgcccggcaggtcctcgcgcggcactga

SEQ ID NO: 4045 - DNA, 552 bp, Pseudomonas aeruginosa
atgaccagaacttcgaacccatgcgcagtggtattggcctttgcggcaattgccgcttcgggaaccgcgatggcggcaaacactatcacattcagcggcgaagtgaccgaccagacctgccaggtcgcggtcaacggcttcaccgaccccacggtgatcctcgacagcgtaccggtgagcgccctcgatggcgcagtgggccgcagcgccggcgaaaccgccttcaccctgcaactcaccgattgcgtcgcgccgacggccgacgagcatttcaccaccctgttccaggccaccaaccccagcgccgccgggaacctggtgaacaccgccgccagcggcgcgacgggcgtggcgctgcaattgctcgatagcgtcggcggcaacccggtcgacctggccggcggcgcggcggtgcccgccggcgacatcgtgctcgccaacggagccaccagcaccagctacgactacgcggtgcagtacgtctccgaagcggcgaccgtgacgcccggtccggtactcggcgtcgtgacctacacgctgcgttacgagtga

SEQ ID NO: 4046 - DNA, 2130 bp, Pseudomonas aeruginosa
atgagcgagcagaacaacgagcagcgcagccaggcggccggcaccgacaccgtcgaccgtggcaacagcaacgccaagctggaacagctggaggcctatcgcgaggacgccaccggagaggccctgagcaccaataccggcacccgcatcgccgataaccagaacaccctgaaggccggcgagcgcggaccgtcgttgctcgaagacttcatcatgcgcgagaagatcacccacttcgaccacgagcgcattcccgagcgcgtggtccacgctcgtggctcggcggcgcatggctacttcgaggcctacgaggacctcagcgacctgaccaaggccggcttcctcgccgaggcgggcaagcgtaccccggtcttcgtgcgtttctccaccgtgcaggggccgcgcgggtccgcggatacggtgcgtgacgtacgcggcttcgccgtgaagttctataccgacgaaggcaacttcgacctggtcggcaacaacatgccggtgttcttcatccaggatgcgatcaagttccccgacttcgtccatgcggtgaaacccgaaccgcacaacgagattcccaccggagcgtctgcccacgacaccttctgggacttcgtttcgctgaccccggagtcggcgcacatggtcatgtggctgatgtccgatcgcgccattccgatcgcctaccgcaacatgcagggcttcggcgtgcacaccttccgcctggtcaacgcggccggcgagagcgtgctggtcaagttccactggcgaccgaagtccgggacctgctcgctggtctgggacgaggcgcagaagctcgccggcaaggaccccgacttcaaccggcggaccctctgggaggacatcgagaagggcgactatcccgaatgggagctgggcctgcaggtgatcccggagaaccagcaggacagcttcgacttcgacctgctcgaccccaccaagctggtgcccgaggagttggtgccggtaagggtggtggggcggatggtactcaaccgcaaccccgacaatttcttcgccgagaccgaacaggtggcgttccacgtcggccacgtggtccccggaatcgacttcaccaacgacccgctgttgcagggtcggctgttctcctataccgacacccaactgctgcgcctgagcgggccgaacttcaacgaaatcccgatcaaccgcccgctgtgtccgttccacaacaaccagcgcgacgcgccgcaccggcagaccatcaaccgcggccgggcttcctatgaaccgaactcgatcgacggcggctggccgaaggaaaccccgccggcggcgcgcaacggcggcttctccacctaccacgagccggtcagcggcagcaagctgcgcaagcgtgccgactccttcgccgatcatttcagccaggccgcattgttctggcacagcatgagcgaggccgagcaggcgcatatcgtcgccgcctacagcttcgaactgtccaaggtcgagcggcaatcgatccgtgagcgcgaagtcaaccagatactcctcaacatcgatccgcaactggccgccagggtcgcggcgaacgtcggtgtgcagctcgccgcgccggccaacccgacaccgcagccgaagccgtcgccggcgctgagccagatgaatctgctgtccggcgacatccgttcgcgcaaggtggcgatcctgatcgccgacggcgtcgccgagagcgacgtcagcgacctgcgcgacgcgctccgccaggagggcgcggacgccaagctgatcgcgcccagcgcttcgccggtgcaggctgaaaacggcgccgaactgagccctgagggaacctgggacggcctgccgtcggtagccttcgacgcggtcttcgtgcctggcggcgcggccagcagccaggccatcggcgctgacgggcgcggcctgcactacctgctggaagcctacaagcacctgaagccagtggccttcgccggcgatgcccaggcgctggccagccagctttcgttgcctggcgaccccggcgtggtgctcggcgccacggccaccgatgtcttccccggcctgcgccaggcattgatgcagcaccggatctggcagcgcgaggcggcgaccaaggcgatccccgcctga

SEQ ID NO: 4047 - DNA, 585 bp, Pseudomonas aeruginosa
atgaaaaccagctacgacgacacccgccagcatctgctcgataccggataccggatcatggcggtcaaaggcttctccggagtcggcctcaacgaaatcctgcagagcgcgggcgttcccaagggctcgttctaccattacttcaaatccaaggaacagttcggccaggccctgctggaggactacttccgcgtctacctggcggacatggaccaacgcttctccgcgccagggctgaatgcccgcgaacgactgatgagctactggcagaagtggctggacaacgcctgcccgccctgcgacgagcagcgctgcctggtggtcaagctcagcgccgaggtcgcggacctttcggaaagcatgcgcatcaccctgcgcgacggctccgacgggatcatcgaacgcctggtcggctgcctcgggcagggccgcgacgacggctccctcgcgccctgcgatgcccggcacatggccagcgcgctgtaccagttgtggctcggcgcgagcctgctgagcaagctgcaccgcagcccgggaccgctggaaacagccatgcagaccacccgcagcctgctggaaatctga

SEQ ID NO: 4048 - DNA, 1038 bp, Pseudomonas aeruginosa
atgtcccaatccacgcaggtcaaccgccgcatcgtcctcgcctcgcgcccccacggcgccccgacccgggataacttccgcatcgagcaggttccgcttcctgagcccggcgcgggccaggtgctgctgcgcaccgtctacctgtcgctcgatccctacatgcgcggacggatgagcgacgcgccgtcctacgcgccgccggtggaactcggcgcggtcatggtcggcggcacggtcagccgggtggaagcctcgaaccatcccgggttcaaggtcggcgactgggtgctctcggccaacggctggcaggactacgcgctatccgacggcagcggcctggcgcgcctgggcgagtcgccggagcatccgtcctacgccctgggcctgctcggcatgcccggcttcaccgcctacatgggcctgctcgacatcggcaagccccaggccggcgagaccctggtggtggccgccgccaccgggccggtcggcgccaccgtcggacagatcggcaagctcaagggctgccgagtggtcggcgtcgccggcggtgcggaaaaatgccgccacgccgtgcaggtgctcggcttcgatgcctgcctcgaccaccatgccgcggacttcgccgaacgactggccgaggcctgcccggacggcatcgacatctattacgagaacgtcggcggcaaggtcttcgacgctgtcttcccgctgctcaacgccaaggcccggatcccggtctgcggcatcgtcgcccactacaacgacaccgagctgccacccgggccggaccgcttgccggcgctgatgggcacgatcctgcgcaagcgcatcaaggtgcagggcttcatcatcttcgacgactacggccatcgctacgatgaattccagcgcgacatgtcgaagtggttcgccgacggcctcatccagtaccgcgaagagcgggtcgacggcctggagaatgcccccgaggccttcttcggcctgctccagggacgcaatttcggcaagctggtggtgcgcgtcggagccgacgcatga

SEQ ID NO: 4049 - DNA, 648 bp, Pseudomonas aeruginosa
atggccgagatcaatatctaccagaatcctggtcaatccctggctaatatctataagggttttgcccgtcaatgcaatcctggctttgtcttccccgaagcacagactatagaggcatgggacattccgctgaggctacacccggaattcattccgggcggagacatcagcaaagcggaccagcaatactcgacgttgcttgcccaggaaatagccaacggcgtaaccattggtttcaggatggttaatgaaaaggaacgtgtttgcaacgttgagatacttcctttgctcacctccatggcgcagaatcttgatcgaataaaagcccgtttcggcagtggatatcttgaccgcttcaagggcagtccgaacgtctatccaaccgacgttggtttctctacggatgcatccggaggcatttcgcaggaatccggactactggtttcctacggtgtgaatctgaggacactgactcctggtacttggcaggcaatgacgctccctgaggatatcaaagcgttagtcggacctggtgttggtttacgtctggacgctcccaacttcagcgacgtattcaatacgatcaaatcgggtctccgctatacgaccgcagtaaccttgctgctggcctattttgcagcgatctag

SEQ ID NO: 4050 - DNA, 615 bp, Pseudomonas aeruginosa
gtgcagcacatcatcggcatgccgttgcaactcatcatcatcggcatgccgcactccatcatcttcgccatcagcatgcagcagttcttgaacatctccatgtccatgccctgcatcggcatcatcctgcagtgcatggcgtcgccctgcatggagcactccatcatgcacttcatcggagccatgcccatcatcggcatgcccatccccatgcccatcgtcggcatcatcgccatgcaggcctgggacatgcccatcatcgccaggttgccgcactgcatcatcatgggcatgccgcagttcatcatcatcgccatcatctcggcgctgttgcggaactggcccatgtccatacccatcgccggcatcatcttgcacagcatgccgtcgtccatcgtttcgcactgcatggtcgccatcatcatcggcatgcccatcatgggcatcatcggcatggcggcattcatgttcatcggcatctgcatggcattcatcatggcggtaactcctgtaggcgaagcgggggtaggtgcgaatggggccgattctaggcagcgccgacgcaccggcaagatgccggtgcaacagccgagccgggcgctgcatggtggctag

SEQ ID NO: 4051 - DNA, 2448 bp, Pseudomonas aeruginosa
atgccagcaccacacggtctcagtcctctgagtaaggcgtttttgatgcgccgtgccttccaacgcaggattcttccccactcgctcgccatggccctgagcctgccgctggcgggatatgtccaggcgcaggaagtcgagttcgacatccctccccaggcgctgggcagcgcactccaggagttcggccgccaggcggatatccaggtgctgtatcgcccggaagaggtccggaacaagcgtagcagtgcgatcaagggcaagctggagccgaaccaggcgattaccgagctgcttcgtggcaccggcgcatcggtggacttccagggcaatgcgataaccatcagcgtcgccgaggcggcggacagcagcgtcgatctcggcgccaccatgatcacctccaaccagttgggcaccatcaccgaggacagcggctcctatacgccaggcactatcgccacggcgacccgcctggtcctgactccgcgcgagacgccccagtcgatcaccgtggtcacccgccagaacatggacgacttcggcctcaacaacatcgacgacgtcatgcgccatacgccgggcatcaccgtctcggcctacgacactgaccgcaacaactactatgcccgcggcttctcgatcaacaacttccagtacgacgggattccctcgacggcccgcaacgtcggctactccgcgggcaatacgctcagtgacatggccatctacgaccgggtggaagtactcaagggggcgaccggcctgctcaccggtgcggggtccctcggcgccacgatcaacctgatccgcaagaaacctacccatgaattcaagggccatgtcgaactgggcgcgggcagttgggacaattaccgctccgaactggacgtcagcggcccactgaccgagtccggcaacgtccgcggccgggcggtagccgcctaccaggataagcactcgttcatggatcactacgagcgcaaaaccagcgtctattacggcatcctcgagttcgatctgaatcccgacaccatgcttaccgtcggcgccgactatcaggacaacgatcccaagggatcgggctggtcgggcagcttcccgctcttcgacagccagggcaaccgcaacgacgtctcccgctccttcaacaacggagccaagtggagcagttgggagcagtacacccgcaccgtcttcgccaacctcgagcacaatttcgccaacggctgggtcggcaaggtgcaactcgatcacaagatcaacggctaccacgcgcccctcggcgcgatcatgggcgactggccggcaccggacaacagcgccaagatcgttgcgcagaagtacaccggcgaaaccaagagcaactcgctggatatctatctcaccggccccttccagttcctcggtcgcgagcacgagctggtggtcggcacctcggcttccttctcccactgggagggcaagagctactggaacctgcgcaactacgacaacaccaccgacgacttcatcaactgggacggcgatataggcaagcccgactggggtaccccctcccagtacatcgatgacaagacccgccagttgggcagctacatgaccgcccgcttcaatgtgaccgatgacctgaacctgttcctaggtggacgcgtggtcgactaccgggtaaccggcctgaatccgaccattcgcgagtccggacgcttcattccctacgtcggcgcggtctacgacctgaacgatacctactccgtctacgccagctataccgacatcttcatgccgcaggacagttggtatcgcgacagcagcaacaagctgctcgaacccgacgaaggccagaactacgagatcggcatcaagggtgaatatctcgacggacgactcaataccagtctcgcctacttcgagattcatgaggaaaaccgcgcggaggaagacgccctctacaacagcaaaccgaccaaccccgccatcacctacgcctacaagggcatcaaggccaagaccaagggctacgaggcggaaatctcgggtgaactggcgccaggctggcaggttcaggctggctatacccacaagatcattcgcgacgacagtggcaagaaggtttccacctgggagcctcaggaccagttgagcctctacaccagctacaagttcaagggcgccctggacaagctcacggtcggcggcggcgcccgctggcagggcaagagctggcagatggtctacaacaatccccgcagccgctgggaaaagttctcccaggaagactactggctggtggacctgatggcccgctaccagatcaccgacaagctgtcagccagcgtcaacgtcaacaacgtcttcgacaagacctactacaccaacatcggtttctacacctcggcatcctatggcgatccacggaacctgatgttcagcactcgctgggacttctga

SEQ ID NO: 4052 - DNA, 13029 bp, Pseudomonas aeruginosa
atgatggacgccttcgaacttcccaccaccctggtccaggccctgcgtcgccgcgctgtccaggagcccgagcgcctggcgctgcgcttcctcgccgaggacgatggcgaaggcgtggtcctcagctatcgcgatctcgacctgcgcgcgcggagcatcgccgcggccctgcaggcccatgcgcagctgggcgatcgcgcggtactgctgtttcccagcggccccgactacgtcgcggcgttcttcggttgcctgtatgccggggtcatcgcggtgccggcctacccgccggaatcggcgcgccgccatcaccaggaacgcctgttgtcgatcatcgccgacgccgagccgcgcctggtcctgaccaccgctgacctgcgcgagccattgctgcagatgaacgcgcaactgtccgccgccaacgccccgcaactgctctgcgtcgaccagttggacccggccgttgccgaggcctgggacgagccgcaagtgcgtcccgagcacatcgccttcctccagtacacctccggttcaaccgcattgcccaagggcgtgcaggtcagccatggcaacctggtcgccaacgaggtgctgatccgccgaggcttcggcatcggtgccgacgacgtgatcgtcagctggctgccgctgtaccacgacatgggcctgatcggcggcctgctgcaaccgatcttcagcggcgtaccctgcgtgctgatgtcgccgcgctacttcctcgaacgtccggtgcgctggctggaagccatcagccagtacggcggcaccgtcagcggcggtcccgatttcgcctaccggctgtgcagcgagcgggtcgccgagtcggccctgcagcgtctcgacctgagcggttggcgggtagccttctccggttccgagccgatccgccaggacagcctggaacgcttcgccgagaaattcgccgccagccgcttcgacgcgtccagtttcttcgcctgctacggcctcgccgaggcgaccctgttcgtcaccggcggccagcgcggccagggcattcccgccctggcggtggatggcgaggcgctggcgcgcaaccgcatcgccgaaggcgaaggcagcgtgctgatgtgctgcggccgcagccagccggaacacgccgtgctgatcgtcgacgcggcgagcggcgaggtcctcggcgacgacaacgtcggcgagatctgggccgccgggccgagcatcgcccacggctactggcgcaacccggaagcttcggcgaaggccttcgtcgagcgtgacgggcgcacctggctgcgcaccggcgacctcggcttcctccgcgacggcgaactgttcgtcaccgggcgcctgaaggacatgctcatcgtccgcggccacaacctctatccgcaggacatcgaacgcaccgtcgagagcgaggtgccgtcggcgcgcaagggcagggtcgcggccttcgcggtcacggtcgatggcgaggaaggcatcggcatcgccgccgagatcggtcgcggcgtccagaaatcggtgccggcccaggagctgatcgactcgatccgccaggcggtggccgaggcctaccaggaagcgccgaaggtggtggcgctgctcaatcccggcgccttgccgaagacgtccagcggcaagctgcaacgttccgcctgccgcctgcgcctggaagacggcagcctggacagctatgcgctgtttcccggcctccaggccgtgcaggaggcgcagccgccggcaggcgacgacgaactgctggcacgcatcggcgagatctggaaggcccggctgggcgtggcgcaggtagcgccgcgcgatcacttcttcctgcttggcggcaattccatcggcgccgcccaggtggtcgcccaggtgcgcgacagtctcggcgtcgccctcgacctgcgccaactgttcgaggcgccgaccctgcaggccttcagcgccacggtggcccgccaactggccgccggcctgccggccgaggcaccgatggcgcacctgccgcgcggtgtcgacctgccgcagtcggcggcgcagcagcgtctctggctgacctggcagatcgatccgcagagcgccgcctacaacatccccggcggcctgcgcctgcgcggcgagctggacgaagcggcgctgcgcgccagcttccagcgcctggtcgaacgccacgaagcgctgcgcacgcgtttcctcgagcgcgacggcgcggccttgcagcgtatcgacgagcggggcgagttcgcctggcagttcgtcgacctcgccgcgctggccgagcacgaacgcgccgcggctgccgcgcagcgccgcgaagccgaggcgcagcagccgttcgacctggaaaaggggccgctgctgcgggtcagcctggtgcgcctggacgaacaggagcaccagctctgggtcaccctgcatcacatcgtcgccgatggttggtcgctgaacctgctgctcgacgaattctcgcggctctacgccgaagcctgcggcggccagccggccgacctggcgccgctggaactgcactacgccgagttcgctgcctggcaacggcagtggctggacgcgggcgagggcgcccgccaactggcctactggcgggagcgcctgggcgacacggcgccggtgctggaactggccaccgaccatccgcgcacggcgcgccaggcgtcgcccgccgcgcgctacagcctgcgggtcgacgaagccctggcgcgggctatccgcgaggccgcgctggaccatgaggcgagtgtcttcatgtggctgctggcggcgttccaggcgctgctgcatcgccacagcgggcagggcgagatccgcatcggcgtgcccagcgccaaccgccagcgcctggagacccaggggctggtcggcttcttcatcaacaccctggtcctgcgcggcacgccccgggcgcgccagccgttcgccgcgttgctcggcgaggctcgcgaggcgaccctcggcgcccaggccaaccaggacctgccgttcgaccaggtgctcgcggcctgcggccagggcggccagttgttccaggtgctgttcaaccaccagcagcgcgacctgtcggcgttgcgccggctgcccggcctgctcgccgacgagctgccctggcacagccgcgaagccaagttcgacctgcaactgcagagcgaggaggacgctcgcggtcgcctgaccctgaatttcgactacgccgcggacctcttcgacgaggccagcatccggcgtttcgccgcgcaatacctggagctgctgcgccaggtcgcggaagacccgcagcgctgcctcggcgatatcgccctggtcgacgccgagcaggcggcgcacctcgccgaatggggcagcgcgccctgcgagccggcgcgcgcctggctgccggagctgctggagcggcaactggcgcagtccgccgaacgcgtcgccctggagtgggacggcggcagcctcggctacgccgaactgcacgcccgggccaaccgcctggcccactacctgcgcgacaagggcgtcggcccggacgtgcgggtagcgatctgcgccgagcgttcgccgcaactgctggtcggtctgctggcgatcgtcaaggcgggcggtgcctacgtgccgctggacccggactaccccagcgaacgcctggcctacatgctcgccgacagtggcgtcgagctgctactgacccaggcccatctgttcgaacgcctgcctggcgcggagggcgtcacgccgatctgcctggacagcctcaagctcgacaactggccgagccaggcaccgggcctgcacctgcacggcgacaatctcgcctacgtcatctacacctccggctccaccggccagccgaagggcgtgggcaacacccacgcggcgctggccgagcgcctgcaatggatgcaggccacctacaccctcgacggcgacgacgtgctgatgcagaaggcgccggtgagcttcgacgtgtcggtgtgggagtgcttctggccgctggtcaccggttgccggttggtcctcgccgcccccggcgagcaccgcgatccggcgcgcctggtggaactggtgcggcagttcggggtgaccacgctgcacttcgtgccgccgctgctgcaactgttcatcgacgaacccggcgtcgccgcctgcggcagcctgcgccgcctgttctccggcggcgaggcgcttccggcggagctgcgcaaccgcgtgttgcaacgcctgccggcggtggccctgcataaccgctacgggccgaccgagaccgccatcaacgtcacccattggcagtgccgcgcggaagacggcgagcgttcgccgatcggccgaccgctgggcaacgtggtctgccgcgtgctggacgccgagttcaacctgctgccggccggcgtcgccggcgagctgtgcatcggcggcctgggcctggcccgcggctacctggggcgcccggcgctgagcgccgagcgcttcgtcgccgatccgttctcggccgccggcgagcgcctgtaccgcaccggcgaccgcgcgcgctggaacgccgacggcgtgctggaatacctcggccgcctcgaccagcaggtcaagctgcgtggcttccgcatcgagccggaggaaatccaggcacgcctgctggcgcagccgggggtggcccaggcggtagtggtgatccgcgaaggcgtggccggcagccagttggtcggctactacaccggcgctgtcggcgccgaggcggaagccgagcagaaccagcgtctgcgcgccgcgctacaggccgaactgccggaatacatggtcccgacgcagttgatgcgcctggcgcagatgcccctcggcccgagcggcaagctggatacgcgggcgctgccggagccggtctggcagcagcgcgagcacgtcgagccgcggaccgagctgcaacggcgcatcgccgcgatctggagcgaagtgctcggcctgccgcgggtcggcttgcgcgacgatttcttcgagctcggcgggcattccctgctggccacccgcatcgtctcgcgcacccgccaggcctgcgacgtcgaactgccgttgcgcgcgctgttcgaggccagcgaactggaggccttctgcgaacaggtccgcgcagcccaggccgccggacgtaccgacagccacggcgcgatccgccgcatcgaccgcgagcagccggtgccgctgtcctactcgcagcagcgcatgtggttcctctggcaactggagccggacagcccggcctacaacgtcggcggcctggcacgcctgagcgggccgctggacgtggcgcgcttcgaggccgcgctacaggccctggtgcagcgccacgagaccctgcgcaccacgttccccagcgtcgacggcgtgccggtacagcgcgtgcacggcgatggcggcctgcacatggactggcaggacttctccgcgctcgaccgcgacagccgccagcagcacctgcagaccctcgccgacagcgaggcgcaccggcccttcgaccttgagagcgggccgttgctgcgggtctgcatggtgaagatggccgagcgcgagcactacctggtggtgaccctgcaccacatcgtcaccgaaggctgggcgatggacatcttcgcccgcgaactgggcgcgctctacgaggccttcctcgacgaccgcgaatcgccgctggagccgttgccggtccagtacctggactacagcgtgtggcagcgcgagtggctggagagcggcgagcgccagcgccagctcgactactggaaggcccagctgggcaacgagcatccgctgctcgaactgccgggcgaccggccacgcccgccggtgcagagccaccagggcgacctctaccgcttcgacctgagccccgagctggccgagcgcgtgcggcgcttcaacgccgcccgcgggctgaccatgttcatgaccatgaccgccacccttgcggccttgctctaccgctacagcggccagcaggacctgcgtatcggcgcgccggtggcgaaccgcatccgcccggagagcgaagggctgatcggcgccttcctcaatacccaggtgctgcgctgccggctcgacggacagatgagcgtcggcgagctgcttgagcaggtgcggcagaccgtgatcgatggccagtcgcaccaggacctgccgttcgaccacctggtggaagccctgcagccgccgcgcagcgccgcctacaacccgttgttccaggtgatgtgcaacgtccagcgctgggagttccagcagacccggcaactggccgggatgaccgtcgagtacatcgccaacgatgcgcgggcgaccaagttcgacctcaacctggaggtcaccgacctcgaccagcgcctcggctgctgcctgacctacagccgcgacctgttcgacgaaccgcgcatcgcgcggatggccggacactggcagaacctgctggaggcgctgctgggcgacccgcagcggcgcattgccgaattgccgctgttcgccgccgaggagcggaagcaactgctgctcgccggcacggccggcgaggcagggctccaggacaccctccatggcctgttcgccgcccgcgtggcggccagcccccaggccccggcgctgaccttcgcaggacagaccctgagctatgccgaactcgatgcccgctccaaccgtctggcgcgcgtcctgcgcagtcacggcgtcggcccggaagtgcgggtcggcctggccctggagcgttcgctggagatggtcgtcggcctgctggcgatcctcaaggccggcggcgcctacgtgccgctggacccggaatatccgctggagcgcctgcaatacatgatcgaggacagcggcgtacgcctgctgctcagccacgcggcgctgtttgaggccctcggcgagctgccggcaggcgtggcgcgctggtgcctcgaggaggacggcccggcgctggacgccgaggaccccgcgccgctggcagcgctgagcgggccgcagcaccaggcctacctgatctatacctccggctccaccggcaagccgaagggcgtggcggtctcccacggcgagatcgccatgcactgcgccgcggtgatcgagtgcttcggcatgcgcgccgaggattgcgaactgcacttctattcgatcaacttcgacgctgccagcgagcgcctgctggccccgttgctgtgcggcgcccgcgtggtgctgcgggcccagggccagtggggcgcggaggaaatctgcgagctgatccgcgcggagggcgtgagcatcctcggcttcaccccgagctacggcagccagctcgcccagtggctggagagccagggccggcagttgccggtgcgcatgtgcatcaccggcggcgaagcgctgaccggcgagcacctgcaacggattcgccaggccttcgccccggcgtcgttcttcaatgcctacggaccgaccgagacggtggtcatgccgctggcctgcctggctcccgaacgactggaggagggtgccgccagcgtgccgatcggcagcgtggtcggcgcgcgggtcgcctacatcctggatgccgacctggccctggtgccgcagggcgcgaccggcgaactctacgtcggcggcgccggcctggcgcgcggctaccatgagcgtccggcgctcagcgccgagcgcttcgtgcccgatcccttcgctgccgagggcggccgcctgtaccgcaccggcgacctggtgcgcctgtgcgacaacggccaggtggaatatgtcggccgcatcgaccaccaggtgaagatccgtggcttccgcatcgaactgggcgagatcgaggcgcgcctgctggagcatccgcaggttcgcgaagcgctggtcctggcgctcgacagcccgagcggcaagcagttggccggttatgtcgccagcgcggtggccgagcaggacgaggacgcccaggcggcgctgcgcgaggcgctgaaaacgcatctcaagcagcaattgccggactacatggtgccggcccacctgctgttgctcgccagcctgccgctgaccgccaacggcaagctcgaccgccgcgcgctgccggcgcccgacccggcgctcaaccggcaggcctacgaggccccgcgcagcgtgctggagcagcaactggccggggtctggcgcgaggtgctgaacgtcgagcgggtaggtctcggcgacaacttcttcgaactgggcggcgattcgatcctgtcgatccaggtggtcagccgcgcccgccagctcggcatccacttcagcccccgcgacctgttccagcaccagaccgtgcagagcctcgccgcggtggcccggcacagccaggccagccaggccgagcaggggccggtgcagggcgacagcgcgctgacgccgatccagcactggttcttcgacctgccgctggcgcgccgcgaacactggaaccaggcgctgctgttgcagccgcggcaggccattgacctcggtctgctgcgcaagtccctgcaacgcctggtcgaacagcatgatgccctgcgcctggcgttccgccaggtcgacggcgagtggctggcgcagcatcgtccgctgcgcgaacaggaactgctctggcacgtcccggtgcaatccttcgacgaatgcgccgagctgttcgccaaggcccagcgcagcctcgacctcgaacaggggccgctgctgcgcgcggtgctggtggacggcccggccggtgagcaacgcctgctgctggcgatccaccacctggtggtggacggggtgtcctggcgggtgctgctggaggacctgcaacaggtctaccgtcagttcgccgagggcgccgaaccggcgctgccggccaagaccagcgccttccgcgactgggccggacgcctgcaggcctacgccggcagcgaatcgctgcgcgaggagctgggctggtggcaagcccggctgggtgggcagccggtcgagtggccgtgcgaccgcccgcagggcgacaaccgcgaggcgctggcggaaagtgtcagcctgcggctcgacccgcaacgtacccggcaattgctgcaacaggcgccggcggcctaccgcacccaggtcaacgacctgctgctgaccgccctcgctcgcgtgctctgccgctggagcgggcagccatcgacgctggtgcagttggaagggcatggccgcgaggcgctgttcgacgatatcgacctgacccgcagcgtcggctggttcaccagcgcctacccgttgcgcctgaccccggcgcagagcccgggcgagtcgatcaaggcgatcaaggaacagctccgcgcggtgccgcacaaaggcctcggctacggcgtgctgcgctacctcgccgatccggcggtgcgccaggcgatggccgcgctgcccacggcgccgatcaccttcaactacctcggacagttcgaccagagcttcgccgacgccctgttccagccgctggaccagcccaccgggccgatccacgacgagcaggcgccgttgcccaacgagctgagcgtcgatggccaggtctacggcggcgagctggtgctgcgctggacctacagccgcgagcgctacgacgcgcggacggtgaacgagctggcgcaggcctatctcgccgaactgcaggcgctgatcgagcattgcctggaagacggcgccggcggcctgaccccgtccgacttcccgctggcgcaactgagccaggcgcaactggacgccctggcagtgccggccggcgagatcgaggacgtctatccgctgaccccgatgcaggaagggttgctgttacacaccctgctggaaccgggcaccggcatctactacatgcaggaccgctaccggatcgacagcccgctcgatcccgagcgcttcgccgctgcctggcaggcggtggtggcccgccacgaggcgctgcgtgcgtcgttcgtctggaatgccggcgaaacgatgttgcaggtgatccacaagcccggtcgcacccgcatcgagttcctcgactggagcgaactgccggaggacggccacgaggaacgcctgcaagcgctgcacaagcgcgagcgcgaggccggcttcgacctgctcgaacagccgccgttccacctgcgcctgatccgcctgggcgaggcgcgctactggttcatgatgagcaaccaccacatcctcatcgatgcctggtgccgtggcctgctgatgaacgacttcttcgagatctacagtgctctcggcgaaagccgcccggcgaacctgccgacgccgccgcgctaccgcgactacatcgcctggctgcaacgccaggacctggagcaatcgcgacgctggtggagcgagagcctgcgcggcttcgagcggccgaccctggtgcccagcgaccgcccgttcctccgcgagcacgccggcgaaagcggcgggatgatcgtcggtgaccgctacacgcgtctggacgccgccgacggcgcgcgcctgcgcgaactggcgcagcgctaccagctcaccgtcaacaccttcgcccaggccgcctgggcgctgaccctgcgccgcttcagcggcgagcgcgacgtgctgttcggcgtcaccgtggccgggcgcccggtgggcatgccggaaatgcagcgcaccgtcggcctgttcatcaacagcatcccattgcgcgtgcagatgccggccgccggccagcgctgcacggtacgcgaatggctgaaccggctgttcgagcgcaacctggagttgcgcgagcacgagcacctgcccctggtagccatccaggaaagcagcgagctgcccaagggccagccgctgttcgacagcctgttcgtgttcgagaacgctccggtggaagtctcggtactggaccgcgcgcagagcctgaacgccagttccgactccgggcgtacccacaccaacttcccgttgaccgtggtctgctatccgggtgatgacctcggcctgcacctgtcctacgaccagcgctacttcgaggcgccgaccgtcgagcgcctgcttggcgagttcaagcgcctgctgctggccctggccgacggtttccacggcgaactggaggccttgccgctgctcggcgaggacgagcgcgacttcctcctcgacggctgcaaccgcagcgcccgcgactacccgctggagcaaggctacgtgcggctgttcgaggcgcaggtggcggcccatccgcagcgcatcgccgccagttgcctggaacagcgctggagctacgccgagctgaaccgccgggccaaccgcctcggccacgccctgcgcgccgccggcgtcggcatcgaccagccggtggcactgctggccgagcgcggcctcgacctgctcggcatgatcgtcggcagcttcaaggccggtgccggctacctgccgctcgaccccggccatccgacccagcgcctgacccggatcgtcgagctgagccgcacactggtactggtctgcacccaggcctgccgcgagcaggcgctggcgctgttcgacgaactcggctgcgtcgaccggccgcgcctgctggtgtgggacgagatccagcagggcgagggcgccgagcacgatccgcaggtctacagcgggccgcagaacctcgcctacgtgatctacacctccggctccaccggactgccgaagggcgtgatggtggagcaggcgggcatgctcaacaaccagttgagcaaggtcccgtacctggaactggacgagaacgacgtgatcgcccagaccgcctcgcagagcttcgacatctcggtctggcagttcctcgccgcgccgttgttcggcgcccgcgtggcgatcgtgccgaacgccgtcgcccacgatccgcagggcctgctggcgcacgtcggcgaacagggcatcacggtgctggaaagcgtgccgtcgctgatccagggcatgctcgccgaagagcgccaggccctcgacggcctgcgctggatgttgcccaccggcgaggcgatgccgccggaactggcgcgccagtggctcaagcgctacccacggatcggcctggtgaatgcctacgggccggcggagtgttccgacgacgtggcgttcttccgcgtcgacctggcctccaccgagagcacctacctgccgatcggcagtcccaccgacaacaaccgcctgtacctgctcggtgccggcgccgacgacgccttcgaactggtgccgctgggcgcggtgggcgagctgtgcgtggccggcaccggcgtcggtcgtggctacgtcggcgatccgctgcgcaccgctcaggccttcgtcccgcatccgttcggcgcgccgggcgagcgtctgtaccgtaccggcgacctggcgcggcggcgcgccgacggggtgctggaatatgtcgggcggatcgaccaccaggtgaagatccgcggcttccgcatcgagctgggcgagatcgaggcgcgcctgcacgaacgcgccgacgtccgcgaggcggcggtggcggtccaggaaggggcgaacggcaagtacctggtgggctacctggttcccggcgagacaccgcgttccagcgccgactcgccggccggactgatggtggagcagggcgcctggttcgagcggatcaagcagcaactgcgcgccgacctgccggactacatggtgccgctgcactggctggtgctggaccggatgccgctcaacgccaacggcaagctcgaccgcaaggcgctgccggcgctggacatcggccagatgcagaaccaggcctaccaggccccgcgcaacgaactggaggaaaccctggcgcggatctgggccgaggtgctgaaggtcgagcgggtcggggtgttcgacaacttcttcgaactcggcgggcattcgctgctggccacccagatcgcctcgcgggtgcagaaggccctgcaacgcaacgtgccgctacgggcgatgttcgaatgcaccacggtggaagagctggccagctacatcgagtccctggccccgagcgagatcagcgagcagaaggccgagcgcctgaacgacctgatgtcgaagctggaaatgctctga

SEQ ID NO: 4053 - DNA, 480 bp, Pseudomonas aeruginosa
atgataactattttttttgaaactggtgaagagctggatttgcctttggataattttgctaagtcaaacttaagtgggctagagctgcatcgggcaatttttgatggtttagatctttcagaggctgattttactgcctcaaatttgaggaacgcttcttttaatcatgctctgttgggtggtgctgtaatgaatagtgcagcgcttatgaatgcaagttttgttgatgctataatgaaaggtgtaaaacttgtggatgctatggcggcttatgctgatttttcaggggcagatctttccatggctagtctaaaaaatgctgatataggcggttctaatttcataaattccaatttgcgagatgttaatattgatgtagcgaggatagatggcgctgtttttcggggtgccatatataatgatagaacgatttggcctaaaggatttattccggaaaattttggtgcgattaaaggctga

SEQ ID NO: 4054 - DNA, 1062 bp, Pseudomonas aeruginosa
atgcataacgacaattccaccgagaagcgcgccgacttctatcgacgcatccgccagcagcacctcaccccgctctgggaagccctgcacagcctggtcccggcgcaacccgccggcggctgccaggcggcgctgtggcgctatcgcgaactgcgcccgttcctgctcgaggcaggcgacctgatcagcgccgaggaagcggtgcgccgcgtgctggtgctggagaacccggaccttcccggccagtcgtcgatcaccccgagcctctacgccggcctgcaactgatcctgccgggcgagatcgcccccagccaccggcacacccagtcggccctgcgcttcgtcgtcgagggctacggcgcctacacctcggtggacggcgaacgcacccgcatggagccgggcgacttcatcatcaccccgtcctggacctggcacgaccacggcaaccgcgccgccgcggaaggcggcgagccggtggtctggctggacggcctggacatcccgatgctgcgtttcttcggcgccaccttcgccgaaaaccatgatgaaccggtacagccgttgcgacgtggcgaaggcgacagcctcgcccgctacggcagcaacatgctgccgctgcgccatcagccgacgacgccgacctcgccgctgttcagctacccctacgcgcgcagccgcgaggccctcgagcgcctggcgcgcctcgaacggcccgatccctgggaaggccacaagctgcgctacgtcaacccggccaccggcggctgggccatgccgaccatcgccacctgcctgcaactgctgccggccggcttcctcgggcagcccgcgcgcagcaccgacgccagcgtctattcggtggtggaaggcagcggcgtggcgcagatcggcggccggcgcttcgccttcgaggccaaggatctgttcgtcgtgccctcctgggccgagctgcgcctggaagccggcgccaccgactgcgtgctgttcagtttctccgaccgccctgtgcagcaggcgctcggcatcctccgcgaatcccgcgaaaccctcgcccactga

SEQ ID NO: 4055 - DNA, 765 bp, Pseudomonas aeruginosa
atgcttccggaccccctgcccgtcccgctcttcgccctgcgcatcgaccgcgcagccagccgcacggcctcccaccgccatgcctgcggccagctctactgcctggagcgcggccttctggtggtcgaggacgagcatggccgccaggccctgcctccgcgccagatcgcctggatcccaccgggtcacccacactcggcgcactcccacggcagcctggcgggctggagcgcctacctcgccgccgaacactgccgcgacctgccccggcaccccggcgtgctcgcctgctcggctttcgtggcgctgatcgtcgaacgcgccacccgctggccgaccggctccgcctggagcaccgaacgcgagaacctgctgcgcgtgctgctggacgaactgcgccacgccgtgccccagcggacccgcctgccctatccgggggattcgcgcctgcgcaggatcgccgaggcattgctggccaaccccggcgatccgcggccggcggccgaatgggcacgctgggcgggcctcagcagccgtagcctgagccggctgttcggcgccgagaccggtatgagcttcgcgcaatggcggcaactggcgcgactgcacgcggccgtcgaacggctggcagcgggccaggcggtcggcgaggtcgcctggtcgctcggctacgaaagcccgagcagcttcgccagtgccttccgcacagtattcggcgagacgccgtccggctattccagtcgcgccaacgaagcgctagcctga

SEQ ID NO: 4056 - DNA, 3189 bp, Pseudomonas aeruginosa
atgaatttctcccaattcttcatccagcggccgatcttcgccgcggtgctgtcgctgctgatcctgattggcggcgccatctccctgttccagctacccatcagcgaatacccggaagtggtgccgccgaccgtcgtggtccgcgccaacttccccggcgccaacccgaaagtcatcggcgagaccgtcgcctctccccttgaacaggcgatcaccggggtggagaacatgctctacatgtcctcccagtcgacctccgacggcaagctgaccctgaccatcaccttcgccctcggcaccgacctggacaacgcccaggtgcaggtgcagaaccgcgtcacccggaccgagccgaagctcccggaagaagtgacccggctcggcatcaccgtcgacaaggcctcgcccgacctgaccatggtcgtgcacctgacctcgccggataaccgctacgacatgctctacctgtcgaactacgcggtgctcaacgtgaaggacgaactggcccgcctcgacggcgtcggcgacgtccagttgttcggcctcggcgactattcgctgcgcgtctggctggacccgaacaaggtcgcctcgcgcaacctcaccgccaccgacgtggtcaacgccatccgcgagcagaaccgccaggtcgccgccggcaccctgggcgcgccgccggcgccgagcgataccagcttccagttgtcgatcaacacccagggtcgcctggtcaccgaggaagagttcgagaacatcatcatccgcgccggcgccaacggcgagatcacccgtctgcgcgacatcgcccgggtcgagctgggctccaaccagtacgccctgcgttcgctgctgaacaacaagccggcggtggcgatcccgatcttccagcgtcccggctcgaacgccatcgagatctccaacctggtgcgggagaagatggccgagctgaagcacagcttcccgcaaggcatggactactccatcgtctacgacccgaccatcttcgtccgcggctccatcgaggcggtggtgcacaccctgttcgaagccctggtgctggtggtgctggtggtgatcctgttcctgcagacctggcgcgcctcgatcatcccgctggccgcggtgccggtgtcgctgatcggcaccttcgcggtgatgcacatgctcggcttctcgctcaacgcgctgtcgctgttcggcctggtgctggccatcggcatcgtggtggacgacgccatcgtggtggtggagaacgtcgagcgcaacatcggcctcggcctcaagccggtggaagccaccaagcgtgccatgcgcgaggtgaccgggccgatcatcgccacggcgctggtgctctgcgcggtgttcatcccgaccgcgttcatctccggcctcaccgggcagttctaccgccagttcgccctgaccatcgcgatctccacggtgatctcggcgttcaactcgctgaccctgtcgccagcgctggcggcggtcctgctcaagggccaccacgagccgaaggaccgcttctcggtgttcctcgacaagctcctcggcagttggctgttccgtccgttcaaccgtttcttcgaccgcgccagccatggctacgtcggcacggtgaaccgggtcctgcgcggcagctcgatcgccctgctggtctacggcggactgatggtgctgacctacttcggcttctccagcacgccgaccggtttcgtcccgcagcaggacaagcagtacctggtggccttcgcccagttgcccgacgcggccagcctggaccgtaccgaggcggtgatcaagcagatgtccgagatcgccctggcgcagcccggcgtggcggactcggtggccttccccggcctgtcgatcaacggcttcaccaacagcccgaacagcggcatcgtgttcaccccgctgaagccgttcgacgagcgcaaggacccgagccagtcggccggggccatcgccgccgcgctgaacgccaagtacgccgacattcaggacgcctacatcgcgatcttcccgccgccgccggtacaggggctggggaccatcggcggcttccgcctgcagatcgaggaccgtggcaaccagggctacgaggagctgttcaagcagacccagaacatcatcaccaaggcccgtgcgctgcctgagctggaacccagctcggtgttctccagctaccaggtcaacgtgccgcagatcgacgccgacatcgaccgcgagaaggccaagacccacggcgtggcgatcagcgacatcttcgacaccctgcaggtctacctcggctcgctgtacgcgaacgacttcaaccgcttcggccgtacctatcaggtcaacgtccaggccgagcagcagttccgcctcgaacccgagcagatcggccagctgaaggtgcgcaacaacctcggcgagatggtcccgctggcgtccttcatcaaggtcagcgacacctccggtccggaccgtgtgatgcactacaacggcttcatcaccgccgaactcaacggcgccccggccgcgggctacagctccggccaggcgcaggcggcgatcgagaagctgctgaaggaggaactgcccaacggcatgacctacgagtggaccgagctgacctaccagcagatcctcgccggcaataccgcgctgttcgtcttcccgctctgcgtgctgctggccttcctcgtgctggccgcccagtacgagagctggagcctaccgctggcggtgatcctgatcgtgccgatgaccctgctgtcggcgatcaccggggtgatcctggccggcagcgacaacaacatctttacccagatcggcctgatcgttctggtggggctggcgtgcaagaacgcgatcctgatcgtcgagttcgccaaggacaagcaggaggaaggcatggaccgcgtcgccgcggtgctggaagcctgccgcctgcgcctgcggccgatcctgatgacgtccatcgccttcatcatgggtgtggtgccgctggtgatctccaccggcgccggcgccgagatgcgccatgcgatgggcgtggcggtgttctccgggatgatcggggtgaccttcttcggcctgctgctgacgccggtgttctacgtcctcatccgccgcttcgtggagaaccgcgaagcgcgccgcgccgccaacgacaaaggcctgccagaggtgcatgcatga

SEQ ID NO: 4057 - DNA, 561 bp, Pseudomonas aeruginosa
atgaatatccccaatctgctcacgttactgcgcgtcctgctcattccgatcttcattctgctgttctatctgccgacgtcctggagctacctgaccgccagtgccgtgttcgccctggccgccgccaccgactggctggacggctacctcgcccggcgcctcggccagagcacgccgttcggcgccttcctcgacccggtcgcggacaagctgatggtggcggttgcgctggtcttgctggtggaagagcacgccaacctgtggctgaccctgccggcggtgatcatcatcggccgcgagatcgtggtttccgccttgcgtgagtggatggccgaactgggggcgagggcgcaggtcgcggtgtccaacctgggcaagtggaagaccgcggcgcagatgctggcgctggtcattctcctggcgaatccgccgctgatgaccttctgggtgattctcggctacgtgctgctgatcatctccgcggcgctgaccctgtggtccatggtgcactacctgctggccgcgtggccgcatctgtcgaccaccccgaaagagaaataa

SEQ ID NO: 4058 - DNA, 960 bp, Pseudomonas aeruginosa
atgtctcgtccgttcctgcgtcgcttggccatcgtgtttgccgcttccgtcgtcctgtcgggcattggtggcgcacaggccgaggaggtcctgcgcatcggcttccagaaatcctcgactctgctgaccctgatccgcagccagggcaccttcgagcgcgagttggctaggcagggcatccgggtgtcctggcatgagttccccagcggcctgccgttgctcgaatcactcaatgtcggcaacgtcgatctctccgccgacgtcgccgacaccgtgccggtgttcgcccaggcggcgggtgctcgcctgacctacttcgcccgcgaaacaccttcgcccgcggcgcaggcgatactggtcggcgaacattcgccgctgaagtccctggccgagctgaagggcaggcgcatcgccgtgaccaaggccgccggcagccactacctgctgatcgccgcgctggccagcgccgggcttgagttctccgacatccagccagcctacctgacgccagccgacggccgcgccgccttcgagaacggcaaggtcgacgcctgggtgacctgggacccctacgtggcaagcgcccagcgccagcaacgcgcgcgggtactggccgacggccagggcctggccagctaccagcgctactacctcgcctccagcgactacgccaggaaacatcctgaagtgctccagcaggtcttcgccgaactgcagcgcaccgggcgctggctcaagagccacccggccgacgcggccaaggtgctggggccgctgtggggcaatctcgatgccgctaccgtcgagcaggcgaatgcgcggcgcagctacgacgtacaaccggtgagcgcagatggtctcgacgagcaacagcgcatcgccgacgccttccacgcccagggactgctacccaaaccggtggatgcgcgcgccgtggaggtatggcagccgcggcactga

SEQ ID NO: 4059 - DNA, 1596 bp, Pseudomonas aeruginosa
atgtccgcatatcagaacgagatcaaggcagttgccgcgctgaaagagaagaacggcagcagctggagcgcgatcaaccccgagtacgcagctcgcatgcgtatccagaaccgcttcaagaccggcctggatatcgccaagtacaccgcggccatcatgcgcaaggacatggccgaatacgatgcggactcctccgtctacacccagtcgctgggttgctggcacggcttcatcgggcagcagaagctgatctcgatcaagaagcacctgaagaccaccaacaagcgctacctctacctgtccggttggatggtcgccgcgctgcgctccgacttcggcccgctgccggaccagtccatgcacgagaaaaccgcggtttccggcctgatcgaagagctgtacaccttcctgcgccaggctgacgcccgcgagctggacctgctgttcaccggcctggacgctgcccgcgccgctggcgacaaggccaaggaagccgagctgctggcccagatcgacaacttcgaaacccacgtggtgccgatcatcgccgacatcgacgccggcttcggcaacgccgaggcgacctacctgctggccaagaagatgatcgaagccggcgcctgctgcatccagatcgagaaccaggtgtccgacgagaagcagtgcggccaccaggacggcaaggtcaccgttccgcacatcgacttcctcgccaagatcaatgccgtacgctacgccttcctcgagctgggcgtggacgatggcgtgatcgtcgcccgtaccgactccctgggcgccggcctgaccaagcagatcgccgtgaccaacgagccgggcgacctgggcgacctgtacaactccttcctggattgcgaagaaatctccgagtccgagctgggcaacggcgacgtcgtgatcaagcgcgaaggcaagctgctgcgtccgaagcgcctggcttccaacctgttccagttccgcaagggcaccggcgaagatcgctgcgtcctggactgcatcacctcgctgcagaacggcgccgacctgctctggatcgaaaccgagaagccgcacgtcggccagatcaaggcaatggtcgatcgcatccgcgaagtgattccgaacgccaagctggtctacaacaacagcccgtccttcaactggaccctgaacttccgccagcaggtgttcgatgcgttcgtcgccgaaggcaaggacgtttccgcctacgaccgcaacaagctgatgagcgtcgagtacgacgacaccgagctggccaaggtcgccgacgagaagatccgcaccttccagcgcgatggctcggcccacgccggcatcttccaccacctgatcaccctgccgacctaccacaccgccgcgctgtccaccgacaacctggccaagggctacttcgccgacgaaggcatgctggcctacgtgaagggcgtgcagcgccaggaactgcgccagggcatcgcctgcgtcaagcaccagaacatggcgggctccgacatcggcgacaaccataaagagtacttcgcaggcgaagccgctctgaaggccagcggcaaagacaacaccatgaaccagttccactaa

SEQ ID NO: 4060 - DNA, 1347 bp, Pseudomonas aeruginosa
atgacccttacctccattggtccggccaaccgcatggcgcgttcggcggaaacccatccgctgacctggcgcctgcgcgaagacgcccagcccgtctggctcgaggaatatcagagcaaggacggctatgccgcggcgcgcaaggcgctgacccagatggcccaggacgacatcgtccagaccgtcaaggactccggcctcaagggccgcggcggcgcgggcttccccaccggagtgaagtggggcctgatgccgaaggacgagtcgctgaacatccgctacctgctgtgcaacgcggacgagatggagccgaacacctggaaggaccgcatgctcatggagcagctgccgcacctgctggtggaaggcatgctgatttccgcgcgcgcgctgaaggcctaccgcggctacatcttcctgcgcggcgaatacgtcgacgcggcgcgcaacctcaaccgcgccatcgacgaagccaaggccgccggcctgctcggcaagaacatcctcggcagcggcttcgatttcgagctgttcgtccacaccggtgccggccgctacatctgcggcgaagagaccgcgctgatcaactcgctggaaggccgccgcgccaacccgcgttccaaaccgcccttccctgccgccgtcggcgtctggggcaagccgacctgcgtgaacaacgtggagacgctgtgcaacgtgccggccatcgtcggcaacggcgtggactggtacaagaccctggcccgccccggcagcgaagacatgggcaccaagctgatgggcttctccggcaaggtgaagaaccccggcctgtgggaactgccgttcggcgtcagcgcccgcgagctgttcgaggactacgccggcggcatgcgcgacggcttccagctcaaggcctggcagcccggcggcgccggtaccggcttcctgctcccggagcacctggatgcgcagatgttcgccggcggcatcgccaaggtcggcacccggatgggcaccggcctggccatggcggtggacgacagcatcaacatggtttccctgctgcgcaacatggaagagttcttcgcccgcgagtcctgcggctggtgcaccccctgccgcgatggcctgccgtggagcgtgaagctgctgcgtgccctggagcggggcgaaggccagcccggcgacctcgagaccctcgagcagctggtcaacttcctcggcccaggcaagaccttctgcgcccacgcgccgggagccgtcgagccgctgggcagcgccctcaagtatttccgtgccgaattcgaggcgggcatctcccgccagccttcggccgcgccgcgcccggcaacggtcggcgcctga

SEQ ID NO: 4061 - DNA, 1080 bp, Pseudomonas aeruginosa
atgatttctgatggcgcacgccgacatgcggcgtctgcccgctcgtctggcttcgttctggtcggagtggtctggttcctggccatcatgaccctgctggccagtgccgctgtactctgggtcgggcgctcgctggatgccacggaaaaccggcgcaaggtgctgcttcgtgagctggaggagcatgccttgctggcgcgggtccaatggctggtggctacccagcgctataccgtcgcgggcctgagcgtaccgggaaatgctggcgccgcgccgagcaaggtggacatggacacttcgatcctgcccattggcggggagctgcctctggatggccgggagttctgcatggccaatggctggtgcgttgcgctgctcgatcgctctgcgcgcctcagtctttccggcatcgatccgcgggtactgtccaggctgctggcggggttgggggttcccgccgagcaggtgcaggtcatggtcgcccaatggttcagctatctctatcccggcgccgctccacgactgggtagtgccgcgcaagccagcgacaggtcctctccgggccaggcccggcgccgtccgttgcgctcggtgatggaagtcttccggctggaggcctggcgcccctgggaagcgcatttgctcgacgccggttggcgcgatctggtcgcggcggacgaggcggcgctgaacatcaacaccgcggatgcccgaatcctgtctcttgcctggggactaccggaggacgctgtcggccgactgctgcaagcccgctggcagcgtccgttcacccggatgtcggacctgcatgacgtcctcgggggtcatgcgaggctggttcccgaggatggatgggcgcgcctggccagtccggtcctgtcgattcggctctacccgccaggagccgagcaggggacggaatacgaggtccgcttcaactcagagcaccgcctgctgccaccctggcagcttctctcgaagaggtccgtgaagataaatgatcgctactcgaatcctccgttgcatcccgatatcgcccccggggttcttgccgccccgcttgtggcaagaccgtggtaa

SEQ ID NO: 4062 - DNA, 975 bp, Pseudomonas aeruginosa
atgcccagtcgcatcaccctcaacgcaaacggaggccccgaggtcctgcgcctggagcaagtccaggcgcagcaaccgggccccggcgaggtctggctggagcaggccgccatcggcgtcaatccgctggacctcggccagcgctcgggagcggtaccgattccgctgccgtccggcctcggcctggaaggcgccggagtggtcgccgcgctgggtccgggagtctccggactggcgccgggcgaccgcgtcgcctatgccaccggcccgctgggcgcctatgccagcgcccggctctaccccgccgagcgcttgctgaagctgcccgacacactcgctttcgaggacgcggcggcgctgctgttcaagggcatcaccgcgcactacctgctgtacgccacctaccccgtcgggcccggcacacgcatcctgctgtacggcgcggcgggcgccgtcggccagttgatggcggcctgggcccggcacctgggcgcctgggtgatcggcgtggtgtcgaaggcggaaagcgtcgagcgggccagggctgccggctgcgacgaggtgctggtgttcgacgcggccagtctcgccgcccaggtcgccgagctgaccgccgggcgcaaggtcgatgtggtctacgaccccatcggtcgcgctaccttcgaggcatccctgaacagcttgcgtccgcgcggcctgctggtgtccttcggcgctacctccggcgtgccgccagccgtcgaagtcgccaccctcaacgccaagggttcgctgttcctcacccgtccctcgctcgccgcccacaccgccaacccggaggaataccggctacgcgcgcaggctgtgctgcgcgcccatgcagacggtgtcattcagccccgggtctggcggcgctacccgctggccgaggcggccgtggcgcataccgatctgctggagggacgctcgcaaggcgcgctggtactcttgccctga

SEQ ID NO: 4063 - DNA, 3954 bp, Pseudomonas aeruginosa
atgagcggcctaccggtttcccatgtcggcgagaaagtctcgggaggggttatctccaccggctcgcccaccgtgcacgtcggcagcagcgcggtcggcctggccgaccgggtgtccgcctgcgtgccgttggtgggcaagccggtcaacccgatgctcggcagcaagctgctgccggaagaggtcgatttcgccctggcggcgccggacaccttcaccttcgcccgtggctacctgtcgagcaacccccgtatcggccggctcggccggggctggtggctgccgggcgagagcatgcacctggaactgagcgaagacgcctgcgtgctggtcgacgcccagggccgccggatcggctttcctgcgctggctcccggcgcccagcattattccggcagcgaggagctgtggctgcgccgcggcggttcgagcggcggcgaagcgcaggcctggcgcgggcgctgggcggcggtgccggccgaactgcagacgcaggagggctccgtgctggtgctgtccggccacagctacctgcatttccagcgttgccccgacggtatctggcgcctgcaggccagcttcggccgcgccggctaccgcaccgagttccgctggagcggacgtggcctgctcaccggcgtgcgcgacagcgccgggcgcagctatgcgctggtctaccagcaagcctgcgagccgagcgagggcgacgacggcctgcgtctgttcggcgtgatcctggccagccacgacggaccgcctccggactacatcgatccgcagagcccggggctcgactggctggtgcgctaccagttcagcgacagcggcgatctgatcgccgtgcgcgaccgtcttggccaggtggtccgggtattcgcctggcgcgagcacatgctggtcgcccacggcgaaccgggcgggctggaggttcgctacgagtgggatgtccatgctccgcacgggcgggtcgtgaagcagatcgaggcgggcggcctgacccgtaccttccgctacctgcgcgatgccaccgaggtcagcgacagcctcggccgcgtcgaacgctacgagttcgccggcgagggcgggcagcggcgctggaccgcgctggtcagggccgacggcagccgtagcgagttcgactacgacctgttcggccgcctggtcgccatgcgcgatccgctgggacgggagacgcggcgccggcgcgatggccaggggcggatgctcgaggaggagtcgccgggcaaggcgcgctatcgcaagcgcgtcgacgaagagaccgggctgctggtcgagctggaggacgcgatgcagcgccgctggaccttcgagcgcgacgaacggggcaatgcgacgacggtgcgcggcccggccggcagcacccgctacgcctacgaagacccgcgcctgcccgaccggccgacgcgaatcgtcgacccgcgcggcggcgagcggcgcctggagtggaaccgcttcggcctgttggccgcgttgaccgattgttccggccaggtctggcgttacgactacgacaacgaaggacgtttggtcgccagcagcgacccgctgggacaactgacccggcgccgctacgacccgctggggcaactgatcggcctggaattggccgacggcagcgccctgagctatgaatacgacgcccttgggcggcagacccgtatcgccgatgccgaggggcacgccacgctgttttcctgggggcacggcgatctgctggcgcgggtttccgacgccggcggcggcgaattgtcctacctgcacgacgaagccggcaggctggtcgccctgaccaacgagaacggcgtccaggcgcagttccgctacgacctgctggaccgtctggtggaagagaccggcttcgacggtcgtcgccaacgctatcgctacaacgccgctgacgaactgatcgcccgcgaggatgccgacggtcgcgagaccacctatgcctacgaccgcgacggccgcctggcgagcatccgggttcccgccaccgagcacgcaccggccctggtcgagcgttaccgctggttggccgacggccgcctggccagcgccggcggggcggattgcgaggtgcgctacacgtacgacgaggtcggtaacctgcgcctggaaagccaggtacatgccgacggttgggtctacagcgtcgagcacagccacgacgcgctaggcgtgcgccagaccagccgctacggcgacgcgccgccggtcgcctggctgacctatggcccgggtcatctgcacggcgcgctggtcggtgcggtcgagctggccttcgagcgcgatgccctgcaccgtgaggtgcgtcgcgacgcccgccgcgacgggcaggatgacgcgttgttcacccaggagcgccagcacgcgccgctgggacgcctgcagcgcagccgcctgcgtctggccggcggtttcgactggcagcgcggctatcgctacgacggacttggacaactggtcggcatcgacgacaaccagtatccgtcggtgcgctacgaatacgacctcggcggtcgcctgctggccagccggcgcgctggcgcggcggccagcacctaccgctacgatgccgccggcaaccgcctggagggcgtcggcgagcacgcgcgcgaggacgctcgccaggcattcgccgagaacgaactgtaccgctccggtttcagtcgctccgagacgcgcgcgagccaggccggcgaaggcccggcgcgctgggccggcaaccgcgtggagaggatcgccggcaaccgctatcgcttcgatgcgctgggcaacctggtcgagcgtatcggcgccgacggcgagcgcctgcgcctggcctacgacggcgcgcagcgcctggtccatctgacgcgcgattacgccgacggtacgcggctggaggcgcgctaccgctacgacgcgctgtcgcgacggatcgccaaggtggtgctgcgcgacggtgtcgagcagcaggtgcgcttcggttgggacggcgatcgccaatgcgccgaagcctttgcgcgggaactgcgcaccaccgttcacgaaccgggcggtttcgtcccgttgctgcgcctggagcaggcctgcgagcccgatcccccggagctgctgcaactgcgccaggcgttcgccgccgaaggccagccgctgccggcgcaatgcgtgccggcgctgggcgaggcgcggatcgctttcttccacaccgatcacctcggtacccccctgcagctgagcgacgaacgtggccaactgcgttggcagggcgttccggacgactggcgggcggtagcgccggaacgacagccgggtgcgcagccgatccgcttccaggggcagtaccacgatgaggaaagcggcctctactacaaccgctaccgttactacctgccggaagccgggcgctatgccagccaggacccgctcggcctgggcggtggccccaacccctatgcctacgcgctgaacgcgcccacgctggcctacgatcccaccggcctgatcatcccgctggtggtgatcggcgccttcgccgcccgcgccgcgatcggagcggcgctgggcgccggcatcgagctggggatgcagaccggcaagcaggtgctggggcagatgaaggacaactgggacagcgatcgcgacctcaccgatatcaagtggaagtgcatcgacatcaactggaaacacgtcggcgcctcggcggccatcggcaccgtggcgccgggcatgctcagcaccggcaagaccgtggtgcagtccgccaaggcgatcaggaccctttccggacaggcggccaacaccgccaaccgcgcggccaagctggccgcgcgcaaggccgcccatgccgataccatcaagaaggccgtggccacccaggccgcctggcagacgggcaagcagatcgtcaaatgcccactgaaggacgaagaagaggagtgtccgccgcaatga

SEQ ID NO: 4064 - DNA, 639 bp, Pseudomonas aeruginosa
atggaactgagcctgtcgcgggtgcatttcccggtgaccaccctgggcccgggacggcgcctgggcatctggttccagggctgtagcatccgctgccccggctgcatctccgccgatacctgggggccgggcaggcggcgtatcgccctggcacgcctgctcgccgacatccagccatggctggagcaggccgagggcatcaccgtctccggcggtgaacccttcgagcagttcgctgccctcctcgccctgctcggcgaactgcgccggcgcagccgcgccgacatcctggtctacagcggctacccgctggagcatctgcacgcgcaactggaacaggccgccgggctgatcgacgcgctgatcagcgacccctaccaacagcacgccgaacagagcctggccctgcgcggcagcgacaaccagcgcctgagcctgctcaccgaactcggccgcgcgcgcctcggcggctaccagcggccactgcgcgaagacgacaaggccctcgacctgatgttcgaccatgacggcagcgtgtggatggccggcatcccgcgccgcgacgacctgctgcggctacaggacctgctgcgcgaacagggccaccaacttagcgtcagcgcccatcggccgcgctga

SEQ ID NO: 4065 - DNA, 195 bp, Pseudomonas aeruginosa
atgccaaagatgaagaccaaaagtggcgcggccaagcgcttcaagaagactgctggtggcctcaagcacaagcacgccttcaagagccacatcctgaccaagatgaccaccaagcgtaagcgtcaactgcgcggcacctcgatgctgaacaagtctgacgttgcgcgcgtagaacgctccctgcgtctgcgctga

SEQ ID NO: 4066 - DNA, 702 bp, Pseudomonas aeruginosa
atggcccagtcggaaaccgtcgaacgcattctcgatgcggcggaacagctgttcgcggaaaaaggcttcgccgaaacctcgttgcgtctgatcaccagcaaggccggggtcaacctggcggcggtgaattatcacttcggttcgaagaaggcgctgatccaggcggtgttctcgcgcttcctcgggccattctgcgccagcctggaaaaggagctggatcgtcgccaggccaagcccgaggcccagcacgccaccctggaggacctcctgcacctgctggtgtcccaggcgatggcggtgaagccgcgcagcggcaacgacctgtcgatcttcatgcgcttgctcggcctggccttcagccagagccaggggcacctgcgcaagtacctggaggaggtctacggcaaggtcttccggcgctacatgctgctggtcaacgaggctgcgccgaagctgccgcccatcgagctgttctggcgcgtgcacttcatgctcggcgcggccgccttcagcatgtcggggatcaaggccctgcgggcgatggcggaaaccgatttcggcgtgaacacttccaccgagcaggtgatgcacctgatggtgccgttcttcgctgccggcatgcgcgccgagagcggcatcgacgatccgctgctggccggggcgcaactgcgcccgcggaacaagacgcccgccaaggcctga

SEQ ID NO: 4067 - DNA, 2607 bp, Pseudomonas aeruginosa
atgggtaaatcgctggtcatcgtggaatccccggccaaggccaagaccatcaacaagtacctgggcagccagtacgtggtgaagtcgagcatcggccacatccgtgacctgcccaccagtggttcgtcgagttccaaggagccggcggccaagggccgcaagagcgcctccgaggcgccggcgctgtcaccgaaggagaaggccaggcgccaactggtctcgcgcatgggggtcgaccccgagcatggctggaaggccaagtacgagatcctgcccggcaaggaaaaggtcatcgacgagctgcgccgcctggccaaggacgccgacaccgtctatctcgcgaccgacttggaccgcgaaggggaggccatcgcctggcacctgcgggaagccatcggcggcgacgaaagccgctacaagcgcgtggtattcaacgaaatcaccaagaaggccatccaggaggccttctcccagcccggcgagctcgatatcaaccgggtgaacgcccagcaggcgcggcgtttcctcgaccgcgtggtcggctacatggtctcgccgctgctctggcagaagattgcccgtgggttgtccgccggccgcgtgcagtcggtggcggtgaagctggtggtggagcgcgaacgcgagattcgcgccttcgtcccggaagagtactgggaagtgcatgccgacctcggtaccgccaagggcgccaacgtgcgcttcgaggttacccgtgagaagggcgaggccttcaagccgctcaacgaagcccaggccatggcggccctggaaaagctcaaggcctcggcctatagcgtcgccaagcgcgaggaccggccgacctccagccgaccctcggcgccgttcatcacttccaccctgcagcaggcggcgagcaaccgcctgggcttcggggtgaagaagaccatgatgatggcccagcgtctctacgaggccggctacatcacctacatgcgtaccgactcgaccaacctgtcggccgatgccattggcatggtccgcggtttcatcgaggacgagttcggccagaagtacctgccgggcaaggccaacgtctactcgagcaaggagggcgcccaggaagcgcacgaggcgatccgtccttccgacgtcaacctcaagccgacccagctgtccggcatggagcgtgacgccgagcgcctgtacgacctgatctggcgccagttcgtggcgtgccagatgaccccggccgaatacctctcgaccagcgtgagcgtcaccgccggcgatttcgagctgcgcgccaagggccgcatcctcaagttcgacggttatacccgggtactgccgcagcagagcaagccgggcgaggacgacgtcctgccggaaatgaaggaaggcgagaacctcaagctgatcaagctcgatccgagccagcacttcaccaagccgccggcgcgctactccgaagcgagcctggtcaaggaactggagaagcgcggtatcggccgcccctcgacctacgcggcgatcatctccaccatccaggagcgcggctacgtaaccacccacaaccgccgcttctatgcggagaagatgggcgacatcgtcaccgatcggctcaacgagagcttcgccaacctgatggactacggtttcaccgccgggatggaggagcatctcgacgacgtggcccagggcgagcgcgactggaagcacctgctcgacgagttctacggcgatttcaagaagaagctcgaggtggccgaagtcagcgagaaggggatgcgcgccaaccagccgaccctgaccaacattccctgccgcgagtgcggccggccgatgatgattcgtaccgcctccaccggcgtgttcctcggctgctcgggctacagcctgccgccgaaggagcgttgcaaggcgaccgtcaacctgattcccggcgacgagatcgccgcggacgacgagggcgagtccgagtcgcgggtgttgcgtggcaagcatcgctgcccgatctgcagtaccgcgatggacgcctacctgctggacgagaaacacaagctgcatatctgcggcaacaaccccgactgtccgggctacgagatcgaggaaggccagtaccggatcaagggctacgaagggccgagcctggaatgcgacaagtgtggcagcgagatgcagttgaagaccggccgtttcggcaagttcttcggttgcaccaatccgacctgcaagaacacccgcaagctgctgaagaatggcgaggcggcgccgccgaagatggacgccatccgcatgcctgaattgaagtgcgagaaggtggacgatatctacgtgctgcgcgacggcgcttcgggcatgttcctggccgccagccagttcccgaagaaccgcgagacccgcgcgccgttggtgagcgagatcatcccgcacaaggccgagctggatcccaagtaccattacctctgcgacgccccgcagaaagacccggacggccgtcccgcggtgatccgtttcagccgcaagaccaaggagcaatacgtgcagtccgaggtcgatggcaagcccaccggctggcgcgccttctacgatggcggcaagtggaaggtcgaagacaagcgctga

SEQ ID NO: 4068 - DNA, 1176 bp, Pseudomonas aeruginosa
atgagcctgaatccgagagacgtcgtcattgtcgacttcggccgcaccccgatgggtcgttccaagggtggcatgcaccgcaacacccgcgccgagaccatgtcggcgcacctgatcagcaagctgctggagcgcaacccgaaggtcgacccggccgaagtggaagacgtgatctggggctgcgtcaaccagaccctggagcagggctggaacatcgcgcgcatggcgtcgctgatgacccagatcccgcacaccagcgccgcgcagaccgtcagccgcctgtgcggttcgtcgatgagcgcgctgcacaccgccgcccaggcgatccagaccggcaatggcgatgtattcgtcatcggcggcgtggagcacatgggccacgtcggcatgatgcatggcgtcgacccgaacccgcacctgtccctgtacgccgccaaggcctcgggcatgatgggcctgactgcggaaatgctcggcaagatgcacggtatcagccgtgaggcgcaggacaagttcggcgcgcgttcgcaccaactggcctggaaggccacccaggaaggcaagttcaaggacgagatcatcccgatggaagggtatgacgagaacggtttcctgaaagtcttcgacttcgacgagaccattcgtccggaaaccaccgtcgagaccctggccgagttgaagccggcgttcaatccgaaaggcggcaccgtgaccgcggggacctcctcgcagatcaccgacggtgcctcctgcatgatcgtgatgtcggcccagcgcgcccaggacctgggcatccagccgatggcggtgatccgctccatggccgtggcgggtgtcgacccggctatcatgggctacggcccggtgccgtcgaccaacaaggcgctcaagcgtgccggcctgaccatcgccgacatcgatttcgtcgaactcaacgaagccttcgccgcccaggccctgcctgtgctgaaggacctcaagctgctcgacaagatggacgagaaggtcaacctccacggcggcgccatcgccctgggtcacccgttcggttgctccggtgcgcgcatttccggcaccctgttgaacgtgatgaagcagaacggcggtacccttggcgtgtccaccatgtgcgtgggcctgggacagggtatcaccaccgtcttcgagcgcatctaa

SEQ ID NO: 4069 - DNA, 381 bp, Pseudomonas aeruginosa
atgagcgaaggaaaggacccggcggacggccgcccctccctgcggcgcttcggcgccgccttcctcggcctgttgcacggtcacgtcgagctgttcggcatcgagctgcaggaacagaaggccaacaccctgcgcctgctgctgttcgccgggctggccctggtattcgccctgctcctgctggtcggcctgtcgctgctggtgctgatcgtattctgggacaccaaccggctcgcagcggcgctcgggttgtgcctgttctacgtgatcggctcgctgttctgcggctggcgcctgtaccagtcgatcaacgacgaaagctcgccgttcagcgccaccctggaagaactggccaacgaccgcgagcgactgctgccatga

SEQ ID NO: 4070 - DNA, 2178 bp, Pseudomonas aeruginosa
atggctgatgtttacgaattgtttctgacctgcccgaaaggcctggaaagcctgctcctcgaagaggcgcaggggctcggcctggacgaggcgcgcgcccaggtgtcggcggtgcgcgggcagggcagcctggaggtggcctatcgcctctgcctgtggtcgcgcctggccaaccgggtcttgctggtgttggcgcgattcccggtggagaacgccgagtccatgtacatggcggtccacgcggtgaactgggaagaccacctggacgccggcggcacgctggcggtggagttcagcggcaagggctcgggcatcgacaacacccatttcggggcgctgaaggtcaaggatgcgatcgtcgacaacctgcgcgagcgctccggccgacgtccgtcggtggacaaggtcaatccggacgtgcgcgtccacctgcacctcgaccgcggccaggcgaccctttccctggacctctccgggcatagcctgcaccagcgcggctatcgtctgcagcagggcgccgcgccgctgaaggagaacctggcggcggcggtgttgatccgtgccggctggccgaagatcgccgccgagggcggtgccctggccgacccgatgtgtggcgtcggcaccttcctggtcgaggcggcgctgatggctgccgatatcgcgccgaacctcaagcgcgagcgctggggcttcagcagttggctggggcacgtgccggcgctgtggcgcaagctccacgaggaggcccagcagcgcgcggcggccggcctggccaggccgccgttgtggattcgcggctacgaggccgacccgcgcctgatccagccggcgtgcaacaatatcgagcgtgccggagtggccgactgggtgaagatctaccagggcgaactggcgactttcgagccgcgcccggacaagggccagaccggcctggtgatctgcaacccgccctatggcgagcgcctcggcgacgaagccagcctgctgtatctctaccagaacctcggcgagcgcctgcgccagagctgcatcggctggagcgccggggtgttcaccggggcgccggaactgggcaagcgcatgggtatccgcagccataagcaatacgcgttctggaacggcgcgctggcctgcaagctgctgatgatccaggtcgagccgcgccagttcgtcaccggcgagcgtggcgaacgcaacgacgaaggcctggcgcgggcgccgagcgagccggcacggctgagcgagggcgggcagatgttcgccaatcgcctgcagaagaacctccggcaactgggcaaatgggcgcgccgcgacaagatcgagtgctatcgcctgtatgacgccgacatgccggagtatgccctggcggtggatatctacggcgattgggttcacgtccaggagtacgccgcgcccaagtcgatcgatccggcaaaagcccaggcgcgcctgttcgacgccctggcggcgattccgcagaccctgggcgttgcccaggagcgagtggtggtcaagcgccgcgagcgccaggccggcaagaagcagtacgaacggcagagcagcgagggcaagttcctcgaggtgggtgagggcgatgtgcgcctgctggtgaacctgaccgattacctggataccgggctgttcctcgatcaccggccgatgcgcctgcgcatccagaaggaggcggccggtaagcgcttcctcaacctgttctgctataccgccacggccaccgtacatgcggccaggggcggcgcgcgcagcaccaccagcgtcgacctgtcgaagacctacctggactgggcgcgccgcaacctgtcgctcaacggcttttccgacaagcagcgcctggtgcacggcgacgtgatggagtggttgcgggaagacgatggccagtacgaactgatcttcatcgacccgccgaccttctccaactccaagcgcatggaaggcgtgttcgacgtgcagcgcgaccacgtcgaactgctcgacctggccatggcgcggctggcgccgggcggggtgctgtatttctccaacaacttccgcaagttcgaactggacgagagcgtgcaggcccgctatgcggtcgaagagatcactggcgaaaccctcgatccggatttcgcgcgtaatccgaagatccatcgggcctggagaatcaccgttcgctga

SEQ ID NO: 4071 - DNA, 4863 bp, Pseudomonas aeruginosa
atggcgttcttcaccgcggccagcaaagccgatttccagcatcaactgcagacggcactggcgcagcacctcggcgacaaggcgttaccacaagtcacgctgttcgccgaacagttcttcagcctgatctccctcgatgaactgacccagcgtcggctttccgacctggtcggttgcaccctttccgcctggcgcctgctggagcgcttcgaccgcgaccagcccgaagtccgcgtatacaaccccgactacgagaagcacggctggcaatccacccacaccgcggtagaagtgctgcacccggacctgccgttcctggtcgactcggtgcgcatggaactgaaccgtcgcggctacagcatccataccctgcagaccaacgtcctcagcgtgcgccgctcggccaagggcgagctgaaggaaatcctgcccaagggtagccagggcaaggacgtcagccaggaatcgctgatgtacctggagatcgaccgttgcgcccacgccggcgaactgcgggcgctggagaaggccatcctggaagtgctcggtgaagtacgcgtgaccgtcgccgacttcgaaccgatgaaggccaaggcccgcgaactgctgacctggcttggcaaggccaagctgaaggtgccggcggaggaactgaaggaagtacgcagctatctcgaatggctgctggacaaccacttcaccttcctcggctacgaggaattcagcgtcgccgacgaggccgacggcgggcgcatggtctacgacgagaaatccttcctcggcctgacccgtctgctgcgtgccggcctgagcaaggatgacctgcacatcgaggactatgccgtcgcctacctgcgcgaaccggtcctgctgtccttcgccaaggctgcccatccgagccgtgtgcaccgcccggcctacccggactacgtgtcgatccgcgagctggacggcaagggccgggtgatccgcgagtgccgcttcatgggcctgttcacctcctcggtgtacaacgagagcgtcaacgacatccccttcatccgcggcaaggtcgccgaagtgatgcggcgctccggtttcgacaccaaggcccacctcggcaaggaactggcccaggtgctggaagtactgccgcgcgacgacctgttccagaccccggtggacgagctgttcagcaccgccctggcgatcgtccgcatccaggagcgcaacaagatccgcgtgttcctgcgcaaggacccctacggtcgcttctgctactgcctggcctacgtgccgcgcgacgtgtattccaccgagacgcgcctgaagatccagcaggtcctgatggagcgcctgcaggcgagcgactgcgagttctggaccttcttctccgagtcggtgctggcccgcgtgcagttcatcctccgcgtcgacccgaagtcgcgcatcgacatcgacccggcgcgcctggaggaagaagtgatccaggcctgccgttcctggcaggacgactacagcagcctggtggtggaaaacctcggcgaggccaagggcaccaacgtcctggccgacttcccgaaaggcttcccggccggctaccgcgagcgcttcgccccgcacttcgcggtggtcgacctgcagcacctgctcagcctctccgagcagcgcccgctggtgatgagcttctaccagccgctggcgcagggcgagcagcaactgcactgcaagctgtaccacgccgacaccccgctggccctgtccgacgtcctgccgatcctggagaacctcggcctgcgcgtgctcggcgaattcccctaccgcctgcgccaccagaacggccgcgaatactggatccacgacttcgccttcacctacgccgaagggctggacgtggacatccagcagctcaacgagatcctccaggacgccttcgtccacatcgtcagcggcgacgccgagaacgacgccttcaaccgcctggtgctgaccgccaacctgccgtggcgcgacgtcgccctgctgcgtgcctacgcgcgttacctgaagcagatccgcctgggcttcgacctcggctacatcgccagtgcgctgaatgcccacaccgacatcgcccgcgagctggtgcggctgttcaagacccgcttctacctggcgcgcaaactcaccgcggaagacctggaagacaagcaacagaagctggagcaggcgatcctcggtgccctcgacgaagtccaggtgctcaacgaggaccgcatcctgcggcgctacctcgacctgatcaaggcgaccctgcggaccaacttctaccagcccgacggcaacggccagaacaagagctacttcagcttcaagttcaacccgaaggccattccggagctgcccaggccggtgcccaagtacgagatcttcgtctactcgccgcgcgtcgagggcgtgcacctgcgcggcggcaaggtggctcgcggcggcttgcgctggtcggaccgcgaggaagacttccgcaccgaggtgctcggcctggtcaaggcccagcaggtgaagaacgcggtgatcgtgccggtcggcgccaagggcggcttcgtcccgcgccgcctgccgcttggcggtagccgcgacgagatccaggccgaggcgatcgcctgctaccggatcttcatttccggcctgctcgatatcaccgacaacctcaaggaaggcgaagtggtgccgccggccaacgtggtccgccacgacgaggacgatccctacctggtggtcgccgcggacaagggcacggcgaccttctccgacatcgccaacggcatcgccgccgagtacggcttctggctcggcgacgccttcgcctcgggcggctccgccggctacgaccacaagggcatggggattaccgccaagggcgcctgggtcagcgtgcaacggcacttccgcgaacgcggcatcgacgtgcagaaggacaacatcagcgtcatcggcatcggcgacatggccggcgacgtgttcggcaacggcctgctgatgtcggacaagctgcaactggtggccgccttcaaccacatgcatatcttcatcgacccgaacccggacgccgccagcagcttcgtcgagcgccagcgcctgttcaacctgccgcgttcgagctgggccgactacgacgccaagctgatctccgccggcggcgggatcttcctgcgcagcgccaagagcatcgccatcaccccggaaatgaaggcgcgcttcgacatccaggccgacaggctggcgcccaccgagctgatccatgcgctgctcaaggcgccggtcgacctgctctggaacggcgggatcggtacctacgtgaagtcgagcaaggaaacccacgccgatgtcggcgacaaggccaacgatggtctgcgcgtcgacggccgcgagttgcgcgcgaaggtggtgggcgagggcggcaacctgggcatgacccaactggcgcgggtcgagttcggcctgcacggcggtgccaacaacaccgacttcatcgacaacgccggtggcgtggactgctccgaccatgaggtcaacatcaagatcctgctcaacgaagtggtgcaggccggcgacatgaccgagaagcagcgcaacgcgctgctggtgaagatgaccgacgcggtcggcgccctggtgctgggcaacaactacaagcagacccaggcgctgtccctggcgcaacgtcgcgcccgcgagcggatcgccgagtacaagcggctgatgggcgacctcgaggcgcgtggcaagctcgatcgcgccctggagttcctgccttccgacgaggagctggcggaacgcatcagtgccggccaggggctgacccgcgccgagctgtcggtgctgatctcctacagcaagatcgacctcaaggaatcgctgctgaaatcgctggtgcccgacgatgactacctgacccgcgacatggagaccgccttcccggcattgctggcggagaagttcggcgacgccatgcgccgccatcgcctgaagcgcgagatcgtcagcacgcagatcgccaacgacctggtcaaccacatgggcatcaccttcgtgcagcgcctgaaggagtccaccggcatgagcgcggccaacgtcgccggggcctacgtgatcgtccgcgacgtattccacctgccgcattggttccgccagatcgagaatctcgactaccaggtgcccgctgatatccagctgaccctgatggacgaactgatgcgcctcggccgccgcgccacccgctggttcctccgcagccgccgcaacgagctggacgcggcgcgcgacgtggcccacttcggcccgcgcatcgccgccctcggcctgaagctcaacgagctgctcgaagggccgacccgcgagctgtggcaggcgcgctaccagacctacgtcgacgccggcgtgccggaactgctggcacgcatggtggccggtaccagccacttgtacacgctgctgccgatcatcgaggcgtccgacgtgaccggccaggacaccgcggaagtggccaaggcctatttcgccgtgggcagcgcgctggacctgacctggtacctgcaacagatcaccaacctgccggtggagaacaactggcaggcgctggcccgcgaggcgttccgcgacgacctcgactggcagcagcgggcgatcaccgtctcggtgttgcagatgcaggacggaccgaaggaggtcgaggctcgcgtcggcctgtggctggaacagcacctgccgctggtcgagcgctggcgggcgatgctggtcgaactgcgtgccgcgtcgggtaccgactacgccatgtacgccgtggccaaccgcgagctgatggacctggcgcagagcagccagcacggtgtctgcatcccctga

SEQ ID NO: 4072 - DNA, 1425 bp, Pseudomonas aeruginosa
atggccggcaagaccctctacgacaaactctgggacatgcacctggtcaagcagcgcgacgacggttcggcgctgatctacatcgaccgccatatcctgcacgaagtgacctcgccgcaggccttcgagggtcttcgcctggccgggcgcaagccgtggcggatcgacgccaacatcgccaccccggaccacaacgtgccgaccacccgcaccgagcgcaagggcggcatcgccgccatcgccgacgaggtctcgcgcctgcaggtgcagaccctcgacgagaactgcgacgacttcggcatcaccgaattcaagatgaacgacgtgcgccagggcatcgtccatgtggtcggtccggagcagggcgcgaccctcccggggatgaccgtggtctgcggcgactcgcacacttccacccacggcgccttcggcgcgctggcccacggcatcggcacttccgaggtagagcatgtgctggcgacccagtgcctggtggcgaagaagatgaagaacatgctggtcaaggtcgaaggcaggctgccggccggcgtcacggcgaaggatatcgtcctcgcggtgatcggcaggatcggcaccgccggcggcaacggccacgccatcgagttcgccggcagcgccatccgcgacctgtccatcgaagggcggatgaccatctgcaacatgtcgatcgaggcgggcgcccgcgtcggcctggtcgccgtcgaccagaagaccatcgactacgtgaagggccggcccttcgcgccgagcgccgagcaatgggaccaggccgtcgcctgctggcaggggctggtgtcggacgccgatgcccgcttcgataccgtggtcgagctggacgccgcgcagatcaagccgcaggtcagctggggcacgtcgccggaaatggtcctggccgtggaccagaacgtgccggacccggcccgcgagagcgacccgatcaagcgcggttcgatcgagcgcgccttgaagtacatgggcctgcggccgaaccaggcgatcaccgacatccagctggaccgggtattcatcggttcctgcaccaactcgcggatcgaggacctgcgcgctgccgccgaagttgccaggggccgcaaggtcgccgcgaccatcaagcaggcgctggtggtgccgggttccgggttggtcaaggagcaggccgagaaggaaggcctggaccggatcttcatcgaggccggcttcgaatggcgcgagccgggctgttccatgtgcctggcgatgaacccggaccggctggagagcggcgaacactgcgcctcgacctccaaccgcaacttcgagggccgtcagggcgccggtggccgtacccacctggtcagcccggcgatggccgccgccgcggccgtcaacggccgcttcatcgatgtccgcgaattgctcgcctga

SEQ ID NO: 4073 - DNA, 1236 bp, Pseudomonas aeruginosa
atgagtgcggcttttatcaaccgtgtcgcacgagtattagtaggcaccttgggagcacagctcataacgattggtgtcactctgctactggttcgtctgtattctcctgctgaaatgggcgctttcagtgtttggctatcgttcgctacgatttttgcagttgtagttactgggcgctatgagttggctattttttcgactcgagaagagggcgaactccaggcaatcgtcaagctgatacttcagttgacactattgattttcgttgccgtggcgattgctgttgttataggtagacatctgattgagtcgatgccagttgtgatcggtgaatactggttcgcattggcggtggcttcgctggggttggggataaataagctagtcttgtcgttacttacatttcaacaatcttttaatcggttgggagttgctcgtgtaagcctggctgcatgtattgccgttgcacaagtttcagctgcatatttactggagggcgtatcagggctgatctatggccagctgtttggtgtcgtcgtagccacggcgcttgcggccctttgggtaggaaagtcgctgattttaaattgtatcgagacaccgtggcgtatggtacgacaagtagcggtacagtacatcaatttcccgaagttttctctgcctgcggatctggtcaacacggttgccagtcaggtgcctgtgattttattggcggcaaagtttggtggagacagtgcaggctggtttgccctgactctgaagataatgggagctcccatttccttgttggctgcttcggtgctcgatgtgttcaaagaacaagccgctcgtgactaccgagagtttggtaattgccgaggtatcttcctcaagactttcaggttgcttgccgtcctcgcgctacctccttttattatattttggttcattggcgagtgggcctttgggttagtctttggcgaagcgtgggctgagtcggggcgttatgctgtattgatggttccgttgttttatatgcgtttcgtggtgagtccgctcagctatacaatctatattgcccagcggcagagtatggatttgttgtggcagctagccttgttgctcctgacgtttatctgttttaccttgcctgactctgtcgactcggtgttgtggttttactccatagcatatgctgttatgtattttgtctatttctggatgtccttccagtgtgccaagggagatgccaagtga

SEQ ID NO: 4074 - DNA, 1317 bp, Pseudomonas aeruginosa
atgtatatacttgctcgagtcgacaggtctattctgctgaacacagtgttactgtttgctttcttttcagcgacagtgtgggtgaataataattatatctatcatctctatgattatatggggtctgcgaaaaaaactgtcgacttcggcttgtatccgtacttgatggtcttggcgctcatctgtgccctgttgtgtggaggggcaattcgcaggccaggtgatctgttagttacattattagttgtaatacttgttcctcattcattggttcttaatggagctaatcaatattctccggatgcgcaaccatgggctggcgtgcctctggcaattgcttttggtattttgatcatcggcattgtcaataagataagattccatccgctaggtgcattgcagcgagaaaaccaaggaaggcgaatgttagtgctactgtcagtactcaacatagtagtgcttgtgtttattttctttaaaagcgctggttatttttcctttgactttgctgggcagtatgctcgccgtgcacttgctcgtgaggtttttgctgcgggttctgcaaacggctacttgtcgtcaatcggtacccaggcattctttcctgtgttgtttgcctggggggtctacagacgacaatggttctacttggtcctgggtattgtcaatgcactagtgctgtggggagcgtttggacagaagtatccttttgtcgtgttgtttctaatttatggcctgatggtttattttcgacgattcggtcaggtcagagtgtcttgggttgtctgcgcactattgatgcttttgcttttaggggcgttggaacatgaggtgtttggctattcattcttgaatgattattttctacgtcgtgcttttattgtgccttccaccctgttgggggcagttgatcagtttgtgtctcagttcggatccaattattacagggataccctgttgggcgcgctcttgggtcagggtaggactgagccgttgagctttcgtctggggacggaaattttcaataatcccgatatgaatgcgaatgtaaacttcttcgcgatagcctatatgcagttgggttatgtgggggttatggctgagtcgatgttggtgggcggtagtgtcgttctcatgaatttcttattttcgaggtatggtgcattcatggccattccggttgctttgttatttactacaaagattcttgagcagtccctgctaactgtaatgcttggctctggtgttttcttgatgctgcttttccttgcgctaatttcttttccactcaagatgtctttaggaaaaactctatga

SEQ ID NO: 4075 - DNA, 1047 bp, Pseudomonas aeruginosa
atgactgacgaaatacaaaagcacggcggtgtagctggcgatatcgatctggttgagctggttcgaggattatgggaggagaagtggatagttcttatattttctttgctaggtattttgtttgcagctatctacgcttttctcagtactcctgtctatgaggcccgcatagcgattttgcctccgtcgttgagtgatgtggcaggtttcaatcagggacgtaccagggaaaccgggcttggtcccttcaaggtccaggatgtgtactctgtttttgttcgcaacctgcaggctgatggaactcgtcatcgttttttcaatgagacctatttgccttctttggatgaagagcttcgttcggtttcgcgtgatgcgctctataaaaggttcactgatcagataagtattagtttgccggggaaagactttccgggtcgttatcttgttgcgattgaacaggaggatccggagcgtgcggcgagttgggttcgtcggtatatagctgatgcggccgagatttctattcaggaaatgttgaacaatgcgcatcgcgagattgaggtcaaggctcgagatattgagcagcgcatacagaacttgcgagagaatgccaaggcaagacgtgaagatcgtattgttcagctcaaggaggcgttgaaggtcgcaggtgcgctgaaattggaggagcctccactgatcagtgggcaatcctctgaggagctctcggctatcatgaatggaagtctgatgtatatgcgtggcagtaaggcgattatggccgagattcagacattggaggcgcgtagctctgatgatccttttattccggcgttgcgtactcttcaggagcagcagttattgctgagtagcttgcgtgttaattcggagcgggtttctgtttttcgacaagacggtccgatagaaacgccggactcaccagttcgtccaaggagagcgatgattttgatttttgggttgataattggtggtgtgcttggtggttttctggcgttgtgccggatttttttgaagaagtatgctcgttag

SEQ ID NO: 4076 - DNA, 1323 bp, Pseudomonas aeruginosa
atgattcgcagacactcgtgcaaaggggtggggagcagtgttgcctggagtttgctgggcctggcgatttccgcgcagagcctggccgggaccgtgaccaccgacggtgccgacatcgtgatcaagaccaagggcggcctcgaagtcgccaccaccgacaaggaattcagcttcaagctcggcggccgcctgcaggccgactacggccgcttcgacggctactacacgaacaacggcaataccgccgatgccgcctacttccgccgcgcctacctggagttcggcggcaccgcctaccgggactggaagtaccagatcaactacgacctgtcgcgcaacgtcggcaacgacagcgccggctactttgacgaagcttcggtcacctataccggcttcaacccggtcaacctgaagttcggccgcttctacaccgacttcggcctggaaaaggccaccagctccaaatgggtcaccgcgctggagcgcaacctcacctacgacatcgccgactgggtcaacgacaacgtcggtaccggtatccaagccagctcggtggtgggcggcatggctttcctctctggcagcgtgttcagcgagaacaacaacgataccgacggcgacagcgtcaagcgctacaacctgcgcggcgtgttcgcgccgctgcacgagccgggcaacgtggtgcacctgggcctgcaatacgcctatcgcgacctggaggacagcgcggtggatacccggatccgcccgcgcatgggcatgcgcggcgtctccaccaatggcggcaacgatgccggcagcaatggcaaccgcggtctgttcggcggcagttcggcagtcgaggggctgtggaaggacgactcggtctggggcctggaaggcgcctgggcgctgggtgccttctcggcccaggccgagtacctgcggcgcacggtcaaggccgagcgcgaccgcgaggatctcaaggcctccggctattacgcgcaactggcctacaccctcaccggcgagccgcgcctctacaagctggacggcgccaagttcgacaccatcaagccggagaacaaggaaatcggcgcctgggagctgttctaccgctacgactcgatcaaggtcgaggatgacaacatcgtcgtcgacagcgccacccgcgaggtcggcgacgccaagggcaagacccataccctgggcgtcaactggtacgccaacgaggcggtgaaggtttccgccaactacgtcaaggcgaagaccgacaagatcagcaatgccaacggcgacgatagcggcgatggcctggtgatgcgcctgcagtacgtgttctga

SEQ ID NO: 4077 - DNA, 1317 bp, Pseudomonas aeruginosa
atgatccgtaagcactcgctcggcttcgttgccagcgctctggctctggccgtatctgcccaggcgttcgccggcaccgtgaccaccgacggcgccgatatcgtgatcaagaccaagggtggcctcgaagtcgccaccaccgacaaggaattcagcttcaagctgggcggtcgcctgcaggccgactacagccgtttcgacggtttctataccaagaatggcaacaccgccgacgccgcctacttccgccgcgccttcatcgaactcggcggcaccgcgtacaaggactggaaataccagatcaacttcgacctgtcgcacaacaccggcagctccgacaacggctatttcgacgaagcttcggtcacctacaccggcttcaacccggtcaacctgaagttcggtcgcttcgaccccgacttcggcctggaaaaggccaccagctccaagtgggtgaccgctcccgagcgtaacgccgcctacgaactggccgactggatcaacacccaccaggacggcatgggcgcccaggtcaactcgaccctcgccgacatggcctacctgtccgccggcgtatccgccaaggacgccgacgacagcgacggcgacagcgtcaagcagttcaacttccgcggcgtgttcgcgccgatgcacgaagccggcaatgttctgcatgtcggcgtgaactatgcctaccgcgacctcgacgacaccgccttcgactcgcgcatccgtccgcgcctgggcatgcgcggcatcgccaccagcggcggcaacgacgccggtgacaacggcaaccgcgcgaccttcggcggtgtctccaactcgccggccggttcctacaaggacgatagcgtctggggcctggaaggcgcctgggcaatgggcccgttctcggcccaggccgaatacctggcacgcaagctgaaggccgatgacaacgcctacaaggacatcaaggccaagggttactacgcgcaactggcctacaccctgaccggcgagtcccgccagtacaagctggaaggtgccaagttcgactccgtcaagccggaaaacaaggaaatcggcgcctgggaagtgttctaccgctacgacaacatcaaggtggaagacgacaacgtggtcgccgataccgccactcgcgaagtcggcgacaccaaggccaaggcccacaacctgggcgtgaactggtacgtcaacgatgcggtgaagatcagcgcggcctacgtcaaggcgaagaccgacaagatcaccaacaacaatggcgacgatgacggcgacggcttcgtgacccgtttgcagtacgtgttctaa

SEQ ID NO: 4078 - DNA, 1164 bp, Pseudomonas aeruginosa
atgtcgtctgaacgcgttctcagcaatgcccgggtagtcagcgccgagcgggtcttcgtcggcagcgtgctgctgcgcgacggcctgatcgccgcggtcgacgaaggccgcagtcacctggccggggccgaggacctggggggcgactacctcctgcccggcctggtcgagctgcacaccgacaacctggagaagcacatgaccccgcgtcccggcgtcgactggccgtcggcctcggcggtgctggcgcacgacgcgcagatcgtctccgcggggatcaccacggtgttcgacgcactgtccatcggcgacgtcaaccccaagggcaagcgcatgcagcagttgccgaagatgctcgaggccatcggcgaggccgccgccagcggcgacgcgcgcgccgaccatcgcctgcacctgcgttgtgaggtcagccatccgcagacgctggaggtgttccgcgaactggtcgagcatccgctggtgcaactggtctcggtgatggaccacgcccccggccagcgccagttcgccaggctggagaagtaccgcgagtactaccagggcaagtaccacctgagcgatgccgagatggacgccttcatcgtcgagcaggtagccaactccgagcgctacagcgacgccgcccgtgcggccatcgtcgatgtctgccagggacgcggcctgtcggtggccagccatgacgacgcgaccctcgcgcatgtccgcgagtcggccggctacggcatggccatcgccgagttcccgaccaccgtggaggccgccagggccagccacgagcacggcctgcaggtgctgatgggcgcgcccaacgtggtccgcggcggttcccactcgggcaacgtggcggcggcgcaactggcgggaatcggcgtgctggatatcctttccagcgactactatccggccagcctgctgcatgcggccttgctgctcgccggcgagcacagcgagtatgatgcgatccgttacgacctgccgcgcgcggtggcgatggtcagccgtaccccggcgctggccgccgggctgaccgatcgtggcgaaatccgcgtcggcctgcgcgccgatctgctgcaggcgcgggcgctcggcaacaaccagccggtggtgcgtcaagtctggcgcggcgggcagagagtgttctga

SEQ ID NO: 4079 - DNA, 888 bp, Pseudomonas aeruginosa
atgcggcgcgaaagtctgttggtatcggtttgcaagggcctgcgggtacatgtcgagcgcgttgggcaggatcccgggcgcagcacggtgatgctggtcaacggcgcgatggcgaccaccgcctcgttcgcccggacctgcaagtgcctggccgaacatttcaacgtggtgctgttcgacctgcccttcgccgggcagtcgcgtcagcacaacccgcagcgcgggttgatcaccaaggacgacgaggtggaaatcctcctggcgctgatcgagcgcttcgaggtcaatcacctggtctccgcgtcctggggcggtatctccacgctgctggcgctgtcgcgcaatccgcgcggcatccgcagctcggtggtgatggcattcgcccctggactgaaccaggcgatgctcgactacgtcgggcgggcgcaggcgctgatcgagctggacgacaagtcggcgatcggccatctgctcaacgagaccgtcggcaaatacctgccgcagcgcctgaaagccagcaaccatcagcacatggcttcgctggccaccggcgaatacgagcaggcgcgctttcacatcgaccaggtgctggcgctcaacgatcggggctacttggcttgcctggagcggatccagagccacgtgcatttcatcaacggcagctgggacgaatacaccaccgccgaggacgcccgccagttccgcgactacctgccgcactgcagtttctcgcgggtggagggcaccgggcatttcctcgacctggagtccaagctggcagcggtacgcgtgcaccgcgccctgctcgagcacctgctgaagcaaccggagccgcagcgggcggaacgcgcggcgggattccacgagatggccatcggctacgcctga

SEQ ID NO: 4080 - DNA, 1227 bp, Pseudomonas aeruginosa
atgaccgccaccagcgacctgatcgagtcactgatttcctatagctgggacgactggcaggtgacccgccaggaagcccgccgggtgatcgccgcgatccgcaacgacaacgtgcccgatgcgaccatcgccgcactcgacaagagcggctcgctgatcaagctgttccagcgggtgggcccgccggaactggcgcgctcgctgatcgccagcatcgccgggcgcaccaccatgcagcgctaccaggcacgcaatgccttgatccgcagcctgatcaataatcccctgggcacccagaccgacaactggatctacttccccaccatcaccttcttcgacatctgcgccgacctcgccgacgccgctggccgcctgggcttcgccgcggccggcgccaccggggtggccagccaggcgatccagggtccgttcagcggggtcggcgccaccggcgtcaatccgaccgacctgccgtccattgccttcggcgaccagctcaagctgctcaacaaggacccggcgaccgtcaccaagtacagcaacccgctcggcgacctgggcgcctacctgagccagctttcgccgcaagacaagctgaaccaggcacagacgctggtcggccagccgatcagcacgctgttccccgacgcctatccgggcaacccgccgtcgcgggccaaggtcatgtccgcggccgcgcgcaagtacgacctgacgccgcaactgatcggcgcgatcatcctcgccgagcagcgtgaccagacccgcgacgaagacgccaaggactatcaggcggcagtcagcatcaagagcgccaacacctccatcggcctcggccaggtggtggtctccaccgcgatcaagtacgagctgttcaccgacctgctcggccagccggtgcgccgcggtctgtcgcgcaaggcggtcgccaccctgctggcttccgacgaattcaacatcttcgccaccgcccgttacatccgctacgtcgccaacctcgcgtcgcaacaggacctgcgcaagttgccgaagacccgcggcgcatttccctccatcgatctccgcgcctacgccggcaatccgcgcaactggccgcgggacaatgtccgcgcgctggcctcggaatacacctcgcggccctgggacgacaacctgtcgccgggctggccgatgttcgtcgacgatgcctacgccaccttcctcgaccctggaatgaggttcccatga

SEQ ID NO: 4081 - DNA, 3162 bp, Pseudomonas aeruginosa
atgacattcccacgcttcttcatcgataggccgatcttcgccatcgttctttcggtgctgatgatgatcggaggcatcgtttcgttcttccagttgccgctgagcgaatacccggcggtgacgccgccgaccgtgcaggtgactaccgcctatcccggcgccaaccccgacgtgatcgcgcagacggtggcgacaccgctggagcaggcgatcaccggggtcgaggggatgctgtacatgtcctcgcagtcggccaccgacgggcgaatgatcctgaccatcaccttcgaccagcacatcgatcccgacatggcccagatccaggtgcagaaccgggtctcgcgggtgctctcgcgcctgcccgacgaggtgcagcggcagggcgtggtcacccagaagacctcgccggacatcctcatggtggtgcacctgctgtcgccggagcaacgctacgacccgctgtacatctcgaactacgcctacctccaggtgcgcgacgaactgctgcgcctgccggggatcagcgatgtggtggtgtggggcgccggcgagtacagcatgcgcctgtggctcgaccccgacctgatcgccgcgcgcgggctgacggcgggcgaagtgatcgccgcggtacgcgaacagaacgtccaggtggcggccggcgccgtcggccaggcgccggactccaccgcggccttccaggtcacggtgaataccctcgggcggctgagcgacgaagagcagttcggcgacatcatcgtccgcaccggcgccgacggccaggtgacgcgcctgcgcgacgtcgcgcggatcgagatgggcggcgatgcctatgcgctgcgcagcctgctggacggcgagccggcggtggccttgcagatcatccagagccccggagccaacgcgctggataccgccgaagcggtgcgtgccaccgtggcgaggctcgaaggcaacttcccggccggcctgagcgcgcgcatcgcctacgacccgacggtgttcgtccgcgcttcgttgcagaccgtggccaccaccctgctggaggcgatcctgctggtcgtggtggtggtggtgctgttcctgcgtagctggcgtgcttcgctgattccgctgatggccgtgccggtctcgctggtcggcaccttcgccgtcatgcacctgatgggtttctcgctgaataccctgtcgttgttcggcctggtgttgtcgatcggcatcgtcgtcgatgacgccatcgtggtggtggaaaacgtcgagcgccacatcgagaacggcgagccgccgctccaggccgcgcggcgtgcgatggacgaggtcaccgggccgatcatggcgatcacctcggtgctggcggcggtgttcatccccacggcctttctcagtggcctgcagggcgagttctatcgtcagttcgccctgaccatcgccatctccaccatcctgtcggcgctcaactcgctgaccctcagcccggccctggcgggcctgctgttgcgtccgcggccggccggaggtgcggtggcggggcgcttccagcgactgctccaggtcctcggccgaccgttgcgaaatgcccccgaggcctacggcaacgcggtgcgcaaggtggtgcgggtgagcggcctggccctggtggtgtatgggggcctgcttggcctgacctgggtcggtttccaggcggtgccgccgggcttcgtgccgatgcaggacaagtactatctggtcggcatcgcccagttgccgaacggagcgtcgctggagcgtaccgatgcggtggtcaggcagatgtcccggatcggcctcgacgagccgggggtggagagcgtcgtggccttcccgggcctgtcggtgaacggtttcgtcaacgtgccgaacgccgcggtcatgttcttcatgctcgatccgttcgaatcgcgcacctccgccgatctcggcgcgctggccatcgccgggcgcctgcaagccaggttcgccagcattcccgacggcttcctcggggtcttcccgccgccgccggtaccggggctgggaaccatcggcggcttcaagatgcaggtcgaggatcgcggcggcgccgggctggaagccctggccaggcagacccaggtgctgatgatgaaggccactgagtccggccagctcgggggcttgatgaccagcttcgatatcaatgccccgcagctcgaggtggtggtcgaccgcaccaaggtgaagagccagggcgttcgcctggccgatgtgttcgaggcattgcaggtctacctcggctcgctgtacatcaacgacttcaaccgcttcggtcgcacctacaaggtcactgcccaggccgatgcgccgcaccgcatgcaggccgaagccatcgggcgcctgcaggtacgcaatgccgccggggcgatgttgccgctgtcctcgttcgtcaccgtgacgcccagctccggtcccgaccgggtgatccactacaacggctatccgtcggcggatatcagcggcggcgcgcttcccggcgtcagttcgggacaggcggtggcgttgatggagcgcctggccggcgaagtgctgcccgagggcatgaccttcgaatggaccgacctgacctaccagcagaagctggccggcaacagcgcgctgttcatcttcccgctgtgcgtgctgctggcctacctgatcctcgccgcgcagtacaacagctggctgttgccgctggcggtcctgctgatcgtgccgatgtgcctgctcagcgcgatcgccggggtgtggctggtgggcggcgacaacaacgtgttcgtccagatcgggctggtggtgctggtaggcctggcggcgaagaacgcgatcctgatcgtcgagttcgcccgcacgctggaggccgagggcgcccgtgcgctggaggcggtggtcgaggcttgccgcctgcgcctgcggccgatcctgatgacctcgctggcgttcatcgccggcgtggtgccgttggtcatggccagcggcgccggagcggaaatgcgccaggcgatgggcgtcgcggtattcgccgggatgctcggggtgacgctgttcggcctgttcctcacgccggtgttctacgtactggtacgggcactggcggcgcgcctggagcgacgcgccggcggcagcctggcgcatctggagggaggccgtccatga

SEQ ID NO: 4082 - DNA, 1137 bp, Pseudomonas aeruginosa
atggctgacggattacgcgtagccctggtcgccggcgaggcctccggcgacatcctcgggtccggactgatgcaggcgctgcgggcgcggcacccggatatcgagttcatcggcgtcggtgggccgcgcatggaggccgaagggctgtccagctatttccccatggagcgcctgtcggtgatgggcctggtagaagtgctgggcaggctgccggagttgttgcgacggcgcaagcgcctgatccgcacgctcatcgaggcccggccggatgtgatgatcggcatcgacgctcccgacttcaccctcggcgtcgaacacaagctgcgccaggctggcctgcgcaccgtgcattacgtcagcccttcggtgtgggcctggcggcagaagcgggtgctgaagattcgcgaagcctgcgacctgatgctggcattgttccccttcgaagcacgtttctacgaagagcatggggtgcccgtgcgtttcgtcggccaccccctggccaacaccattcccctgcaggcggatcgcgctgcggcccgcgcgcggctcggattgccggcggacggacaggtgctggcgctgatgccgggcagtcgcggcggcgaggtcggcaagctcggcgccttgttcctcgacaccgcccagcgcctgctcgtcgaacggccgggcctgcgtttcgtgctgccctgcgccagcgctgcacggcgcgaacagatcgagcagatgctccagggccgcgagcctctgccgctgacgctgctcgacggcgcttcccatgaagcgcttgccgcctgcgatgcggtgctgatcgcctccggtaccgcgaccctcgaggcgctgctctacaagcggcccatggtggtggcttatcgggtcgccgggctgacgtaccggattctcaagcgcctggtgaaaagcccttacatctccctgccgaacctgttggccggacgcctgttggtgccggaactgatccaggacgccgccaccccgcaagcgctagccgcaaccctctcgccgctgctggacgacggctcgcagcaggtggaattcttcgatgccatccatcgggccttgcgccaggatgcttcggcacaggcggcggaagccgtcctgcaactggtggagcgccgctga

SEQ ID NO: 4083 - DNA, 1008 bp, Pseudomonas aeruginosa
ttgaggatcggaatcgtcaatgacatgccgttggccgtcgaggcgctgcgccgcgcgctggccttcgagccgcagcaccagatcgtctgggtcgccagcaacggtgccgaggcggtgacccagtgcgccgccgatacgcccgacgtggtgctgatggacctgctcatgccggtgatggacggcgtcgaggcaactcgtcggatcatggcggaaagtccttgcgcgatcgtgattgttaccgtcgatatcgagcagaatgtgcaccgggttttcgaagcgatgggatatggggcgctcgatgcggtgaacacgccggcgctgggcatcggcaacccgcaaacggcggcggcgccgttgttgcgcaagattcagaacgtcggctggctgatcggccagcgcgataaccgtggcaaggtccaggtggtgccgccgaaggccggcggggcgcgccagcgtctggtggcgatcggcgcttcggctggcggtccggcgtcgctcgcggtgttgctcaagcaactgccggccagtttcaatgccgcagtggtgctggtgcagcatgtcgacgaggtattcgccgccggcatggccgaatggctggccagcgaatcgaagctgccggtgcgcctggcgcgcgatggcgagccgccgataccggggcagatcctgctggcggggaccaacaatcacatccgcctgctgcgcaacggttcgctggtgtacaccgccgaaccgcgttctttcgtctaccggccgtccatcgacgtgtttttcgagagcgtggcgaattattggcgtggcgatgccgtgggcgtgctgctgaccggcatgggccgcgacggcgcccagggcctcaagcagatgcgcgagcgcggtttcctcaccatcgcccaggaccaggccagttgcgcagtctacgggatgccgaaggccgcggcggcgatcgatgcagcggtgcagatcctttccctggaaaagatcgccccgcgcctggcggaggtattcgattag

SEQ ID NO: 4084 - DNA, 1620 bp, Pseudomonas aeruginosa
atgaccgagtacgcaacgaccccttcctacacagtgcctgcgaccacgccccaggaggagcgcaaggtgatcttcgcctcctcgctgggcacggtcttcgagtggtacgacttcttcctctacggcgccctggcggcggtgatcagcaagcagttcttcgccggcgtcaacgacaccacggccttcatcttcgccctgatggccttcgccgccggcttcctggtgcggcccttcggcgcgctggtgttcggccgcctgggcgacatgatcgggcgcaagtacaccttcctggtgaccatcctgttgatggggttgtcgaccttcgccgtcggcctgctgcccacctatgcctcgatcggggtcgccgcgccgatcatcctggtcaccttgcgcatgctccagggcctggccctgggcggcgagtacggcggcgcggcgatctatgtcgccgagcacgccccggcgaacaagcgcggtagctacaccagttggatccagtccaccgcgaccctcggcctgttgctctcgctgctggtgatcctggcctgtcgccagttgaccggcgacgagttcgagacctggggctggcgcctgccattcctgctgtccatcgtcctgctgggcatctccacctggatccgcctgtccatgcgcgagtcgccagcgttcctcaagatgaaggccgagggcaaggtcagcaaggcgccgctgcgcgagtccttcacccagtggggcaacctgaaggtggtgctgaccgcgctgttcagcatcaatgccggccaggcggtgaccttctacacggcgcagttctacgtgctgttcttccttacccaggtgctcaaggtcgatggcggcaccgccaacggtctgctgatcgtcgccctggtgcttggcgcgccgttcttcatcgtcgccggctggctgtccgaccgcatcggccgcaagccggtgctgctggccggcctgttgctcgccacgctgttctacttcccgctgttcaagggcctgacccactacgctaacccggccatcgaccaggccagccggcagtcgccgatcagcgtggtggccgacccggcgacctgcactttccagttcgacccggtaggcaaggcgaccttcgacagcccctgcgacaaggtcaagaccttcctggtcaaggccggcctgccctactcgacggtggcggcgcccgccggcagcgacgtcagggtgcggatcggcgagaccgagatcgccggcttcgacgccgaagcgatggcggccgcggtgaagacggcaggctatccgcagcaggccgacggcagccaggtgaacaagccgatggtgatcgccatcatcttcgctctggtactgatctccaccctctgctacggcccgctggcggcgctgatggtcgaactgttcccgacccgcatccgctattcctcgctgtccctgccgtaccacatcggcaacggctggttcggcggcttcctgcccacggtctcgttcgccctggtggtgtacaccggcgacatcttctacggcctctggtatccggtgctgatcaccggcggtagcctggtctgcgccttgctgttcctccgcgaaacccgccataccgacatccaccggtga

SEQ ID NO: 4085 - DNA, 1707 bp, Pseudomonas aeruginosa
atgcaaagactgtcgcgtatcggccgcaacaccctcgccgtctccgtttccaccttgctcctcagcgcctgcaaccagggcgacgatgcgccgaagcctgcggcagtcgcgccgcaaccggccgcaccgagcatggctgcactgagcatcccgctatgcctcaacggccagtgcgcggtgatcgaccaggacgccaagctgctcgtgccgttcgacaacgactacgacaatatcgtcgccagcgcctaccagggcaccctgatggcggcgcgcgaggagcgctggaacctgatccaggcgaaggacggcaaggtgttgcgcgacgatatcggcgaagccctgtcgctgctcacccccaacctctatggcttcgtccgcgatggcaagtacggcgtggtcgacggccagggcaaggaagtccaggcgccgcgtttcgacgacatctaccccaacagtgccaacgaattcatcatctacgagatcgatggcaagcgcggcatcctcgatgccaagggcaagcagctcaccgaggcgctctacgacaccaccctggtcaacggcagcgtcgccgaacacggtggcttgatcagcgccgagcgtggcgaggagaagtggatcatcaacctcgctaccggcgaacagaaggccgtggcctacgagagcctgggcgacctccacgacggcgtgatgagcgccagcgtcatcggcaagggctcccaactggtggatgccaagggcgacgtggtcggtgacggcaagagctacgattacctgggcaccccggccaacggcctggtcgcgttccgcgagaagtacgacagcccctgtggctacctcgactaccagggcaaggtggcgatcgccgcccagttcgccggttgcggcgccttcggcaagcagggcgggctggcccagcagcgcatggaagatggctcgtcgggcaagtacggcctgatcgatcgcagcggcgcctggaaggtgcagccgcagtacgattcggccgacagcgccggcctcaccgcgcttggctacaccgtcgacgtgcccggcctggctgccgtcggcgtgagcaccggcctgttcagcgccgacttcggcatcttcaacctcgacgaaggcagcgagtgggtgaagccgggttatgcgcagatcggcgcgctgggcaacgacctgttcgtcgtggcgaagaagggcgggccgcagaagaccgtcagcttcatgggttcggaaagccaggtgccggtggtgggcctgatggaccgcagcggcaagatgctgctggagccggacgaactgatcagcatccagtctgcttatgacggtcgtttcctggaaggtctcgacggtatggacaacgctgcccacaccgtgttgctcgatcgccagggacgcacgctggttccagcgctctggcagaagctggaggtgaatccgcagcagggttacatcctgggctacgaagtcagcggcactggcgacgaggcgacggaaaccttgcgcgcactgtacgacctgaacggcaagccgcgcttcaccgtggccaccaccgattgcggcgccgaacagttgctcgacggcaatggcaaggcgatctggccgcaggacccgaccccgtattgccagtcggacgacgagcaggacgacgaaggcgagccggagcaggagccggcgcccgtcgaagagagcgaggaaaccagcgagagctga

SEQ ID NO: 4086 - DNA, 1359 bp, Pseudomonas aeruginosa
gtgcagaaggagggcgtactgcgcgtgatcacccgcaacagcccggccacctacttccaggaccgcaacggcgaaaccggcttcgaatacgaactggccaagcgcttcgccgagcgcctcggcgtcgagctgaagatcgagaccgccgacaacctcgacgacctctatgcccagctttcccgcgagggcggcccggcgctcgccgcggccggcctgaccccgggacgcgaagacgacgccagcgtgcgctactcgcacacctacctcgacgtcaccccgcagatcatctaccgcaacggccagcagcgcccgacccgcccggaagacctggtcggcaagcgcatcatggtgctcaagggcagcagccacgcggagcagctcgccgagctgaagaagcagtatcccgaactgaagtacgaagaatccgatgctgtcgaagtggtcgacctgttgcgcatggtcgacgtcggcgacatcgacctgaccctggtcgactccaacgaactggcgatgaaccaggtgtacttccccaacgtccgcgtcgccttcgacttcggcgaagcccgcgggctggcctgggccttgccggggggcgacgacgacagcctgatgaacgaggtcaacgcgttcctcgaccaggccaagaaggaaggcctgctgcaacgcctgaaggaccgttactacgggcatgtcgacgtactcggctacgtcggcgcctacaccttcgcccagcacctgcagcaacgcctgccgcgctacgaaagccacttcaagcagagcggcaagcagctggataccgactggcgcctgctcgccgccatcggctaccaggaatcgctgtggcagcccggcgccacctccaagaccggcgtgcgcggcctgatgatgctgaccaaccggaccgcccaggcgatgggcgtgtccaaccggctcgacccgaagcagagcatccagggcggcagcaagtatttcgtgcagatccgcagcgaactgcccgagagcatcaaggaaccggaccgcagctggttcgccctggccgcctacaacatcggcggcgcgcacctggaagacgcgcgcaagatggccgagaaggaaggcctcaacccgaacaagtggctggacgtgaagaagatgctgccgcgcctggcgcagaagcagtggtacgccaagacccgctacggctatgcgcgcggcggcgagaccgtgcacttcgtacagaacgtgcggcgctactacgacatcctcacctgggtgacccagccgcagatggaaggcagccagatcgccgagagcgggttgcacctgcccggcgtgaacaagacgcgcccggaagaagacagcggcgacgagaaactctag

SEQ ID NO: 4087 - DNA, 897 bp, Pseudomonas aeruginosa
atgagcgacctccctcccctcaccgccctgcgcagcttcgaagcggtcgcccggctcggcagcatcagccaggccgccagcgagctgcacgtcacccactcagcgatcagccagcagatcaagctgctggaaaacctcctcggcctggccctgttcgtccgcgaggggcgcggcctgcgcctgagcgagaacggccggttctacgccctgcaggtacgcgcctcgctgggcgagatcgccgacgccacgcgggtggtgcgggcgcgtccacgggagggtgagctggtggtcacggtgatgccgtccttcggcctgaactggctgctgccgcgcctgccgcgctttcgcaagcgccatccgcactgtcgcgtgcggctggtggccagtcttgacgtgcagaacctgcgccagggcctggccgacctcggcgtacgcatcggcaagggcgactgggaaggggtcggtcgggaacgcctgttcgacgacgagttgctgatggtcgccgcgcccgacttcaacggcggccgcctgccgcgcacgccgagcgagatcgtcgcctgccctacactgcgctccaccgaatcctgggcgctctggtgccagcgcgccggcgtggcggaaccgcagcacggactgctgatcaatgactcgaacctgctgctggaagccgtgcgcctgggccagggcatcgccctggagcgtcgcagcctggtcgccggcgccctcgccgagggccgcctggtgcaactgggcgacatccgcgtgccctacccctatccctactggctggtctggccgcagcgcgagccgccgagcgaccgccaccaggccttcgccgactggctgcgcgaggaggcccggcgctaccaggccgagcaaccgccgctcagcgaatga

SEQ ID NO: 4088 - DNA, 2295 bp, Pseudomonas aeruginosa
atgacaaataatagtgcgccaccacttgtcgtgaccagaggaaatgataatggttacgagcctgggtcgatggttattacgcatgtacaggctagtgggctagacataatccagtacattccaggtcgctcaagctacggtactccaccatttgtcccgccaggaccaagcccgtatgttggccctggaatgcaagagtacaggaggctaagagatactcttgataagtccaattcagaactcaagaaaaacctgaagaataaaaccttgaaggaggtagatgaactcaagagtgaagcggggttgccagttaaagcggtcagtgccaatgacatccgcgatgaaaagagtatcgttgatgcactcatggatgccaaagcaaaatcgctaaaggccattgaggatcgcccggccaatctttatacggcttcagactttcctcagaagtcagaggcgatgtaccagaatcagttgctagccagtcgaaagttctatggagagttccttgatcgacatatgagtgagctggccaaagcgtacagcgctgatatctataaggcgcaaatcgctatcttgaaacaaacgtctcaagaactggagagtaaagcccggtcaatggaggcgcaagcccagcaggtcactcaacagctcggtgccgacttcaacgcgatcaccactccgaccgccaccaaggtccagcaacgtgtgaaagcagtggatgctagtctgtctcaggtttccacccaggtcagtggtgcagtcgcctcggcaacccaggcggtgcaggtcaagacagcgcaagcccagcaacaagccaacagccagatttcgtccagccagaacctgatcagcgcggcatttcggaatcagattgccttggcagcacaggccagtggagaagcccaggtcacggctttcaacacccaagtcaagcagatcgtcaacgaagccacggcgttttcgacagcacgaaaacaagcgctggctcagtttgctgccaatgcggccgccgaggtcgaaaccgaggtcaacaggctaaccgcccaggtcaaggcaagccccaccaaggcggcttcgcaagctgcacaagcaacccttcgacaattcactgaaagcacctatgccaaggtgaacacctatgcccagcagaccgaagcagagctgcaggccaaagccaaggaggtttcggcagcggtagccgaggcacagcgtgcggcgaccaacgatttgcaaaaaacagccgatgtagtaccaggtcagatcatccaggctgcgaacaccttggcgatgccggctacctctacgccgctggtttcggtggccgggtttggtagtgcggcagtggagacggctcgcctggcggcttccctaacgaatgctgtcaatcgcctggttcagattgctggtagtggacccggcgcatacgttgccaccttcgcggtgctgtcgctgtattccgaccaggctggtaaagacagtgacaaggttcctgccggcgttcgcaatgcattggcactggaggcgtccgctctggggcttcctggcacggctgatttgcaaagcgtcgccaaggcaggtggcacggttgatatgccggtacgactcacgagtgctgcacaagagagcccgagtggtaaatcgcagattgccgcgatgttgaccaacggtgcaactgtccccaagggcgtgcctgttcgcgccgcgaccctcaatgctgcgacgggccggtatgaggtgacggttcccgcaaagtccaccgtgccgaatacaccaccgctgatcttgacctggacccctgccacccctccaggaagccagaacccctcaagcaccactccggtcgtaccgcagccggttccggtgtatgagggagcaacgatcaccccagtacaggccgagccggagtcctatccgggagtgccgttagatctggacgatctgatcgtgatcttcccggtgggctcgggggttaagccaatctatataatgttcaatcataaccctcatgatgttgttattgatgataagatcagagagcaaattccaattagagggtggactgaggttgaagttagagatgttatcggaaaaggtgcaacaggtagttcttcagataagcgtcggcctaataagacgatagatgggctggggcggaatgactctgcaacagtatatggaagtcctcctaatggatatatagttgtgaacgataggacaggtgaaattattcaaattgcagatcggaacgattccgcatgggcggttgacgggcgaatcatctggagaaataagtaa

SEQ ID NO: 4089 - DNA, 1407 bp, Pseudomonas aeruginosa
atgggcatgatcgccaatacccaactgaaagccgcacggggaccgctgctgctcgactggcgccccgaggaccccgagttctgggcgcgcaacggcaagcgcatcgccagccgcaacctgtggatctcgatccccgcgctgctgctcgccttcgccgtgtggatgatctggagcacggtgactgtgcgcctgaacagcgccggcttcgccttcagcaacgaccagctgttcctgctcgcggcgctgccgtcgatctccggcgccaccctgcgggtgttctattcgttcatggtgccgatcttcggcggtcgtcgctggaccgccctgagcaccgcctcgatgctgatcccgtgcatctggctgggcttcgccgtgcaggacccgagtaccccgtactgggtgttcgccctgatcgcgctgctctgcggcttcggcggcggcaacttcgcctcgagcatgtccaatatcagcttcttctatccgaagagccagcagggcaccgccctcggcctgaatgccgggctcggcaacctcggcgtctcggtgatgcagttcgccgtgccgctggcggtggccggcggcctgttcggcgccttcggcggcgagccgcagcagctcggcgacggcggtcgcctgtggctgcagaacgccggctggatctgggtgccgttcatcgccgtggtatcggtcgcggcctggttcgggatgaacgacatcgccgacgccaaggcctcgttccgcgaccaggcggtgatcttcaagcgcaagcacaactggctgatgtgctggctgtacgtggccaccttcggctcgttcatcggcttctcggccggcttcgcgatgctcagcaagacccagttccccgacgtcaacccgctgcaatacgccttcctcggtccgctggtgggcgccctcagccggcctctgggcggctggctggcggacaagttcggcggcgcgcggatcaccctgtggaactacgcgctgatgatcggcggggtgttcgcggtgatcgccttcctgccgggcgacggcggccagggcaacttcttcggcttccttggcgccttcatcctgctgttcttcttcgccggcatcggcaacggctccaccttccgcatgatcccggtgatcttccgcaacgagtgggcccggcgggtgcgcgacggccaggccgacgaagccggcgcggcgcgcaacgcgagcatggagtcggccgcggtgatcggcttctccgccgccatcggcgccttcggcgggttcttcatcccgaaggcgttcggcacctcgctgcacatgaccggcagcgccgagggcgccctctacgtgttcatcgcctactacctgagctgcatcgtcgccacctggtggtggtacgcgcgcaagggtgcggagagtccctgttga

SEQ ID NO: 4090 - DNA, 1296 bp, Pseudomonas aeruginosa
atggcttccctacgtcagaaacagtactccgtcctcggcatgagtaccttgtccttcgcggtgaatttcgccgtgtggacgatgttttcgatcatcggcatccgcatcaaggacgagctcggcctgagcgaatcccagttcggcttgatggtcgccctgccgatcctcaccggctccctggtgcgcctgccgctgggcctgatcaccgaccgcttcggcggccgcatcgtgttcttcatccacatgctgctggtggccatcccgatctacggcctggccttcgccagccagtactggcactacctggtgctcggcctgttcgtcggcctggccggcggctccttcgcggtcggcatcgcctacacctcggcctggttcgagaaggagcgccagggcaccgcgatgggcatcttcggcgccggcaacgccggcgcggcgatcaccaacctggtggcgccgatgatcgtggtcgccttcggctggcgcatggtgccgcaggtctactcggtggccatgctggtcaccgccgtgctgttctggctgttcacctggaccgatccggcgcaccttaagggtgccgccgaggccagccagcggccgaacctggccaagcaactggcgccgctcgccgagctgcgcgtctggcgcttcggcctgtactacttcttcgtcttcggcggcttcgtcgccctggccctgtggctgccgaagtactacatcgccgaatacggcctggacctgaagaccgcatccttcatcaccatgctgttcaccttgccgtccggcctgatccgcgccctcggcggctggttcagcgaccactacggcgcgcgctcggtgaactggggcgtgttctgggtctgcctggtgtgcctgttcttcctctcctacccgcagaccaccatgaccatccacggcatccagggcgacctcagcctgggcatcggcctgaacgtctggctgttcaccttcctggtgttcgtcgtcggcattgcccagggcttcggcaaggccagcgtgtaccggatcatccacgactactacccgagcaacatgggcaccgtcggcggcatggtcggggtgatcggcggcctcggcggcttctgcctgccgatcctgttcggctacgccgccgaccacatcggcgtgcgctcctcctgcttcatgttgctgttcggcctgaccgtggtctgcatggtctggatgcactacgcgatcaagcagcaacgccgcatcgacggccaggccgcctcggccgacgtcgaccttcctcccacccttcccacccactcctga

SEQ ID NO: 4091 - DNA, 780 bp, Pseudomonas aeruginosa
atgaaaaaactgctcctgctgactgccctggcctccgtcatcagcgtttccgccagcgccgcggaaaagctcatcgtcgccgccacgccgatcccccatgcggaaatcctcgaactcatcaagccgaccctggcgaaggaaggcgtcgacctgcagatcaaggtgttcaccgactacgtgcagcccaacgtgcaggtcgccgagaagcgcctggacgccaactacttccagaccctgccgtacctggagaacttcaacaaaggcaagggcaccaacctggtcaccgtggtcggcgtacacgtcgagcccttcggtggttattcgaggaaatacaagtcgctggccgagttgcccgacggcgccaccgtcgccattcccaacgaaggcagcaacagcgggcgcgccctgctgctgttgcagaaggccggcctgctcaagttgaaggatccgaacaacgccctggccacgcccaaggacatcgccgagaacccgaagaacctgaaattcaaggaactcgaatcggccctgctgccgcgcgtgctggaccaggtcgacctggacctgatcaacaccaactacgcgctggaggccaagctcaacccggccaaggacgcgctggtcctggaagaccgcgactcgccctatgtgaactacctggtggcgcgtccggacaacaaggacagcgacgccctgaagaagctttccgccgcgctgaccagcccggaagtgaaagccttcatcgagaagaaatatgccggcgcggtggtcccggccttctga

SEQ ID NO: 4092 - DNA, 1536 bp, Pseudomonas aeruginosa
atgcgttggatttctcgtcccggctggcccggacacctgctggcactcgccgcaggcgcgctcacacccctggccctggcgcccttcgactactggccgctggcgatcctctcgatcgccctgctctatctcggcttgcgcggccttcccggcaagtccgccctgtggcgcggctggtggtacggtttcggcgcgttcggcgccggcaccagctggatctacgtcagtatccatgactacggcgccgcctcggtgccgctggcaagcctcctcatgctcggcttcaccgccggcgtcgccttcttcttcgccctgccggcctggctgtgggcgcgctgcctgcgccgcgacaacgcgccgctgggcgacgccctggcgttcgccgccctgtggctggcactggagctgttccgcagttggttccttaccggtttcccctggctctacgccggctatagccagttgcagggaccgctggccgggctggtaccggtgggcggcgtatggctgtcctccttcgtcatcgccctcagcgcggccctgctggtgaacctgccgcgcctcttcccgcacggtgccagcctgcttctggggctggtcctgctgctcggcccgtgggcggccggcctctatctcaagggccacgcctggacccattcggccggcgaaccgctgagggtagtggcgatccagggcaacatcgcccaggagctgaaatgggacccgaatcaggtccgcgcgcaactcgacctctaccgcgacctgagcctgccgcagcaggacgtcgacctgatcgtctggccggaaaccgcggtgccgattctccaggacatggccagcggctacctcggcgccatgggccaggtcgccgacgagaagaacgccgcgctgatcaccggggtcccggtgcgtgaacgtctcgccgacggcaagagtcgctacttcaacggcatcaccgtggtcggcgaaggcgcgggcacctacctcaagcagaagctggtgccgttcggcgagtacgtgccgctgcaggacctgctgcgcggcctgatcgccttcttcgacctgccgatgtccgacttcgctcgcggtccggccgaccagccgctgctcaaggccaagggctaccagatcgccccgtacatctgctacgaagtggtctacccggagttcgccgccgcgctcgcggcgcagagccaggtgttgctgacagtgagcaacgacacctggttcggcacttccataggccctttgcagcacctgcagatggcacagatgcgcgccctggaaagcggtcgctggatgatccgcgcgaccaacaacggcgtcaccggcctgatcgatccctatggccggatcgtccggcagatcccgcagttccagcagggcatcctgcgcggcgaggtgattcccatgcagggcctgacgccctatctgcaataccgcgtctggccgctggccgggttggccggcgtgctgctgctatgggctctgctcggccgccagttgcgtccgcaggagcgacgcctgttcggctga

SEQ ID NO: 4093 - DNA, 1395 bp, Pseudomonas aeruginosa
atggcacgtttcacccatagcgtcggcggcgaaacctaccgcttcgacagcctcaaggacgtgatggccaaggccagccccgcgcgctccggcgatttcctcgccggcgtcgcggcgagcaacgacggcgagcgggtcgccgcgcagatggccctggccgacatcccgctcaaacacttcctcgacgaggcgctgattccctacgaggacgacgaggtcacccgcctgatcatcgacacccaccagcgcgacgccttcgccccggtgtcccatctcaccgtcggcggcttccgcgactggctgctcggcgacgccgccgacgaggccagcctgcgcgccctggctccgggcctgacgccggaaatggcagcggcggtatcgaagatcatgcgtgtccaggatctggtcctggtggcgcagaagatccgcgtggtcacccgcttccgcaacaccctcggccttcgcggccggctctccacccgcctgcaaccgaaccacccgaccgacgacccggccggaatcgccgcgagcatcctcgacggcctgctgttcggcaatggcgacgcgatgctcgggatcaatcctgccaccgacagcatggcctcgatctgcgccctgctggagatgctcgacgcgatcatccagcgctacgagattcctacccaggcctgcgtgctgacccacgtcaccagctccatcgaggcgatcaaccgcggcgtgccgctggacctggtgttccagtcgatcgccggcaccgaggcggccaatgccagcttcggcatcagcctgaagatcctccaggaaggctacgaggccgggctcagccagaagcgcggcaccctaggcaacaacctgatgtacttcgagaccggccagggcagcgcgctctcggccaacgcccaccacggcgtcgaccagcagacctgcgagacccgcgcctatgcggtggctcgtcacttcaagccgttcctggtgaacaccgtggtcggcttcatcggtcccgagtacctgtacaacggcaagcagatcatccgcgccggcctggaagaccacttctgcggcaagctgctcggcgtgccgatgggttgcgacatctgctacaccaaccatgccgaggccgaccaggacgacatggacatgctcctgaccctgctgggcgtcgccgggatcaacttcatcatgggcattcccggctccgacgacgtgatgctcaactaccagaccacctccttccacgacgccctctatgcgcgccagacgctgggcctgaagccggcgccggaattcgaggactggttgcagcggatgggaatcttcacccaggccgacgggcgcatccgcttcggtgacgagttaccgccggcgttccgccaggccctggcgcaactggcctga

SEQ ID NO: 4094 - DNA, 894 bp, Pseudomonas aeruginosa
atgggttcgcgcacctggcactggcccggcgtcctgctcggcctgctcctcgccacggccggcgcgcaggccgacaccctgcgcgtggcgaccctcgactgggcgccctacgtcggccccgacctgccgggcaagggcctcgccagccgcatcctcgacgaagccctggccctcgacgggcaccgcgccgaactggtgttcctgccctggcaacgtgccctgaaagaagccgccgaggggcgcttcgacgctctcatgccggcctacctgtcgcccgagcggcgcgaactgttccacgccaccatccccctgctcgactcgcaactgggcttcttccgccagcgcgagcgcctgctgccggtcaatcccgcgcatctggaaagcctgcgtccgtaccgcatcggcgtggtccgcggctacgtcaaccgggaggatttcgacgccgaccgcagcctgaccaaggacgcggtgaccaacgactggcagaacctcgagaagctcctgcgcgggcgtatcgacctggccgtggtcgatcgctacaccggctaccacctgctggcgcgcaacgtgccggcgctgaaggatcgcctggtgttcatcgaaccgccgctggaggtcaagccgctctatgtactggtgccgaaaagacacgcccgcggcgccgcccttgccgccagcctcgaccgcaacctgcgcctgatgcgtcgcagcggccggctggaacaactgatcgccgaagcacacctcgaacgcagcgggcagacccgcacgctggccgtcgatccgttaaccggccaggccgaccagcagcgcagccccggccaggagcaggaccagggccagcacgccccgttgcaaccggcgtggcgcgaagacccgctggggatgcgctag

SEQ ID NO: 4095 - DNA, 927 bp, Pseudomonas aeruginosa
atgatcgacatagacagactgagcaaacgcttttccggccggacggtggtaaacgacttgagcttccgcatcgaccggggagagatcgtcggtctcctcggccccaacggagcgggcaagtcgaccaccctgaagatgctttccggcttcctcgcgccgagcgccggcagcgtacgcatcttcggcttcgacatgcaggacaaggcgcgccaggcacagaagctgatcggctacctgccggagaacgctcccagctacggagaaatgacggtcgagggctttctcgccttcgtcgcgtccatccgcgactacagcggacgggaaaaacgtcggcgcatcgacagcgccatggactgcatggagctgcgggatgagcgcaggagcatcatcgaaaccctgtccaagggcttcaagcgccgcgtcgcgctggcccaggcgatcctccacgatcccgagctgctcctgctcgacgagcccaccgacggcctcgacccgaatcagaagcaccaggtccggcaactggtgaaaaacctctcggaaagcaagatcgtggtgatttccacgcacatcctcgaggaagtctcgttcatgtgcagccgcgccctggtgatcaacggcggccgcctgctggccgacaacaccccaggcgaactcaggacccgcagccgctaccaccatgccgtcagcctcagcatcgaagcaccggtagacccgctggccatcgccatgctccccggcgtcgccggtatcgaaggacgccccgaccgggccggcaccctgaccattctggcccgccccggcgcgcagatccttcccgcgctcaaccgcctgatccacggcagcggctggcgggtatccggggtgcgtaccgaacacggccaactggaagaagtgttccgccaactgacccgagaaccccccgcatga

SEQ ID NO: 4096 - DNA, 699 bp, Pseudomonas aeruginosa
atgcgtaagtcctggcttaccgcttccctgctggccctcaccgtcgcctccccgttcgccgctgcggatattcaaggacacaaggccggtgacttcatcatccgtggcggcttcgccaccgtcgatcccgacgacagcagttccgacatcaagctggacggcgccaagcagcgcggtaccaaggcgactgtcgacagcgacacccagctcggcctgaccttcacctacatgttcgccgacaagtggggcgtggaactggtcgccgccactccgttcaaccaccaggtcgacgtcaagggcctcggcccgggcctggacggcaagctggccgacatcaagcaactgccgccgaccctgctgctccagtactaccccatgggcggtaccaacagcgccttccagccctacggcggtctgggcgtgaactacaccaccttcttcgacgaagacctcgccagcaaccgcaaggcgcagggtttcagcagcatgaagctgcaggactcctggggcctggccggcgaactgggcttcgactacatgctcaacgagcacgcgctgttcaacatggccgtctggtacatggacatcgacaccaaggccagcatcaacggcccgagcgccctgggcgtgaacaagaccaaggtcgacgtggacgtcgatccgtgggtctacatgatcggtttcggctacaagttctga

SEQ ID NO: 4097 - DNA, 951 bp, Pseudomonas aeruginosa
gtgcataccctgtcttccgcacacaacagcttcgaagcctggaaccaggcgttgcgccaggtctgcgggcgcttcgaatcgcagcccgcgctgaaccggacgctgttcatcggcgatatctcgcggcaggaccttggcggtctggagttggcgcagatccgcaccaacgcagggcgcatcgcccgccaggccacccatgccgatcatgacgacgaccgccactgcttcctggtcgtccagcgcagcggccatgcgcaactgcgccagggtggggacagcatagagctggcgccaggggaaatggcgctgatggactccgcgggcggctgcgagatcattccccacggactcatcgaacacacctcgttccatctctcccgcgaagaggtatgccggcacctgccacccagccagcgggccttcggcaaactctcgccgaactgcgccagcggtcgcctgctgagcctgctggtgcagcaggtgtgcgccggagaactgcagccgtgggcggtggcggacgagggcggggcgttgcaggaggcgctgatcgccctgctcgggccggcgctacagcacgccggcgaggaattggagggaccgctggccgggctctatggctacagtctgcgccggcacgcggagcgtctgatcgagcaatccctgcaggagccgcgcctgagtccggacatgctcgccggccgcctgcgcatctcggtgcgccagttgtaccggttgttcgaggagcagggcgacagcgtctgccgctacattctccgccagcgcctcagccgcagcgccgccgacctcggcaacccacggctgcgcggcgaatcgatcacctccatcgccttcaagtggggtttcagcgactcggcgcatttcagccgggcgttcaagaagcagttcgaggtttcgcccaaggactatcgggccggcgcgctaccggcctga

SEQ ID NO: 4098 - DNA, 1146 bp, Pseudomonas aeruginosa
atgagcatgaggttatttcccggccgcgtttccctgcgccgccggcctggcgcgcaggctcggcaggcgctcgttctcggcctctgctgcctgaccggcggccaggcctgggccctgaacgaggtcgccctgaactgctcgttcgacaatggcaaaggcttgccctggcgtgtggtgaacgagctgaccagcggcacggcgaaaggcacggtgctgttcgccaggccggtgagcctgttcctgaactacaagccccaggcttcccaggaggcgcatgagctggtcatcggggggaactggtccggggtgggctatccggggccctacggcacggtggcgtccgacgtcaaaggcatcggctatcggatctcggtggatgcccaggacggcgtcaagcgggtgattccggtcgacaaccagccccatgcgctggacaagcgagtcacgagcttttccggaagcacgaccagcgactacctacaggaactggtcctgacggtcgaccccggcgagttgcctgccggcgacctgaaggtaaccagcgtatccggcagcgccaccctgaatctctgggcggtggacaggctgaagggcgaagcgtccatcggcagcgtcctggcggtgcctgcggacaactaccccaccggggtttgccgaaagccctattcgctgatcggcccggcctccatcgctatcggcggcggtcccccgccgccgccgatcccgaagaaatgcaaggtcgaggtgggacgggaaatcaacgtcaaactgggtagcgtcgcgttgaagaacttcccgcgggtcaacgacacctccacggagcgctccttcgatatctctctcagcgagtgtgcggcgctggccaagccggaaatcgctttccgcgacaagtatgtctcggcgcagcaagcggacccgacgatcctcagcttgaagagcggcggcgcggcggggttcggcatcgtcgtgaagaacggcctggaccagcagcggatacgtttcgacggcacgccctacccgatgcggcgtgtcggcgacagcgccgacctcccgctgagtgccgcctacatccgtatcggcgcggagggcgaattgaaggccggggtcgccgacggcgccgccgagttcacgtttaccttcccctga

SEQ ID NO: 4099 - DNA, 756 bp, Pseudomonas aeruginosa
atggatgagcgcctgcgccaacagcagttcagcctcgcccggcacctgcgcgacccgcttggcaatgcgccgccgccggacatcgaagaacgtcgcctgcgggtctaccgcgagctgttctacaacgccatcgaaggcctccttgccagcggcttcccgcgcttgcgcgggctgcttggcgagcagcagtggcatggcctggtgcgcgagttctatcgcgaggagagaagccatacccccctgttcacccgtatcgccggggtcttcgtcgactacctgcggcagcggggcgagtatcggccggcgtggcaagccgagttggcccacttcgaatggagcgaaacgcgcctctacctggccgagcccgacgatccgccgtatcggcgtgaaggcgacctgctcgacggggtgccgctgctgtcgagcctggcgctgccgctgggctatcgctggccggtgcatcggctcgaagaggacgtcgcgctcgccgaagcgcctgcggaaccgaccctgctgttgatgcaccgcgattcctcgcatcgcgtgcataccgcgcgcctgactccgctggcctgccgcctgctggagtcgctggcgagacggcgcctgagcgggcgcgagcacctggcggcgctggcgctcgaggcgcggagtgcgcccggagcgctcgacgcggcggggctggagttgctggcagcgttgcggacccagggtgtcgtgctcggaaccctggaacgcgattgggcgggcggatga

SEQ ID NO: 4100 - DNA, 924 bp, Pseudomonas aeruginosa
atgggcaaagtcgctctggctgccaagatcacccacgtaccctcgctgtacctgtccgagctgcccggcccgcgccacggctgccgccagccggcgatcgacgggcaccgcgagatcggccggcgctgccgcgaactgggggtcgacaccatcgtggtgttcgacacccactggctggtcaacgccggctaccacatcaactgcgcgccgcacttcgaggggctctacaccagcaacgagttgccgcacttcatcgccaacatggagtacggcttccccggcaacccggagctgggccgcatcctcgccgagggctgcaacgcgctcggcgtggagaccctggcccacgacgccaccaccctcggcccggagtacggcaccctggtaccgatgcgctacatgaaccaggaccgccacttcaaggtggtctcggtctccgccctgtgcaccgtgcattacctgaacgacagcgcgcgcctgggctgggccatgcgcaaggcggtggaagagcactacgacggcacggtggcgttcctcgccagcggctcgctgtcccaccgcttcgcccagaacggccaggcgccggacttctccgaccgcatctggagcccgttcctcgaggttctcgatcatgaagtcgtgcagatgtggcaggagggccgctgggccgagttctgcgggatgctccccgagtacgcctccaagggccatggcgaaggcttcatgcacgacaccgcgatgctcctcggcgccctcggctggtcggcctacgacggcaaggcggaggtcgtgacgccctacttcggctcctccggcaccgggcagatcaacgcggtattcccggtcaccgcccaggacggctcggcgatccccgccgcccaggccggcaacccggccggcgccagttgcgccagccgcctctga

SEQ ID NO: 4101 - DNA, 393 bp, Pseudomonas aeruginosa
atgccgcacttcatcgccgaatacaccgacaacatcgaagccgaagccgacctgcccggcctgttcgagaaggtccacgcctgcctcggcgccagcggcgttttcccgctcggcggcatccgcagccgcggcgtgcgcctggacacctggcgcatggccgacggcaggcacgactacgccttcgtccacatgaccctgaaagtcggcgccggtcgcgacctggagactcgccggcaagtcgccgaggcacttttcgaggtgatcaccgcgcacttcgccgagctccaggcgcgacgcctgctggcgctgtccttcgaactcaccgaactggacgcggagctgaactacaagcgcaacaacgtgcatgaattcctgaacaacccggcggactga

SEQ ID NO: 4102 - DNA, 798 bp, Pseudomonas aeruginosa
atgacccatcgcctgcacgcggacgccgtgaccttgcgccgcgacgcgcggaccgtttcgcggaatctctcgctggccatccccgagggttcgttcagtgtgatcgtcgggcccaacgcctgcggcaagtcgaccctgctggcggcattgtcgcgcctgttggcgccggccgagggccgggtggtgctggacggcagggatatccacagcctgccgggacgggaagtggcgcggcgtctcggcctgctgccgcagagcgcgctggcgccggatggcatcacggtggccgagctggtggcgcgcgggcgctatccgcaccagtcgttcctgcgccagtggtcgccggcggatgagcgcgcggtagcggcggcgttacgcgccacgcgggtcgacggcctggccgagcgaccgctcgatgcgctctccggcggccagcggcaacgcgtgtggatcgccatggtgctggcgcaggaaaccccgttgctgctgctcgacgagccaaccacctacctggatatcgtccaccagatcgaattgctcgaactgctcgccgagctgaatcgccaggggcgcaccatcgtcgccgtgctgcacgacctcaaccaggcctgccgctatgcctcgcacctgatcgccatgcgtgacggcgcgatcctcgccgagggcgcgccggcgcatatcttcaccgagcgtctggtggaggaggtgttcggcttgcgctcgttgatcatcgccgacccggtcagcggcacgccgctgctggtgccgcgcgggatcgccgccgacgcgccgggctga

SEQ ID NO: 4103 - DNA, 390 bp, Pseudomonas aeruginosa
atgcgccatcgtaaaagtggtcgtcacctgagccgcaccagcgcgcaccgcaaggctatgttccagaacatggcggtgtcgctgttcgaacacgaactgatcaaaaccaccctgcccaaggctaaggaactgcgtcgcgttgccgagccgctgatcaccctggccaaggaagacagcgtcgccaaccgtcgcctggctttcgaccgtacccgttcgaaagctgccgttggcaagctgttcaacgacctgggcaagcgctacgccaaccgtccgggcggctacctgcgcatcctgaagtgcggtttccgcgctggcgacaacgcccccatggcgtacgtcgagctggttgatcgtcctgtcggcggtgaagtcgtagaagctgccgaataa

SEQ ID NO: 4104 - DNA, 117 bp, Pseudomonas aeruginosa
atgaaagttcgtgcatcggtcaagaagctgtgccgtaactgcaaaatcatccgtcgcgatggcatcgtgcgggtgatctgcagcgcggaaccgcgtcacaagcagcgccaaggctga

SEQ ID NO: 4105 - DNA, 435 bp, Pseudomonas aeruginosa
atgcaactgaacgatctgcgttccgcgccgggtgcccgtcgcgaaaagcaccgtccgggccgtggcatcggtagcggtctgggcaagaccggtggccgtggtcacaaaggtctgacctcccgctccggtggcaaggtcgctccgggcttcgagggtggtcaacagcctctgcaccgtcgcctgccgaagttcggcttcgtttccctgaaggctatggatcgtgctgaagtacgcacctccgagctggccaaggtcgaaggcgacgtcgtcagcctgcagaccctgaaggatgccaacctgatcaaccagcacgtacagcgcgtcaaagtcatgctgtccggcgaagttggtcgtgcggtcaccctgaaaggtatcgccgccaccaagggtgcgcgtgcggctatcgaagcagctggcggtaaattcgaggactaa

SEQ ID NO: 4106 - DNA, 177 bp, Pseudomonas aeruginosa
atggcaactgtcaaagtcactctggtcaagagcctgaacggccgtctggccaatcacaaggcttgcgtcaagggtctcggcctgcgtcgcatcaatcataccgtcgaagttcaggacactcctgagaaccgcggcatgatcaacaaggcctactacctgctgcgtgtggagggttaa

SEQ ID NO: 4107 - DNA, 501 bp, Pseudomonas aeruginosa
atggcaaacaacgagcaaaagcgcgacgaaggctacatcgagaagctggttcaggttaaccgcgtcgccaaaaccgtaaaaggtggccgtatcttcgctttcaccgcactgaccgtggtgggtgatggcaagggtcgcgttggtttcggtcgtggcaaggcgcgtgaagtgccggccgccatccagaaagcaatggaagccgctcgccgcaacatgatccaagtcgatctgaacggcaccaccctgcagtatccgaccaagtccgcccatggcgcctccaaggtgtacatgcagccggcttcggaaggtaccggcatcatcgccggcggcgccatgcgtgccgttctggaagtggctggtgtgcagaacgtcctggccaagtgctatggctccaccaatccggtgaacgtggtttacgccaccttcaagggcctgaagaacatgcaggctccggaagcagtagcggccaagcgtggcaagagcgtcgaggagattctctaa

SEQ ID NO: 4108 - DNA, 351 bp, Pseudomonas aeruginosa
atgagcgtcaagaaagaaacccgtctgcgtcgcgctcgcaaggcacgcctgaagatgcgcgagctggaaaccgtacgcctctgcgtgtaccgctcttcccagcacatttacgcccaggtcattgcggccgacggcggcaaggtcctggccagcgcctcgaccctggacaaagacctgcgcgaaggtgccaccggcaacatcgatgcagccaagaaagttggtcaactggtcgccgagcgcgccaaagcggccggcgtcacccaggtggcgttcgatcgttctggcttcaagtaccacggccgtgtgaaagcgctggctgatgccgctcgtgaaggcggactggagttctaa

SEQ ID NO: 4109 - DNA, 534 bp, Pseudomonas aeruginosa
atgtctcgcgttgctaagaaccccgtcaagctgcctgccggcgttgaaatcaaactggctggtcagcaactgtccatcaagggcgccaaaggtgctctggagctcaaggtccatccttcggtcgaagtgatccaggacagcggtgagctgcgttttgctgcgcgtaacggcgaccagcagactcgcgccatggctggtaccacccgtgctctggtgaacaacatggtagtcggcgtcagccagggcttcgagcgcaagctccagctggtcggcgttggttacaaagcgcaggccaagggccaagtgctgtccctgtccctcggcttctcccatccggttgattacgaactgccggccggcatcgtcgctgagacccccagccagaccgatatcctgatcaagggtatcgacaagcagctggtcggtcaggttgctgccgaaattcgcgacttccgtccgccggagccttacaaaggcaagggcgtgcgttacgccgacgaagtcgtccgtcgtaaagaagccaagaagaagtag

SEQ ID NO: 4110 - DNA, 393 bp, Pseudomonas aeruginosa
atgagtatgcaggacccgttagcagacatgctaactcgcatccgtaatgcccagatggctgaaaagaccgtcgtaagcatgccgtcctcgaaactgaaagcggcggtagccaaagtcctgaaggacgaaggctatattgcggatttccagatcagctcggaagtaaaaccccagctgtccatcgaactgaagtacttcgaaggcaagcctgtcatcgaagaggtcaagcgcatcagccgtcctggcctgcgtcagtacaaatccgttgagcaactgccgaaagttcgtggcggcctcggtgtgtcgatcgtctccaccaacaaaggtgtgatgaccgatcgtgctgcccgtgctgctggtgttggcggcgaagtgctctgcactgtgttctaa

SEQ ID NO: 4111 - DNA, 306 bp, Pseudomonas aeruginosa
atggctaaagagagcatgaagaaccgcgagctgaagcgtcagctgacggtagccaagtacgccaagaagcgtgccgagctgaaagcgatcatcgctaatccgaactcctctgcggaagagcgttggaatgcccaggtcgccctgcagaagcaaccgcgtgacgccagcgccagccgcctgcgtaaccgttgccgcctgaccggtcgtccgcacggcttctaccgcaagttcggcctgagccgtaacaagctgcgcgaagccgccatgcgcggcgacgtaccgggtctggtgaaagccagctggtaa

SEQ ID NO: 4112 - DNA, 540 bp, Pseudomonas aeruginosa
atggcacgattgaaagaaatttatcggaaggaaatcgcgcccaagctgaaagaagagcttcagctggcgaacgtgatggaagttccgcgcgttaccaaaatcaccctgaacatgggtcttggcgaggcggtcggtgacaagaagatcatcgagaacgccgtagccgatctggaaaagatcactggtcagaagccggtcgtgacttacgctcgtaagtccatcgcaggcttcaagatccgtgaaggctggccgatcggcgtcaaggtcaccctgcgtagcgaccggatgtacgagttcctggatcgtctgctgtccatctccctgccgcgcgtgcgtgacttccgcggcctgaatgccaagtccttcgatggtcgcggcaactacagcatgggcgtgaaagagcagatcatcttcccggaaatcgattacgacaagatcgatgcgctgcgtggcctggacatcaccctgaccaccaccgctcgtacggatgacgaaggtcgcgccctgctgcgtgctttcaaattcccgttccgtaactga

SEQ ID NO: 4113 - DNA, 315 bp, Pseudomonas aeruginosa
atgcaaaagattcgtcgtgacgacgaagtaatcgtcattgccggcaaggacaagggcaagcgtggcaaggtgctgaaggttctcgctgacgaccgtctggtcgtcggcggggtgaacctgatcaagcgccacaccaagcccaatccgatgctcggccaacagggcggtatcgtcgagaaggaggcgcctctgcacgtctccaacgtcgccatcttcaatactgaaaccagcaaggctgaccgcgttggcttcaaggtagaagacggtaagaaaattcgtgtcttcaagtcgacccagaaaccggttcaggcttga

SEQ ID NO: 4114 - DNA, 369 bp, Pseudomonas aeruginosa
atgattcagactcaatccatgctcgatgtcgctgacaacagcggcgcgcgtcgtgtgatgtgcatcaaggtgctcggcggttcccaccgccgttacgccggcatcggcgacatcatcaaggtcaccgtcaaggaagcgattccgcgcggcaaagtgaagaagggccaggtcatgactgccgtggtcgttcgcaccaagcacggcgtgcgtcgtaccgacggttccatcatccgcttcgacggcaacgccgccgtcctgctgaacaacaagcaggagccgatcggcacccgtatctttgggccagtgactcgtgaactccgtaccgagaagttcatgaagatcgtctcgctcgcccccgaagtgctgtaa

SEQ ID NO: 4115 - DNA, 267 bp, Pseudomonas aeruginosa
atggctgaagctcagaaaaccgtccgtacgctgaccggccgcgtcgtcagcgacaaaatggacaagaccgtcaccgtactgatcgagcgtcgcgtcaagcacccgatctacggcaaatacgtcaagcgttcgaccaaactgcacgcacacgacgaatccaatcagtgccgcattggtgacctggtcaccattcgcgaaacccgtccgctggccaagaccaaggcctggaccctggttgatatcgttgaacgcgcggtggaagtctaa

SEQ ID NO: 4116 - DNA, 414 bp, Pseudomonas aeruginosa
atgctgcaacccaagcgtacgaagttccgcaaacaaatgaccggccacaaccgtggtctggctcatcgtggtagtaaggtcagcttcggtgagtacgcactgaaggccactagccgtggccgccttactgctcgtcagatcgagtccgcgcgtcgtgcgctgacccgtcacgtgaagcgtggcggcaagatctggatccgcgtattccctgacaagcctgtcaccaagaagcccctcgaagttcgtatgggtaaaggtaagggtggggtcgagtactgggtagcccagatccagccgggcaaggtcctgtacgagatcgagggtgtttccgaagagctggcgcgtgaggctttcgccctggctgctgcaaagctgcccctcgccacctcctttgttaagcggacggtgatgtga

SEQ ID NO: 4117 - DNA, 687 bp, Pseudomonas aeruginosa
atgggtcagaaagtacatcccaatggcattcgcctgggtatcgtcaaggagcacacctccgtttggtacgcagaccgcaagaactatgcggattacctgtttgccgacctgaaggtgcgtgagtacctccaagacaaactaaaaagcgcgtccgtaagccgtatcgatattcatcgtccggctcaaaccgcacgcatcaccatccacaccgctcgtcccggcatcgtgatcggcaagaaaggtgaagatgttgagaaactgcgccaggacctgaccaagcaaatgggtgtgcccgtgcacatcaacatcgaggaaatccgcaagccggaactcgatgccatgctggttgcgcagagcgtagcccagcagctggagcgtcgcgtaatgttccgtcgcgccatgaagcgcgccgtacagaacgccatgcgcattggtgccaagggcatcaagattcaggtcagcggtcgtctgggtggggctgaaatcgcccgtaccgaatggtatcgcgaaggtcgtgtgcccctgcacaccctgcgcgccgatatcgactatgccacctacgaagcgcacaccacttacggtgtgatcggtgtcaaggtttggatcttcaagggcgaggtcatcggtggccgccaggaagagctgaagccggtagcacccgctcctcgtaaaaaagctgctaggtaa

SEQ ID NO: 4118 - DNA, 333 bp, Pseudomonas aeruginosa
atggaagtagccgctaagctgtcgggcgctcgtatctccgcccagaaagcccgcttggtcgccgaccagatccgcgggaagaaggtgggcgaagcgctcaacctcctggctttcagcagtaagaaagccgccgagatcatgaagaaagtgctggagtcggccgttgccaacgctgagcacaacgaaggcgccgatgtggatgacctgaaggtctccaccgtcttcgtcaacgaaggtcgttcgctcaagcgcatcatgccgcgtgccaaaggccgtgctgatcgcatcgtgaagcggtcttgccatatcacggtcaaggttgcggacaagtaa

SEQ ID NO: 4119 - DNA, 276 bp, Pseudomonas aeruginosa
gtgccacgttcactgaaaaaaggtccgtttatcgatcttcacctgttgaagaaggtcgaagtcgcggtggaaaagaacgaccgcaagccgatcaagacctggtcgcgtcgttcgatgattctgccgcatatggttggtctgaccatcgccgtgcacaacggccgtcaacacgtaccggttctcgtcaacgaggacatggtcggccacaaactgggcgagttcgccgctacccgcacctaccgcgggcatgctgcggacaagaaagccaagcgttaa

SEQ ID NO: 4120 - DNA, 603 bp, Pseudomonas aeruginosa
atgcaattgaatgtgaacggcgctcaggctatcgaagtctccgagcgtacctttggtggcgaattcaacgagaccctggtgcaccaggcagtcgtggcctacatggctggcggccgtcagggcagcaaggcgcagaagactcgctccgaagtctctggtggtggcaagaagccgtggcgtcagaagggcaccggtcgtgctcgcgctggcaccatccgtagccccatctggcgtgggggcggcaccactttcgccgctaaaccgcgtagtcacgaacagaagctgaacaagaagatgtaccgcgcagcactgcgctccatccttgccgagctcgttcgtctggaccgtctggtcgtcgttgccgacttcgctgtcgatgcaccgaaaaccaagggcctggttgccaagctggacaccctgggtctgaaagacgtgctgatcgtgaccgatggtgtcgacgagaacctgtacctcgctgcgcgcaacctggcgcacgtcgatgtacgtgatgtccaaggttccgaccccgtcagcctgatcgcctacgacaaggtgctggtcaccgtgtccgccgtgaagaagttcgaggagctgctgggatga

SEQ ID NO: 4121 - DNA, 636 bp, Pseudomonas aeruginosa
atgacaattggtgttgtcggtcgtaaatgcggcatgacccgcattttcaccgaggaaggtgtctctattccggttacggtcatcgaggtcgagccgaatcgcgtcacccagttcaagactgaagaaaccgatggctaccgtgcagtgcaagtcaccgccggcgagcgtcgtgcttctcgcgttaccaaagcgcaagctggtcactttgccaaggcgaatgtcgccgccggtcgcggcgtgtgggaattccgtctgggcgaagagcagtatgccgctggtgaccagatcactgtcgatctgttccaggcaggccagatggtagacgttaccggcgagtccaagggtaagggcttcgcgggcaccatcaagcgctggaacttccgtggtcaggataacacccacggtaactccgtttcccaccgcgtcccgggttccatcggccagtgccagactcctggtcgagtgttcaagggcaagaaaatgtccggtcatctgggtgcggagcgggtaaccgttcaatccctggagatcgtgcgcgtcgatgctgaacgcaatctgctgctggtcaagggtgccgttcccggcgctaccggcggtgatgtgatcgtgcgtccggcagccaaggctcgcggttaa

SEQ ID NO: 4122 - DNA, 312 bp, Pseudomonas aeruginosa
atgcaaaaccaacaaatccggattcggttgaaggcttttgaccatcgcctgatcgatcaatcaacccaggaaatcgtggaaaccgcgaaacgtactggtgctcaggtgcgtggtccaatccctctgccgacccgcaaggaacgtttcaccgtgctgatctctccgcacgtcaacaaagatgcgcgtgatcagtacgaaattcgtacacataagcgtgtactggacatcgtccagccgacggataaaaccgtcgatgcgctgatgaagctcgatcttgctgcaggcgttgaagtacagatcagcctcggctaa

SEQ ID NO: 4123 - DNA, 372 bp, Pseudomonas aeruginosa
atggcaactatcaaccagctggtgcgtaagccgcgcaagcgcatggtcgacaagagcgacgtgcctgcgctgcaaaactgcccgcaacgtcgtggcgtatgcacccgcgtatacaccaccacgccgaaaaagccgaactcggcactgcgtaaggtatgccgtgtacgtctgaccaacggtttcgaggtttcctcgtacatcggtggtgaaggtcacaacctgcaagagcacagcgtagtgctgatccgtggcggtcgtgtaaaggaccttccgggcgtgcgttaccacaccgtgcgcggttcgctggacacctcgggtgtcaaagaccgtaagcagggtcgttcgaagtacggcgccaagcgtccgaagtaa

SEQ ID NO: 4124 - DNA, 4200 bp, Pseudomonas aeruginosa
ttgaaagacttgcttaatctgttgaaaaaccagggtcaaatcgaagagttcgatgccatccgtattggcctggcttcgcccgagatgattcgttcctggtctttcggcgaagttaaaaagccggaaaccatcaactaccgtaccttcaagccggagcgcgacggcctgttctgcgccaagatcttcggcccggtgaaggattacgagtgcctgtgcggcaagtacaagcgcctcaagcaccgcggtgtgatctgcgagaagtgcggcgtggaagtcgccctggccaaggtgcgccgcgagcgcatgggccacatcgagctggcttcgccggttgcccacatctggttcctgaagtcgctgccgtcccgtatcggcctgctgctggacatgaccctgcgcgatatcgagcgcgtgctctatttcgagagctacgtggtgatcgatccgggcatgaccaccctggaaaagggccagctgctgaacgacgagcaatacttcgaggccctcgaagagttcggtgacgatttcgatgctcgcatgggcgccgaagctgttcacgaactgctcaacgccatcgacctggagcacgagatcggccgcctgcgcgaagagattccgcagaccaactcggaaaccaagatcaagaagctgtccaagcgcctgaagctgatggaagccttccagggctccggcaacaagcctgagtggatggtcctgaccgtcctgccggtgctgccgccggacctgcgtccgctggttccgctggatggcggtcgcttcgcgacttccgacctgaacgacctgtatcgtcgggtgatcaaccgtaacaaccgtctgaagcgcctgctcgacctggctgctccggacatcatcgtgcgcaacgaaaagcgcatgctgcaggaagccgtcgacgccctgctcgacaacggccgtcgcggtcgcgccatcaccggctcgaacaagcgtccgctgaagtcgctggccgacatgatcaagggcaagcaaggtcgcttccgtcagaacctgctcggcaagcgcgtggactactccggtcgttccgtgatcaccgtgggcccgaccctgcgcctgcaccagtgcggtctgccgaagaagatggccctggagctgttcaagccgttcattttcggcaagctggaaggtcgtggtatggccaccaccatcaaggccgccaagaaaatggtcgagcgcgagctgcccgaggtctgggacgttctcgccgaagtcatccgcgagcatccggttctcctgaaccgtgcgccgaccctgcaccgtctgggcatccaggcgttcgagccggtcctcatcgaaggcaaggcgatccagctgcacccgctggtctgcgccgcgtacaacgccgacttcgacggtgaccagatggccgtccacgttccgctgaccctcgaggcccagctggaagcgcgcgcgctgatgatgtccaccaacaacatcctgtcgcccgccaacggcgagccgatcatcgttccgtcgcaggacgtggtaatgggtctgtactacatgacccgtgaagcgatcaacgcgaagggcgagggcatggccttcgccgacctgcaggaagtcgaccgcgcctaccgcagcggccaggcgtccctgcacgctcgcgtaaaagtgcgcatcaacgaaaagatcaagggtgaagacggccaactgaccgccaatacccgtatcgtcgacaccaccgtcggccgcgcgctgctgttccaggtcgttccggccggcctgccgttcgacgtggtcaaccagtcgatgaagaagaaggcgatctccaagctgatcaaccactgctatcgcgtggtgggtctgaaggacaccgtcatcttcgccgaccagctgatgtacaccggtttcgcctactcgaccatttccggcgtgtccatcggcgtcaacgacttcgtcatcccggacgagaaggcgcggatcatcaacgccgccaccgacgaagtgaaggagatcgagagccagtacgcctccggcctggtaacccagggcgagaagtacaacaaggtgatcgacctgtggtcgaaggccaacgacgaagtgtccaaggcgatgatggccaacctctcgaaagagaaggtcgtcgatcgcgagggcaaggaagtcgaccaggagtccttcaactccatgtacatgatggctgactcgggtgcgcggggctccgcggcccagatccgtcagctggcaggtatgcgtggcctgatggccaagccggacggctcgatcatcgagaccccgatcaccgcgaacttccgtgaaggcctgaacgtactccagtacttcatctccacccacggtgctcgtaagggtctggcggataccgcgctgaagaccgcgaactccggttacctgacccgtcgtctggtcgacgtggcccaggatctggtagtgaccgagatcgattgcggtaccgagcacggcctgctgatgtcgccgcacatcgaaggcggcgacgtggtcgaaccgctcggcgagcgcgtgctcggccgtgtgatcgcgcgcgacgtgttcaagccgggcagcgacgaggtcatcgtgccggccggcaccctgatcgacgagaagtgggtggacttcctcgaagtgatgagcgtcgacgaagtggtggtgcgttccccgatcacctgcgaaacccgtcatggcatctgcgccatgtgctacggccgcgacctggcccgtggccatcgcgtcaacatcggcgaggcggtcggtgtcatcgctgcccagtccatcggtgagccgggcacccagctgaccatgcgtaccttccacatcggtggtgcggccagccggacctccgcggccgacaacgtccaggtgaagaacggcggcaccatccgcctgcacaacctgaagcatgtggttcgtgccgacggcgcgctggtcgcggtttcccgttccggcgaactggcggttgccgacgacttcggtcgcgagcgcgagcgctacaagctgccgtacggtgcggtgatctcggtcaaggaaggtgacaaggtcgacccgggcgctatcgtcgccaagtgggacccgcacacccacccgatcgtcaccgaggtggacggtaccgtggccttcgtgggcatggaagagggcatcaccgtcaagcgtcagaccgacgaactgaccggcctgaccaacatcgaagtgatggatccgaaggaccgtccggctgccggcaaggacatccgtccggccgtgaagctgattgatgccgcgggcaaggacctgctgctgccgggtaccgacgtaccggcgcagtacttcctgccggccaacgccctggtcaacctgaccgacggcgccaaggtgagcatcggtgacgttgtcgcgcgtatcccgcaggaaacctcgaagacccgtgacatcaccggtggtctgccgcgcgttgccgacctgttcgaggctcgtcgtccgaaagagccttcgatcctggcggaaatcagcggcaccatctccttcggcaaggagaccaagggcaagcgccgcctggtcatcacgccgaacgatggcagcgatccgtacgaggagctgattccgaagtggcgtcacctgaacgtgttcgaaggcgaacaggtgaaccgcggcgaagtcatctccgacggtccgagcaacccgcacgacatcctgcgcctcctgggcgtgagctcgctggcgaagtacatcgtcaacgagattcaggacgtctaccgtctgcagggcgtgaagatcaacgacaagcacatcgagaccatcctgcgtcagatgctgcgcaaggtcgaagtcagcgagtccggcgactccagcttcatcaaaggcgaccaggtggaactcacccaggtgctggaagagaacgaacagctcggtaccgaggacaagttcccggccaagtacgagcgggttctgctgggtatcaccaaggcctccctgtcgaccgagtcgttcatttccgcggcgtcgttccaggagaccacccgcgtcctcaccgaggcggcggtcaccggcaagcgcgacttcctgcgtggtctgaaagagaacgtggtcgtgggtcgcctgatcccggccggtaccggtctggcttaccacagcgaacgcaagcgtcagcgcgacctcggcaagccgcagcgtgtgagtgccagcgaggcggaagccgcactgaccgaagcgctgaactcgagcggtaactaa

SEQ ID NO: 4125 - DNA, 369 bp, Pseudomonas aeruginosa
atggctctgaccaacgaagacatcatcaacgccgtatccgaaatgtccgtcatgcaagtggtcgaactgatcaaggcgatggaagagaagttcggcgttaccgctgctgccgctaccgttgccgctgctggcccggctgctgccgctgccgaagagcagaccgagttcaccatcgtcctggccgaagctggcgacaagaaagtgaacgtgatcaaggtcgttcgcgaactgaccggtctgggtctgaaagaagccaaggccgtcgtagacggcgctccgggcgtggtgaaggaaggcgcttcgaaagaagaagccgaagccgccaagaaagccctggaagaagcaggcgccaaagtcgagctcaagtaa

SEQ ID NO: 4126 - DNA, 501 bp, Pseudomonas aeruginosa
gtggcaattaaactcgaagacaagaaggccatcgtcgctgaagtcaacgaggctgccaaagctgccctgtccgctgtcgtggccgatgcccgtggcgtgaccgtaggcgccatgaccggactccgtaaagaggcccgcgaagctggtgtgtacgtgaaagtcgtacgtaacaccctgctcaagcgcgccgttgaaggcacccagttcgacgtgctcaacgacgtgttcaaaggcccgaccctgatcgctttctccaacgaacatccgggcgctgccgctcgtatcttccgtgagttcgccaagggtcaggacaagttcgagatcaaggcggctgccttcgagggtcagttcctcgcagccaatcagatcgacgtactggcaagcctgccgacctacgacgaagccgtatcgcagctgatgagcgtgattcaaggcgctaccagcaagctggctcgtactctggcggccattcgcgaccagaaagaagctgctgccgcctaa

SEQ ID NO: 4127 - DNA, 1443 bp, Pseudomonas aeruginosa
atgaccgtgaacgcgagtattttttggtacgactacgaaaccaccggcatcgaccctcgccgcgaccggccgttgcagatcgccgggatccgcacggacgaggcgctgaacgagatcggcgagccgatgaacctgtattgccgtcccagcgacgatatcctgccccaccctatggcttgcctgatcaccggcatcactccccagcggctggccgagcgggggctgtccgaggccgacttcatgacccgggtacacgcccagctggcgcagccggcgacctgcgtggccggctacaactccctgcgcttcgacgacgaagtgacgcgctacagcctgtaccgcaacttcttcgatccctacgcccgcgagtggcaaggcggcaatagccgctgggacctgatcgacatggtccgtaccgcctatgccctgcgcccggagggcatccagtggccgcagctggacggccggctgtcgctgaagctggaaatgctcaccgcggcgaacggcctggagcatgggcaggcccacgacgcgctttccgatgtccgcgccaccattgccctggcccgcctgatccgtcagcgccagccgcgcctgtacgattacctctaccagttgcgcagcaagcacaaggtgctcgaccaggtgcgcctgctgcagccgctggtgcatgtctccggacgcttttccgcggagcgccatttcctctcggtggtcctgccgctggcctggcacccgcgcaaccgcaatgctctgatcgtctgcgacctctgcgccgatcccgcgccgctgctggagttgtcggccgaagacttgcgcaggcgcctgtatacccgtcgcgacgaactggccgagggcgagttgccggtgccgctgaagcagatccaggtcaaccgttgcccggtggtggcgccgctgtcggtattgcgcgccgaggatcgccagcgaaccggcatcgaactcgatgagtgccagcaaaaagccgagctgttgcgccagcatcaaaccgtctgggcggacaaactgacagcgctatatggcgaagaaagtttctccgccagcgacgaccccgagcaacagttgtatgacggatttattggcgatcgggatcgacgcctttgtgaacagctgcgccttgccgaaccggagcaattggccaaagaacaatggcccttcgacgatgcccgtttgcaggagttgttctttcgctatcgtgcgcgaaatttcccggaaactttaaatgtggccgagcgccaacaatgggaaagcttctgccgcaatcgtttgtcccatgaagaatacggcgcaccgaatactttgccggccttcgaggcggcgctggaggcttgtcggcaagagcagggcggcacactgccggcggtacttgcggcctggcgcgattacgccgcggaactgcgtcaacgctattcgctggagacttga

SEQ ID NO: 4128 - DNA, 1464 bp, Pseudomonas aeruginosa
atgaactgcagggcatcggcgacgctctggatcaggtcgtcttgcttgatcacggccatggagcacggtcctcttcaggcgggtaattcggatgcggggcagggtcacggagccggccgcagccgaggagcgcgccggtcaggcaccggcgcaaaaaaggcgcgacagtatagccgttccggcgagacgggcgcacgcgccgacgatcagaccttggtcggccagccggctggtcggccgataaatccgcggtccgctagctggcagttcgttcgactaggcaacccgcagggggcagggtacattgcggccaggtgccattacgggacggagcccatgcgcacagacaagcctcctctgaaacagcgtgcgctgcaaaagctcttgctccgccggttcggcatggccgcaggcacctacctgctcggcctggtcctgctctggctggcgctactcagcggcttctaccgcgcagcgccgaccaccgcggcggccagcaccaccctggtggtggcttgccaactggccttcctctggctgttcgccagcggacgcaacctgcgttacgccgatcccagcctgaccgagccgcaggtgctggtggcgatcgcctggctgacctatttcctctaccacgtcgacagcctgcgcggcaccttcatggtgttctacgtgctggccctgctgttcggcgtgttccaactgccgccgcgggtcttcgcccgctgtgcggcgctggcgttcatcgctttttccggcatctacctggtagaggccttgcagcagcgtctcgagctaccgggccgggctgcattgcaggtgctcgtgatgttcatcgtaatggtctggctgagcctgttcgccagctacatacaggcgatgcggcaacgcatgcgccagcgccgctatgccttgcaggcgcaccaggacacgctgcgcggcatgatgcgccaactggaagacctggtggccaccgacgaactcaccggtctgttcaaccgccggcatttcatgcgcatggccagccgggcgctggaagacctgctgccgaaccggcagcacggcctggcgctgatcgacctcgatcacttcaagcggatcaacgaccgccacggccacgccgccggcgatcgggtcctgcagaccttcgccgcggtggcgcgttcctgtctgcgcgatggcgacgtcctggcccgttacggcggcgaggagttcgtcctgctgctgccccacgccgacgcggaacagctggaaagctgttgcgagcgcctgcgcctggcgttccaacaggcggaaccggtcggggtcacggtggataccctgagcctttcggtgggcatgaccctgctgtatgccgacgacgatctcgacgaggccttgcagcgggccgaccaggcgctctaccgtgccaagcgcggcggacgaaaccgctgcgacgccacctgggaggtcaccagtgcctga

SEQ ID NO: 4129 - DNA, 1155 bp, Pseudomonas aeruginosa
atgctagggttgcccctcgaccgtcgagagggcccgccgatgcccgctttgccgttgtcccgccgcgccctcgccgcgctggccctggtattcgccctccctgccctggccgaagactggcccgacaccgactggccccgtgcccaacagcccgcggggccggcgctggaggcattcgagcgctatgccttcggtcgtcgcgacgatgttcgtcgcaaaggcatccgcaccgacgcggtagtggtgatccgcgacggtcgtctggtctatgagcgctacgccggcccgagccgtgcagagaccccgcaccttacctggtcggtgagcaagagcctgctcgccacgctgcttggcgtcgccgagggcgaagggcgcttccagctcgacgacccggtggcgcgctactacccgccgttcgcccgtcatcccgaggtgacgttgcgccacctgctgaactggtcttccggactggactggcaggaggactacgagttcgcgccattgaaatcctccgtggtggcgatgctctacacccgtgggcgtgacgacatggccggcttcgtcgccgaaaccccgcaggcccggccgccgggccggcgtttccgctactccagcggcgacagcaacgtgctggcggcggccctccacggcatgctcggcgcggactatgccgagtacccctggcgcgcgctgttcgagccgctgggcatccgttcggcggtatgggagcgagacgccgccggcacgttcgtcggctcgtcgtacgtctacatgagcgcccgcgacctggcgcgcgtcggcctgctgatgcagcgccacgggcgctggcgcgagcggcaactgctgccgctggcatgggtcgagttcaacctgacacccttcgcccgctaccggccgagcgcggaagaggagggcgaggcggtgccgggcggccagtggtggttgaaccgtgcggtgaaaggcgcgccggcgccctggccggacgtcgccgagaccgccttcgccgcgctcggccactggggccaggcgctctacgtgctgcccgaggagaagctggtgatcgtgcgctacgccgacgaccgcgacgggcgtttccgccacaacgaattcctgcgcctggcacaggcggcgttcgccggggaggcgcggccatga

SEQ ID NO: 4130 - DNA, 903 bp, Pseudomonas aeruginosa
atgattttgttcgactacaagttgctcgccgcgctggccgcggtggtggagcagggcggtttcgagcgcgccgcacaggcgctggggctgtcgcaatcggcggtatcgcagcggatcaagctgctcgaggcgcgggtcggccagccggtcctggtgcgcgagacgccgccgcatcccaccgatctcgggcgccgcctgctcaaccatgtgcagcaggtgcggctgctggagggcgacctgcagcgctgggtgccgaacttggatgaaggcggtgccccggaacgcctgcgcatcgctctcaacgccgatagcctggcgacctggtgggccgccgcggtgggcgatttctgcgccgagcggcgggtgctgctggaccttgtggtggaggaccaggaggtcgggctcaagcgcatgcgcgcgggcgaagtggccggctgcgtctgcggtagcgcgcggccggtggccggcgcgcgttcgctgctgctcggagccatgcgttatcgcggcctggccagcccggatttcattgcccggcactttccccgcggggtcgaggcggccgccctggccggcgtgccggcgatcgtgttcggcccggacgacctgctgcaacaccgctttctcaaggacctcggcgtcgagggcggtttcatccaccacctctgcccgtcctcggaaggtttcgtccgcctcaccgccggcggtctcggctggggcctggtgccggagcgccaggtgcaaggcgagctggcgcgcggcgaactggtcgagctgctgcccggccaggtcatcgacgtaccgttgtactggcactactggcgcaacggcggcgaactgctcgcgtcgctcaccgagcacctgctcgcccgcgccggcgacggcttggtgcgggtgtcaggctga

SEQ ID NO: 4131 - DNA, 3057 bp, Pseudomonas aeruginosa
atggcttttaccgatccgttcatccgtcgtccggtcctggcgagcgtggtcagcctgctgatcgtcctgctcggcatgcaggccttcagcaagctggtgatccgcgagtatccgcaaatggagaacgcgctgatcacggtgaccacgctctacgccggcgccaacgcggaaaccatccagggctacatcacccagccgctgcagcagagcctggccagcgccgaaggcatcgactacatgacctcggtgagccggcagaactattcgaccatctccatctacgcgcggatcggcgccaataccgatcgcctggtcaccgagctgctggccaagtccaacgaagtgaagagccagctgccgccggacgccgaggacccggtgctgcagaaggaggccgcggacgcctcggcgctgatgtacatcagcttctacagcgagcagatgaacaacccgcagatcaccgactacctgtcgcgggtgatccagcccaagctggcgaccctgcccggtatcgccgaggcggagatcctcggcaaccaggtgttcgccatgcgcctgtggctggacccggtgaagatggccgcgttcggcgtcaccgccggcgagatcaaccaggcggtgcagcagtacaacttcctcgccgccgccggcgaggtgaagggccagttggtggtcaccagcgtcaatgcttccaccgacctcaagtcgccccaggccttcgccgccatcccggtgaagaccgacggcgaccgccgggtgctgatgggtgatgtcgcacgggtcgaactgggcgccgccagctacgacgcgatcagttcgttcaatgggattccctcggtctacatcggcatcaagggcacgcccagcgccaacccgctggacgtgatcaaggaagtgcgggcgaagatgcccgaactggaagagcaattgccgcccaacctcaaggtgtccatcgcctacgacgccacgcgcttcattcaggcctccatcgatgaagtggtgaagaccctcggcgaggcggtgctgatcgtcatcgtggtggtgttcctgttcctcggcgcgttccgttcggtactgatcccggtggtgaccattccgctgtcgatgatcggcgtattgttcttcatgcaggccatgggctactcgatcaacctgctgaccctgctggcgatggtcctggccatcggcctggtggtggacgacgcgatcgtggtggtggaaaacatccaccgccacatcgaggagggcaagccgcccttcgaggctgccctggagggcgcgcgggagatcgccgtaccggtggtcagcatgaccatcaccctcgccgcggtctacgcgccgatcggcttcctcaccggcctcaccggcgccctgttcaaggagttcgccttcaccctggccggcgcggtgatcatttccgggatcgtcgccctgaccctgtcgccgatgatgtgctcgcgcctgttgcgccacgaggagaatccctcgggcctggcgcatcgcctcgacctgatcttcgagggcctgaagcaacgctaccagcgcgccctccacggcaccctggacacccgtccggtggtcctggtgttcgccgtgctggtactggcgctgatcccggtactgctgatgttcaccaagaaggagctggcgccggaagaggaccagggcatcgtgttcctcatgaccaactcgccgcaaaccgccaacctcgactacctgaatcgctacaccgccgagttcgaaggcatcttccgcagcttcccggagtattactcggcgttccagatcaacggctacaacggcgtccaggccggcatcggcggcatgctgctcaagccctgggacgaacgcgaaaagagccagatggaattgctccatgcggtgcaggcgaagctcaacgagattcccggcgtgcagatcttcgccttcaacctgccgtcgctaccgggcaccggcgagggcctgccattccagttcgtgctcaacaccgccaacgactacgagtcgctgctgcaagtggcgcaacgggtgaagcagcgcgccagcgagtccggcaagttcgccttcctcgatctcgacctggcgttcgacaaacccgagctggtggtcgacatcgaccgcgagaaggccgcgcagatgggcgtctccatgcaggacctgggggtggcgctggccagcctgctcggcgagggcgagatcaaccgcttcaccatcgacgggcgcagctacaaggtcatcgcccaggtcgaacgcccctatcgcgacaatcccggctggctcggcagctactacgtgaagagccgcaacggccaactggtcgccctctcgaccctgatcgagacccacgaacgggcacggccacggcaactgaaccagttccagcagctcaactcggcgatcatctccggcttccccatcgtcagcatgggcgaggccatcgagacggttcagcagatcgcccgcgaggaagccccgcgtggcttcgccgtcgactacgccggcgcttcccggcaatacgtgcaggaaggcagcgcattgctggtcaccttcggactggccctggcgatcatcttcctggtcctcgccgcacagttcgaaagcttccgcgatccgctggtgatcatggtcaccgtgccgctgtcgatctgcggtgcgctgataccgctgttcctcggcgtgtcgagcctgaacatctatacccaggtcggcctggtgaccctgatcggcctgatcagcaaacacggcatcctgatcgtcgagttcgccaaccagttgcgccacgaacaggggctggggcgtcgcgaggccatcgagcaggccgccgcgatccgcctgcggccagtactgatgaccaccgcggcgatggtgctcggggtgatcccgctgatcctcgccaccggcgccggggcggtcagtcgcttcgacatcggcatcgtgatcgcgaccggcatgtcggtgggcaccctcttcaccctgttcgtcctgccgtgcatctacaccctggtggccaggccggatgccccgccaggcgtgacgcaagcggcaaacgcacactga

SEQ ID NO: 4132 - DNA, 1200 bp, Pseudomonas aeruginosa
atgctgtcggtgttgcgccccttcccgtcgccgctgttgagccggcacggcatcgacctggacttcccgctgctggcgggttgcctggcgctgctcggcctcggcctggtgatggtgacttccgcctcttccgaggtggcggcggcgcagtcgggcaacccgctgtacttctccgtccgtcacctgatctacctggtgatcggcctgatttcctgcggcctgaccatgatggtcccgatggccacctggcagcgctggggctggaagctgttgctggtcgccttcggcctgctggtgctggtgatcacccccggtatcggccgcgaggtgaacggctcgatgcgctggatcggcttcggcctgttcaacatccagccttcggagatcgccaaggtctgcgtggtgatcttcatggccggctacctgatccgccgccagcaggaggtccgggaaagctggatgggcttcttcaagcccttcgtggtgttgctgccgatggccggcctgctgctgcgcgagccggacttcggcgccaccgtggtaatgatgggcgctgccgcggccatgctgttcctcggcggggtggggctgttccgcttcggcctgatggtgctgctggcggtcggcgcggtggtcctgctgatccagacccagccctaccggatggcacgcctgaccaacttcaccgacccctgggccgaccagttcggcgccggctatcagttgagccaggcgctgatcgccttcggccgcggcggctggttgggcatgggactgggcaacagcatccagaagcagttctacctgccggaggcgcacaccgacttcgtcttcgccgtgcttgcagaggagctgggcatcgtcggcgccctggcgaccgtcgccctgttcgtgttcgtcagcctgcgcgcgctgtacatcggcatctgggccgagcaggccaagcagttcttctccgcctacgtggcctacggcctggccttcctctggatcggccagttcctgatcaacatcggggtgaacgtcggcctgctgccgaccaagggcctgaccctgccgttcctcagctacggcggcagttcgctggtgatctgctgtgcctgtctggggatgttgctgcgcatcgaatgggaacggcgaacccacctgggtagcgaggaatatgagttcaacgaagaggactttgccgatgaaaggtaa

SEQ ID NO: 4133 - DNA, 429 bp, Pseudomonas aeruginosa
atgaaaacctataccgcgaaaccggaaactgtacagcgcgactggttcgtcgtcgacgctgccggccagaccctgggtcgtctggcgaccgaaattgcccgccgcctgcgtggcaagcacaagcctgagtacactccgcacgttgacaccggcgactacatcgtcgtcatcaacgccgagcaggtgcgtgtgaccggtgccaagaccaccgacaagatgtactaccaccactccggcttcccgggcggcatcaagtcgatcaacttcgagaagctgatcgccaaggcccctgagcgcgtcatcgagaccgctgtaaaaggcatgctgccgaagaaccctctgggtcgcgatatgtatcgcaagctgaaggtgtacaagggtgccagccacccgcacaccgctcagcagccccaagaactgaagatttaa

SEQ ID NO: 4134 - DNA, 603 bp, Pseudomonas aeruginosa
gtggccgcccacgcggccgggccggacaagcggcccctgactcgttatcatggcggcgttttccactggaccaccaccatggctgaatttcacgacgacgactcgcaattcgaagagaagagcaagtcgcagatcaaacgcgagctgcatgccctgcaggacctcggcgagcgcctgaccaccctgcaaccgcagttgctggagcgcctgccgctcaccgacccgctacgcaaggcgctgctcgaggcgccgaagcacaaggcgcacatcgcccgcaaacggcatatccagtacatcggcaaactgatgcgcgaccaggacgtggacgccatcgtcgccctcatcgaccaggtggactcctccacccgccagtacaacgaacgtttccatgccctcgaacgttggcgcgaccagttgatcgccggcggcgacgcagcgctcgacgccttcgtcggggagttccccgagtgcgatcgccagcacctgcgcggcctggtccgccacgcccagcacgaggccgcgcacaacaaaccgccggccgccgcacgcaaagtgttcaagtacatccgcgagctggacgaaaccaagcgcggcctgcgctag

SEQ ID NO: 4135 - DNA, 972 bp, Pseudomonas aeruginosa
atggaaaccgttctgaccgcccgtgatctgacccgtcactacgaagtctcccgcggcctgttcaagggccacgcccaggtgcgcgcgctgaacggcgtatcgttcgaactggaagccggcaagaccctcgccgtggtcggcgagtccggctgcggcaagtcgaccctggcgcgcgccctgaccctgatcgaggaacccacctccggctcgctgaaaatcgccgggcaggaggtcaagggcgccagcaaggaccagcgccggcagttgcgccgcgacgtgcagatggtcttccagaacccctacgcctcgctcaatccgcgacagaagatcggcgaccagttggccgagccgctgctgatcaacaccgcgctgtcgcgcgaggaacgccgcgaaaaggtccagcagatgatgcgccaggtcggcctgcggccggagcattaccagcgctacccgcacatgttctccggcggccagcgccagcgcatcgccctggcccgggcgatgatgctgcaacccaaggtgctggtggcggacgagccgacctcggccctcgacgtgtcgatccaggcccaggtactgaacctgttcatggacctgcagcagcagttccgcaccgcctacgtgttcatctcgcacaacctggcggtggtccgccacgtcgccgacgacgtcctggtgatgtacctcggccgaccggcggagatggggccagcggacaagctctacgagaacccgctgcatccctatacccgtgcgctgctctcggcgaccccggcgatccacccggacccgacgaagccgaagatccgcatccagggcgaactgccgaacccgctgaacccgccggagggttgcgccttccacaagcgctgcccctacgccaccgagcgctgccgcagcgaggtgcccgagctgcgcctgctcgaccagcgccaggtggcctgccaccacgccgagcaattcctcggctga

SEQ ID NO: 4136 - DNA, 900 bp, Pseudomonas aeruginosa
atgaaagttctcatcctggcggcctatgcgctgagcatcctctatgtccattttcgcggccgggtacgccacaagctgtcgcgccaattgagcgaccactccagcttcctcgctccgatcaactgcctgatgtacctgttctcgaaggtaccgaaccgcccttacctggcaccgcagaccttccccgaactgcaggttctggtcgacaactggcaagccatccgcagcgaggcgctgcacctgcacgacgccggcaacatcaagcgttccgaacagtacgacgatatcggtttcaactcgttcttcaagagcggctggaagcgcttctacctgaaatggtacgacgaggcccatccctccgccggacaactctgcccgcagaccaccgccctgttgcggcagattccctcggtcaaggcggcgatgttcgccgaactgccgccgggctcgaagctggtgcgacaccgcgatccctacgcaggctcgctgcgcttccacctgggactgttcacccccaacgacccggcctgcttcatcgaggtggacggcgagcgctaccactggcgcgacggcgaggcggtggtgttcgatgaaaccttcatccactacgcggaaaacgccaccgaacacaaccgcatcattctcttctgcgacatcgagcggccgctgacccagggctgggccaccgccttcaaccgctggttcagccgcaacgtgatggctgccgcggccgccccgaacaacgcaggcgaccggaccggcggactcaatcggatcttcgacagcctctacaagatccgcctgcagggcaaacgtttgaagaagcgcaaccgcaagctctactacctgcagaaatggggcttcttcgccctggtactggctttcatcctgtggatctga

SEQ ID NO: 4137 - DNA, 2565 bp, Pseudomonas aeruginosa
atgcgaatagaccgtttgaccagcaagctgcaactggcgctctccgacgcccagtccctggccgttggccatgaccatccggccatcgagccggtgcacctgctttccgccctgctcgagcagcaaggcggttcgatcaagcccctgctgatgcaggtcggcttcgatatcgccgccctgcgcagcggcctcaacaaagaactcgacgcgctgccgaagatccagagcccgaccggcgacgtgaacctgtcccaggatctcgcacgcctgctcaaccaggctgaccgcctggcccagcagaagggcgaccagttcatctccagcgagctggtattgctggccgcgatggacgagaacaccaggctcggcaagctgctgctcggccagggcgtgtcgcgcaaggcgctggagaatgccgtggccaacctgcgtggcggcgaagcggtgaacgacccgaacgtcgaggagtcgcgccaggcgctggacaagtacaccgtcgacatgaccaagcgcgccgaggaaggcaagctcgacccggtgatcggtcgcgacgacgagatccgccggaccatccaggtcctgcagcggcggaccaagaacaacccggtgctgatcggcgaacccggcgtcggcaagaccgccatcgtcgagggcctggcccagcgcatcatcaacggcgaagtgccggacggcctcaaggacaagcgcctgctggccctggacatgggggcgctgatcgccggcgccaagttccgcggcgagttcgaggaacgcctgaaggcagtcctcaacgaactgggcaagcaggaaggtcgggtcatcctgttcatcgacgaactgcacaccatggtcggcgccggcaaggcggaaggtgccatggacgccggcaacatgctcaagccggctctggcgcgcggcgagctgcactgcgtcggtgctactaccctcgacgagtatcgccagtacatcgagaaggatgccgcgctggagcgccgcttccagaaggtgctggtggacgaaccgagcgaggaagacaccatcgccatcctccgtggtctcaaggaacgctatgaagtgcaccacggggtgagcatcaccgacggcgcgatcatcgccgcggccaagctgtcgcaccgctacatcaccgatcggcaactgccggacaaggccatcgacctgatcgacgaggccgccagccgcatccgcatggagatcgactccaagccggaggaactggatcgtctcgaccgtcgcctgatccagctgaagatcgagcgcgaggcgctgaagaaggaagacgacgaagccaccaggaagcgcttggccaagctggaggaggatatcgtcaagctcgagcgcgaatacgccgacctcgaggagatctggaagtccgagaaggccgaggtgcagggctcggcgcagatccagcagaagatcgagcaggccaagcaggagatggaggcggcgcggcgcaagggcgacctcgagagcatggcgcgcatccagtaccagaccatcccggacctggaacgcagcctgcagatggtcgaccagcacggcaagaccgagaaccagttgctgcgcaacaaggtgaccgacgaggaaatcgccgaagtggtttccaagtggaccggtatcccggtgtcgaagatgctcgagggcgagcgcgagaagctgctgcgcatggagcaggagctgcatcggcgagtgatcggccaggacgaggcggtagtcgccgtgtccaacgccgtgcgccgttcgcgcgccggcctcgccgatccgaaccggccgagcggctcgttcctcttcctcggcccgaccggggtgggcaagaccgagttgtgcaaggcgctggccgagttcctcttcgataccgaggaggcgctggtgcggatcgatatgtccgagttcatggagaaacactcggtggcccgcctgatcggcgcgcctccgggctacgtcggcttcgaggaaggcggctacctgaccgaggcgatccgccgcaagccttactcggtggtgctgctggacgaggtggagaaggcccatccggatgtattcaacattctcctccaggtgctcgaggacggacgcctgaccgacagtcacgggcgtacggtggacttccgcaacaccgtggtggtgatgacctccaacctcggttcggcacagatccaggagctggccggcgaccgcgaggcgcaacgtgccgcagtgatggacgcggtcaatgcacacttccgtccggaattcatcaaccggatcgacgaagtggtggtattcgagccgctggctcgcgagcagatcgccggcatcgccgagatccagctcggtcgcctgcgcaagcgcctggccgagcgcgagctgagcctggaactgagccaggaggcgctggacaagctgatcgccgtcggcttcgacccggtctatggcgcacgcccgctgaagcgggccatccagcgctggatcgagaacccgctggcgcaactgatcctggccggcaaattcgcgccgggtgccagtatctcggcgaaggtggaaggcgacgagatcgtcttcgcctga

SEQ ID NO: 4138 - DNA, 2454 bp, Pseudomonas aeruginosa
atgcccgattccgtcgctgccggcctgcgcctggcgccagaagaactgacccgcccgttcgctcccgagcaattcaccttcgacaccaccgatgacctggagcccttccgcggcgtgctgggccaggagcgtgcggtcgaggcgctgcagttcggtgtggcgatgccgcgtccgggttacaacgtattcgtcatgggcgagccggggaccggacgcttctccttcgtcaaacgctatctgcaagccgagggcaagcgcgtcgccacgccctccgactgggtctacctgaacaatttcgacgagccgcgcgaacctcgggtgatcgagctgccgccgggcagcgcgaccgaattcagcgccgacatcgaccgtctgatcgacaacctgatgtcgaccttcccggcggtcttcgagcatccggcctaccagcagaagaagaacgccgtcgaccgcgctttcaaccagcgctacgaccgcgccctggactcggtggagcggcgcgccctggagaaggacgtggcgctgtaccgcgacagcgccaacgtcgccttcaccccgatgaaggacggcaaggccctcgacgaggccgaattcgcccagttgcccgaagccgagcgcgagcgtttccacaaggatatcgccgccctcgaggagtacctcaacgaggaactggcgagcctgccgcagtggaagcgcgagtcgagcaaccagttgcgcgagctcaacgaggaaaccatcaccctggccctgcagcccctgctggcgcctctggtggagaagtacaacaacaacccgggcgtctgcgcctacctgcaggcgatgcaactgaacctgctgaagaccgtggtcgaccaactggtcgacgacagccgcaccgacgcccagcgcaagcaagggctgatcgagcagtacgcgccgaaccaggccatcgtccaccacgcgaccagcggcgcgccggtggtgttcgagtcgcacccgacctacgacaacctgttcggccgcatcgagtacagctcggaccagggggcgctctacaccagctaccggcagttgcgtccgggggcgctgcaccgggccaacggcggcttcctgatcctggaagcggaaaagatgcttggcgagccgttcgtctgggacgcgctcaagcgtgccctgcagtcgcgccagttgaagatggagtcgccgctggccgaactcggccgcctggctgcggtttccctgaccccccaggtgatcccgctgcaactgaaggtgatcatcatcggctcgcggcagatctactacaccctgcaggacctcgatccggacttccaggagatgttccgggtgctggtggacttcgacgaggacatcccgctgggcgaggacagcctcgaacagttcgcccagttgctcaagacgcgcacctcggaagagggcatggcgcccctcagcggcgcggcggtggcgcgactggcgacctacagcgcgcgcctggccgagcaccaggggcggctttcggcacggatcggcgatctgttccagttggtcagcgaagccgatttcatccgtcagctggcgaacgaggaggtgatccagctcggccacatcgagcgtgccctcaaggccaagcagacccgcaccggacgggtgtcggcgcggatcctcgacgacatgctggcggggatcatcctgatcgacaccgctggcgccgcggtcggcaagtgcaacggactgaccgtgctggaggtgggcgactcggtgttcggcgtgccggcgcggatttccgcgaccgtctatccgggcagcagcggcatcgtcgatatcgagcgcgaagtcaacctcggccagccgatccactccaagggcgtgatgatccttaccggctacctgggtagccgctacgcccaggagttccccctggaaatctccgccagcatcgccctggaacaatcctacggctacgtggacggcgacagcgcctcgctgggcgaggtctgcacgctgatctcggcgctgtcgcggacgcccttgaagcagtgcttcgccattaccggctcgatcaaccagttcggcgaggtgcaggcggtcggcggcgtcaacgagaagatcgagggcttcttccgcctctgcgaagcgcgcggcctgaccggcgaacagggtgtgatcatcccgcgcgccaacgtcactaccctgatgctcgacgagcgcgtgttgcaggcggtgcgcgccgggcagttccacgtctacgcggtgcgcgaggtggacgaggcgctggcgctgctggtgggcaagccggtcggtgcccaggacgagaagggacgcttcccgaaaggcagcgtgaacgatctggtcgtggcgcgcttgcaggagatatccgaactcggcatggaagaggacgacaaggaaaaggacaagccggcggagaaagagaccgtcgcggcgaaggacaaggccgcggcgaagaaggactga

SEQ ID NO: 4139 - DNA, 3132 bp, Pseudomonas aeruginosa
atgtccgaattcttcatcaagcggccgaacttcgcctgggtggtggccctgttcatctccctggccggcctgctggtcatttccaaattgccggtagcgcagtaccccaatgtcgcgccgccacagatcaccatcaccgccacctatcccggcgcctcggcgaaggtgctggtggactccgtcaccagtgtgctcgaggagtcgctgaacggcgccaagggcctgctctacttcgagtcgaccaacaactccaacggcaccgccgagatcgtcgtcaccttcgagccgggcaccgatccggacctggcccaggtggacgtgcagaaccgcctgaagaaagccgaggcgcgcatgccgcaggcggtgctgacccagggcctgcaggtcgagcagaccagcgccggtttcctgctgatctatgcgctcagctacaaggaaggcgctcagcgcagcgacaccaccgccctcggcgactacgccgcgcgcaatatcaacaacgagctgcggcgcctgccgggcgtcggcaagctgcaattcttctcttccgaggcggccatgcgggtctggatcgatccgcagaagctggtgggcttcggcctctccatcgacgacgtgagcaatgccatccgcgggcagaacgtgcaggtgccggccggcgccttcggcagcgcaccgggcagttccgcgcaggagctgacggcgaccctggcggtgaagggcaccctggacgatccgcaggagttcggccaggtagtgctgcgcgccaacgaggacggctcgctggtccggctcgccgatgtcgcgcgcctggaactcggcaaggagagctacaacatttcctcgcgactgaacggcacgcccaccgtgggcggggctatccagctgtcgcccggggccaacgcgatccagaccgctaccctggtgaaacagcgtctcgccgaactgtcggcgttcttccccgaggacatgcagtacagcgtgccctacgacacctcgcgcttcgtcgacgtggccatcgagaaggtgatccacaccctgatcgaagcgatggtcctggtgttcctggtgatgttcctgttcctgcagaacgtccgctacaccctgatcccgtccatcgtggtgccggtgtgcctgctgggtacgctgatggtgatgtacctgctggggttctcggtgaacatgatgaccatgttcggcatggtcctggcgatcggcatcctggtggacgacgccatcgtggtggtggagaacgtcgagcggatcatggcggaggaggggatttccccggccgaggccacggtcaaggcgatgaagcaggtatccggcgccatcgtcggcatcaccctggtgctctcggcggtgttcctgccgctggctttcatggccggttcggtgggggtgatctaccagcagttctcggtgtcgctggcggtctcgatcctgttctccggcttcctcgccctgaccttcaccccggcgctgtgcgccacgctgctcaagcccattcccgaagggcaccacgagaagcgcggcttcttcggcgccttcaaccgtggcttcgcccgcgtcaccgagcgctattcgctgctcaactcgaagctggtggcgcgcgccggacgcttcatgctggtgtacgccggcctggtggccatgctcggctacttctacctgcgcctgccggaagccttcgtgccggcggaagacctcggctacatggtggtcgacgtgcaactgccgcctggcgcttcgcgcgtgcgcaccgatgccaccggcgaggagctcgagcgcttcctcaagtcccgcgaggcggtggcttcggtgttcctgatctcgggcttcagcttctccggccagggcgacaatgccgcgctggccttcccaaccttcaaggactggtccgagcgaggcgccgagcagtcggccgccgccgagatcgccgcgctgaacgagcatttcgcgctgcccgacgatggcacggtcatggccgtgtcgccgccaccgatcaacggtctgggtaactccggcggcttcgcattgcgcctgatggaccgtagcggggtcggccgcgaagcgctgctgcaggctcgcgatactcttcttggcgagatccagaccaacccgaaattcctttacgcgatgatggaaggactggccgaagcgccgcaactgcgcctgttgatcgaccgggagaaggcccgtgccctgggggtgagcttcgagaccatcagcggcacgctgtccgctgccttcggctcggaggtgatcaacgacttcaccaatgcggggcgccaacagcgggtggtgatccaggccgaacagggcaaccggatgaccccggaaagcgtgctcgagctatacgtgcctaacgctgctggcaacctggtaccgctcagcgccttcgtcagcgtgaaatgggaagagggaccggtgcaattggtgcgctataacggctacccgtcgatccgcatcgtcggtgacgccgcgcccggcttcagtaccggcgaagccatggcggaaatggagcgcctggcctcgcagctgccggccggcatcggctacgagtggaccggcctgtcctatcaggagaaggtctccgccgggcaggccaccagcctgttcgccctcgccatcctggtggtgttcctgttgctggtggcgctctacgagagctggtcgatcccgctgtcggtgatgctgatcgtgccgatcggcgccatcggcgcggtgctcgcggtgatggtcagcggtatgtccaacgacgtgtatttcaaggtcggcctgatcaccatcatcggtctttcggcgaagaacgcgatcctcatcgtcgagttcgccaaggaactctgggagcaggggcatagcctgcgcgacgccgccatcgaggccgcgcgcctgcgcttccggccgatcatcatgacttccatggcgttcatcctcggcgtgatacccctggccctggccagcggtgccggcgcggcgagccagcgtgccatcggcaccggagtgatcggcgggatgctcagcgccaccttcctcggcgtgctgttcgtacctatctgtttcgtctggctgctgtcgctgctgcgcagcaagccggcacccatcgaacaggccgcttcggccggggagtga

SEQ ID NO: 4140 - DNA, 1083 bp, Pseudomonas aeruginosa
atgaaagcttctctgctgaaaaagctggatgtcctcagcgatcgctacgaagaactgacggcgctgctcggcgacgccgaggtgatcagtgaccagacccgcttccgcgcctattcccgcgagtacgccgaggtcgaaccggtgatcctggcgttccgcgactaccgcaaggtgcaggccgacctcgagggcgcccaggcgttgctcaaggacagcgacccggagttgcgcgacctcgccgaggaggaggtcgccgaagcgcgcggccgcctcgccgccctcggcgacagcctgcagcgcatgctgctgccgaaggatcccaacgacagccgcaacgtgttcctggagatccgtgccggcaccggtggcgacgaggcggcgatcttctccggcgacctgttccgcatgtattcgcgctacgccgagcgccagggctggcggatcgagacgctgtcggagaacgagggcgagcacggtggctacaaggaagtgattgcccgggtcgagggcgacaacgtctacgccaagctcaagttcgagtccggcgcgcaccgcgtgcagcgggtgccggaaaccgaatcccagggccggatccacacttccgcctgcaccgtcgcggtgctgccggagccggacgagcaggcagcgatcgagatcaacccggccgacctgcgggtggacacctaccgttcctccggtgccggcggccagcacgtcaacaagaccgactcggcggtgcgcatcacccacattcccagcggcatcgtggtcgagtgccaggaagagcgctcgcagcacaagaaccgcgccaaggccatggcctggctggcggccaagctcaacgaccagcagcaggccgcggcgcagcaggcgatcgccagcacgcgcaagctgctggtgggctcgggcgaccgctcggagcgcatccgtacctacaacttcccgcaagggcgggtcaccgaccatcgcatcaacctcaccctgtactccctgggcgaggtgatggagggcgcggtggaacaggtgatcgagccgctgctgcaggaataccaggccgatcaactggcggccctgggcgactga

SEQ ID NO: 4141 - DNA, 1020 bp, Pseudomonas aeruginosa
atgagtcgcgcctgcctgctcgcggccctgctggccgcccccttcgcccatgccgagatgacagcgctcgacgacgagcaactgtcggacgtgcagggtgccggcatcggcttcgtcctcgacagcgccatggtcgacggcaacaaggccaccatcgcgatcaatggcgtgaccaacaccgccaccgggcagaacgtgccgattacggtaaaggagctgtacgtcgccgccactggcagcaacaagggcagcaccctggcgccggtgactctcggccgtctcaatttcccgttcaagctgaatctggccaagggttcggtgctgaccacccagctcgacgacgggcgggtggtcagcaccttgccggacaccgcggacgtgatcgagctggctttccccagcctggtgagcggcgccggcggccagccgtgcatcgctggttacgccggtgccggcagcaactgctcgagccgggccagcgaaaaggtcgacgccggcatccgcttcgacttcggcgtcacttccacgcgcaccgatgtgctcaacctggacttctccgaactggcgatggacggttcctacctgcgcttctggggcgccaacgcgcgcagccaactggttggcgagatacgcctgaacctctacgccaagactttcgagatcatgtcctgcggtgctggctcgcccagttgcgtcagcgccgctgagcaggccgcgcgcaccgtctacctgaccaacgcctatgccagcgtcgcgcttggctacgggaagtcgcagccgttgctgttctcggtcaccgccgacggcaacttcactttcgaactgcccaagctgaccctggccaacgccgccgacttctacgccaatgcgccgcgcaccagcctggtgatcgagaacctcaacatcggcggtacccggccaggctacgggcaggtaccgaccggcggctacaacatgggccgcaacgagatatccgggctcagcttcaactacctgaaggtgacgtcgcacaacctctga

SEQ ID NO: 4142 - DNA, 1065 bp, Pseudomonas aeruginosa
atgagcagcactcccagcctttcccattcccctgccgagctttaccgcgcctggcaggacctgcgcgccgagcgaccgcagctacgcgcgcgcgacgccgccgcgctgttgcaggtcagcgaaggcgagctggtcgccagccgggtcggcatcgatgccgtgcgcctgcggccggactgggccgccttgctgccggcgctcggcgaactggggccgatcatggcgctgacccgcaacgagcattgcgtccacgaacgcaaggggccgtatcgcgaagtgacggtctctgccaatgggcagatgggcctggtggtctcgccggatatcgacctgcgcctgttcctgggggggtggaacgccgtcttcgccattgccgaggagacagcgcggggtacccagcgcagcatccaggtgttcgaccagcagggcgtggcggtgcacaaggtgttccttgccgaggccagcgacgtccgcgcctgggaaccgctggtcgagcgcctgcgggctgccgagcaggatgccgtgctggcgctgcacgaaccccgcgcaccggctgcggcgctcgtcgatgcgcagatcgatgccgccgccttgcgcgaaggctgggccgcgttgaaggacacccatcatttccacgccctgctgaagaagcatggcgcgcagcgcacccaggcgctgcgcctggctggcggcgaatgggccgagcgcctggataatggcgacctggcgaaactcttcgaagcggcggccgaaagcggattgccgatcatggtgttcgtcggcaacgcccactgcatccagatccataccgggcctgtgtgcaacctgaagtggctggacgactggttcaacgtgcttgatccggaattcaacctgcacctgaagaccaccggcatcgccgagctttggcgggtgcgcaagccgagcaccgatggcatcgtaaccagctgggaggccttcgacgccgacggcgaactgatcgtgcaactgttcggcgcgcgcaagcccggcgagcccgagcgcgacgactggcgcgaactggccgaatccttcaaggcgctctga

SEQ ID NO: 4143 - DNA, 2523 bp, Pseudomonas aeruginosa
atgacgcaagtcacggtgaaagaactggcccaggtggtcgacacaccggtggagcgcctgctgctgcagatgcgtgacgcaggtctgccgcacaccagtgccgaacaagttgtaacggatagcgagaagcaagccctgctgacccacctgaaaggcagccatggcgatcgcgccagcgagccgcgcaagatcaccctgcaacgcaagaccactaccacgctgaaagtgggtggcagcaagacggtgagcgtcgaagttcgcaagaagaaaacctatgtcaagcgcagccccgacgagatcgaggccgagcgccagcgcgaactcgaggagcagcgcgcggcggaagaggcggagcgtctgaaggccgaagaggccgctgcccgccagcgtgccgaagaggaagcgcgcaaggccgaggaagctgcgcgtgccaaggctgcccaggaagcagcggctactgccggtgccgagcctgccgtggtggcggatgtcgcggttgccgaaccagtggccaagcctgccgccgtggaagagcgcaagaaggaagagccgcgccgcgtgcccaagcgtgacgaggacgatgaccgccgcgaccgcaagcacacccagcaccgtccctcggtcaaggagaaggaaaaggttcctgctccgcgcgtggctccacgcagcaccgacgaggaaagcgatggttaccgtcgcggcggtcgtggtggcaagtcgaagctgaagaagcgcaaccagcacgggttccagaacccgacaggaccgatcgtgcgtgaagtgaacatcggtgagaccatcaccgtagccgagttggccgcccagatgtcggtcaagggtgccgaagtcgtcaagttcatgttcaagatgggctccccggtgaccatcaaccaggtcctggaccaggagaccgcccaactggtcgccgaagagctgggccacaaggtcaagctggtcagcgagaacgcgctggaagaacaactggccgagtccctgaagttcgaaggcgaggcggtcacccgcgcgccggtcgtcaccgtcatgggccacgtcgaccacggcaagacctcgctgctcgactacatccgtcgcgccaaggtcgccgcgggcgaggccggcggcatcacccagcatatcggtgcctaccacgtcgaaaccgagcgtggcatggtgaccttcctggatacccccggccacgccgcgttcaccgcgatgcgtgcccgtggcgcccaggcgaccgacatcgtgatcctggtggtcgcggccgacgacggcgtcatgccgcagacccaggaagccgtgcagcacgcgaaagcggcgggcgtgccgatcgtggtcgcggtgaacaagatcgacaagcccgaggccaacccggacaacatcaagaacggcctggccgctctcgacgtgatcccggaagagtggggcggcgacgctcccttcgtcccggtttcggcgaagctcggtactggcgtcgatgaactgctcgaagcggtcctgctgcaggcggaagtgctcgaactgaaagccactccgtcggccccgggccgtggcgtggtggtcgagtcgcgcctggacaagggacgcggcccggtggccaccgtgctggtccaggacggtaccttgcgccagggcgacatggtgctggtcggcatcaactacggtcgtgtccgcgccatgctcgacgagaacggcaagccgatcaaggaagccggcccgtcgatcccggtcgagatcctcggcctggacggtacgccggatgccggtgacgagatgaccgtggtcgccgacgagaagaaggcccgcgaagtcgccctgttccgtcaaggcaagttccgtgaggtgaaactggcgcgtgcccatgccggcaagctggaaaacatcttcgagaacatgggccaggaagagaagaagaccctgaacatcgtcctcaaggccgatgtgcgcggttcgctcgaggctctgcaaggctcgctcagcggcctgggcaacgacgaagtgcaggtccgcgtggtcggtggcggcgtcggtggcatcaccgagtccgacgccaacctggcgctggcttccaacgcggtgctgttcggcttcaacgtgcgcgccgacgccggcgcgcgcaagatcgtcgaagccgaaggtctggatatgcgttactacaacgtgatctacgacatcatcgaggacgtcaagaaggccctgaccggcatgctcggcagcgacctgcgggagaacatcctgggcatcgccgaggtgcgcgacgtgttccgctcgccgaagttcggcgcgatcgccggctgcatggtcaccgagggcatggtgcaccgcaaccgtccgatccgcgtgctgcgcgacgacgtggtcatcttcgaaggcgagctggagtctctccgtcgcttcaaggacgacgtcgccgaagtgcgtgccggcatggagtgcggcatcggcgtgaagagctacaacgacgtcaaggtcggcgacaagatcgaagtgttcgagaaggtcgaagtcgcacgcagcctttga

SEQ ID NO: 4144 - DNA, 1146 bp, Pseudomonas aeruginosa
atgatcatttccgcttccaccgactaccgcgccgccgcccaacgcaagctgccgccgttcctcttccactacatcgacggcggcgcctacgccgagtacaccctgcgccgcaacgtcgaggacctgtcggccatcgccctgcgtcagcgggtgctgaagaacatgtccgagctgagcctggaaacccgcctgttcgacgagaccctggcgatgccggtggcgctcgccccggtcggtctcaccggcatgtacgcccgccgcggcgaggtccaggcggcgcgcgcggcggcggcgaagggcgtgcccttcaccctgtcgacggtatcggtgtgcccgattgaggaggtcgccccggccatcgaccggccgatgtggttccagctctacgtgctgaaggaccgcggcttcatgcgcaacgccctggagcgggccaaggccgccggcgtcaccaccctggtgttcaccgtcgacatgccggtccccggcgcccgctaccgcgacgcccattccggcatgagcggcccctacgccgcgccgcgccgcatcctgcaagccatgacccacccggcctgggcctgggacgtcggcctgctgggcaagccccacgacctcggcaacatttccgcctaccgcggcaacccgaccggactggaggactacatcggctggctgggcgccaacttcgacccgtcgatttcctggaaggacctggagtggatccgcgagttctgggacggcccgatggtgatcaagggcatcctcgacccggaggatgccagggatgcggtgaagttcggcgccgacggcatcgtcgtctccaaccacggcgggcgccagctcgacggcgtgctgtccagcgcccgcgcgctgccggcgatagccgatgcggtgaagggtgaactggcgatccttgccgactccggcatccgcaccggtctcgacgtggtgcggatgatcgccctcggcgccgacagcgtgctgctcggccgcgccttcgtctacgccctggccgccgccggcgaggccggggtgcgcaacctgctcgaactgatcgaaaaggaaatgcgcgtggccatggtcctcaccggggccaagtcgatcggcgagatcagcgccgactcgctggtccgcgaactgggcgcctga

SEQ ID NO: 4145 - DNA, 1113 bp, Pseudomonas aeruginosa
gtgaaccgacctgcgagccctgcgatgcgcgacgaccgcgaactgaccccggaacaactggcggccttcggcgccgaactcgatgccctgcgcctgcgtaccctggccgatctcggcgcggacgacgcgcgctacatccgccgggtccgcgcggcggtgcgcgtctgctgctggagcggcagggcgctgctgatgttcggctggctgccgccgacctggctgctcggcagcctgcttctcggcctgggcaagatcctcgagaacatggagctgggccacaacgtcatgcacggccagtacgactggatgaacgatccggaattcgccggccgcgcctacgagtgggacatcgccgggccgtccgacttctggcggcacacccacaaccatatccaccacacctacaccaacgtgctgggcaaggacgacgacgtcggctatggggtcgtgcgcctgttcccggagcagcgctggaagccgttctaccgctggcaaccgctgtgggtgacgctgcaggcgctgctgttccagtacgcggtggcgatccagcatctgcgcctggacaagtacgccaaggggcgcctggacaaggccgaactcatgccgctgctacgccgcctgcgtgccaagctgggtcgccagtggaccaaggactacctgctgttcccgcttctcggcctgttcgccggcggcttcggcgcggtgttcgtcggtaacctgctggccaacgtgctgcgcaacctgtggaccttcacggtgatcttctgcggccacttcaccgagaaggcggtggtcttcccgccctcggtgctggagggagagacccgtggccactggtacctgcgccagttgcgcggctccagcaacctggagggcgggccgctgttccacatcctgaccggcaacctcagccaccagatcgagcaccacctctacccggacctgccggcgcgtcgctacgccgcgttgtcccgcgaggtccgcgaaatcgcccggcgctacgggcagacctacaacagcggacgcctgggacggcaattcctcactgtcttgcggcgcatctgggtatatcggctgccgccgcgcgagcccctcccggcggggcgcggctga

SEQ ID NO: 4146 - DNA, 1203 bp, Pseudomonas aeruginosa
atggcttggaacgagccgggtgacaactcgaacaacaacgatcgagacccgtggggaggccgccgcggtggtggtggcggcggtggtgaccgcaaggggccgcccgacctggatgaggctttccgcaagcttcaggacagcctgaacgggctgttcggtggaaaaaaacgcagtggcaacggttccggctccggttccggcggcaagggcggtggcctgggcctgttcggcatcggcctggcgatcctcgccgtgctctggctgtacaacgccatctatgtggtggacgagcaggagcaggcggtcatcctgcgcttcggcaagtattacgagacggtcggtcccggcctgaacttctacttcccgccgatcgacaagcgcttccaggagaacgtcacccgcgagcgtgcgtacagcaagcaggggcagatgctcaccgaggacgagaacatcgtcgaagtgccgctgaccgtgcagtacaagatcagcaacctgcaggacttcgtgctcaacgtcgaccagcccgaggtcagcctgcagcaggcgaccgagagcgcgctgcggcatgtcgccggctccaccaccatggaccggatcctcaccgaaggccgcgagcagatggcgaccgaggtgcgcgagcgcctgcaacgcttcctggatacctacaggaccggtatcaccgtgacccaggtgaacatccagagcgcccaggcaccgcgtgaggtgcaggaagcgttcgacgacgtgatccgggcccgcgaggacgagcagcgcgagaagaaccaggccgaagcctatgccaacggcgtggtgccggaggcacgtggccaggcccagcgcatcatcgaagaagccaacggttaccgcgacgaggtgatttcgcgcgcccagggcgaggcggatcgcttctccaagctgctggtggaatatcgcaaggctccggaagtgacgcgcgagcgtctgtacctggacaccatgcaggaagtcttcagccagaccagcaaggtgctggtgaccggtcagcaggggcagaacaacctgctctacctgccgctggacaagatgatcgatggtcgtaacgccgcgcccgctacgggggccggtgcttccgccggtggtggcagcgccagcgcttccgacctggggtcgcggatcgtcaacgatctgcgccagcaagacgcgcgtacgagggagagccgctga

SEQ ID NO: 4147 - DNA, 1812 bp, Pseudomonas aeruginosa
atgagcgatagtcctcagaatcccggaccttccagtctcaagatctatttccgcctgttgggttacgtgaagccctacatcggaatgttcctactcagcatcgtcggtttcctgatcttcgcgtcgacccagccgatgctggcgggcatcctcaagtatttcgtcgacggcctctccaatcctgacgcggcattgtttccgaatgtgcagtggccctggttgcgcgacttgcacctggtctacgcggtgccgttgctgatcatcctgatcgctgcctggcaggggctgggctcgttcctcggcaacttcttcctcgccaaggtttccctggggctggtgcatgacctgcgggtcgccctgttcaacaagctgctggtgctgccgaaccgctatttcgacacgcacagctccggccacctgatctcgcgcatcaccttcaacgtgaccatggtcaccggagcggccacggatgccatcaaggtggtgatccgtgagggcctgaccgtggtcttcctgttcctctacctgctgtggatgaactggaagctgaccctggtgatgctggcgatcctgccggtcatcgcggtgatggtgactaccgccagccgcaagttccgcaagcagagcaagaagatccaggtggccatgggcgacgtcacccacgtcgcctcggaaaccatccagggctaccgggtggtgcgcagcttcggcggcgaagcctatgaagagaagcgcttcctcgacgccagccagagcaataccgacaagcagttgcggatgaccaagaccggcgcggtctacacgccgatgctgcaattggtgatctacgtcgccatggcgatactgatgttcctcgtgctgtggctgcgcggggacgcctcggccggcgacctggtggcctatatcaccgcggcgggcctgttgcccaagccgatccgccagctttccgaagtcagttccacggtccagcgcggcgtcgccggcgccgagagcatcttcgagcagctcgacgaagcggcggaggaagaccagggtaccgtcgagaaggagcgggtcagcgggcgcctggaagtgcgcaacctgagcttccgttatcccggaaccgacaagcaggtgctggatgacatcagtttcatcgccgagcccgggcagatgatcgccctggtcggccgttccggtagcggcaaatcgaccctggccaacctggttccgcgcttttaccagcacaatgacggcaagatcctccttgatggcgttgaagtcgaggattatcgcctgcgcaacctgcgccgccacatcgccctggtgacccagcaggtcacgctgttcaacgacagcgtggccaacaacatcgcctacggcgacctggctggcgcgccgcgcgaggaaatcgagcgggcggcgaaggctgccaacgccaaggagttcatcgacaacctgccgcaaggcttcgacaccgaggtcggcgagaatggcgtgctgctttccggcggccagcgccagcgtctggcgatcgcccgggcgctgctcaaggacgcgcccctgctgatcctcgacgaggcgacctcggcgctggacaccgagtcggagcggcatatccaggcggcgctggacgaagtgatgaaggggcgcaccaccctggtgatcgcccaccgcctgtcgaccatcgagaaggccgacctgatcctggtgatggaccaggggcagatcgtcgagcgcggcagccacgccgaactgctggcgcagaacggccattatgcgcggctgcacgcgatgggactggatgagcaggcgccggcgcctgtcggctga

SEQ ID NO: 4148 - DNA, 1317 bp, Pseudomonas aeruginosa
gtgagcaatccgcaagtccggccacaggccgaagaagaacccgcgttaatcgaggcggcccgcgaagcagccaacgaggtgctggaagccgccaccgaagtcgaacgctatatcgaaaaaggcaccccgcagttcatgcgcacctccctggcgctgttctccggcggtttcgccacctttgccctgctctactgcatccagccgatgatgccggtgctgtccaaggcgttttccatcagcgccgcggaaagcagcctggcattgtccgtcgccaccgccatgctcgcccttggcctgctggtcaccggcccgatctccgacgcgatcggccgcaagccggtgatggtcgtctcgctgctggccgccgcgctgttcaccctcggcagcgcggtgatgcccacctggcatggcgtgctgctgatgcgcgcgctggtcgggctgtccttgagcggcctggccgcggtggcgatgacctatctcagcgaagagatccatccgcagcacatcggcttgtcgatgggcctgtacatcggcggcaacgccatcggcgggatgagcggacgcctgatcagcggcgtcctggtcgatttcatctcctggcatgccgcactggcggtcctcggcggcctggccctggtcgccgcgctggtgttctggcgcgtgctgcccgagtcgaaacacttccggccggcaccgctgaagccggcgaccctgctcaacggctaccgcttgcacttccgcgacgccggactgccctggctgttcctgatcggcttcctgctgatgggcagcttcgtcaccctgttcaactacatcggctaccgcctgctggccgagccctaccacatgagccaggcggtggtcggcgtgctctcggtggtttacctctcgggcatctacagctcggcctgggtcggttcgctggccgacaagctggggcgacgcaaggtgctctgggcggtcatcctgctgatgctcggcggcctgctgctgaccctgttcgagccgatcccgctgatgctcgccggcctgctgctgttcaccttcggcttcttcggcgcgcactcggtggcgagcagctggatcgggcgccgcgccctgcgcgccaagggccaggcctcgtcgctctatctgttcagctactacgtcggctcgagcctggccggcaccctcggcggggtgttctggcattactacggctggaacggcatcgggctgttcatcggctcgctgctggtggtcgcggtattggtctcgctgcacctggcgcgcctgccggccctgcctggcaacaccctggcgcagcccgcccactga

SEQ ID NO: 4149 - DNA, 801 bp, Pseudomonas aeruginosa
atgaaaaagtatcttgcttcattggttctgggcgtctgcgccctggtgggcgtggcttcggtccaggcggccggcgcggtggaggacgcggtcaagcgcggcaccctgcgggtcggcatggacccgacctacatgccgttcgagatgaccaacaagcgtggccagatcatcggcttcgaagtcgacctgctcaaggccatggccaagtccatgggcgtcaagctggagctggtctccaccagctacgacggcatcatcccggcgctgctgaccgacaagttcgacatgatcggctcgggcatgaccctgacccaggagcgcaacctgcgcctgaacttctccgagcccttcatcgtggtcggccagaccctgctggtgcgcaaggaactggaaggcaagatcaagtcctacaaggacctgaacgatccgcagtacagcatcacctcgaagatcggcaccaccggtgagatcgttgcccgcaagctgatcagcaaggccaagtaccacggcttcgacaacgagccggaagcggtgatggacgtggtcaacggcaaggccgacgccttcatctacgactcgccctacaacgtggtggcggtgagcaagttcggcgccggcaagctggtctacctcgaccagccgttcacctacgagccgctggcgttcggcctgaagaaaggcgactacgacagcatcaatttcatcaacaacttcctccatcagatccgcgaagacggcacctatcagcgcatccacgacaagtggttcaagaacaccgagtggctgaaggaaatggaatga

SEQ ID NO: 4150 - DNA, 882 bp, Pseudomonas aeruginosa
atgatgcgtccattatgtttttttctcttgatttttttgttgtcgggaaatcctgtcatggcggctgaactacgaccttttatatgcgttaacgaaaaagaccacttgccatctctagatcctcaggctgatgcatggtatcgggaggcagtagctctcgccaagcccgataccctgcgtccctgggatcgtatcgtcgatctatacagtaaggcagttgagcgtggtcactggaaggctatgcataacttggcgagcctctatcgtaccggttggccaggcggtgtggagaaggatactcagaaagctctagatctctaccagaagatgatcgatttgaaggttcctcaaggtttctacgatatggcggcaatgatcggaaatcgtgctggcgtcaagaatcctgcgactgatggacttacctttctcgataaggctgcaagcttgggtaatccaccagcattaactgagttaggaaggctatatatatatgttgctggtcaggatgagttggggctgaaatatacgaactgtgctgcaggccagggctatgctcctgccaattacgagttggcgatgtactatcgtttggtggcacataactacccaaaggcggcaggctattaccttcttgctgcaagccaaggaaatgatgatgctgccttcttcatgtccggagtttttgataagactagtcccgatgttgacagaatgtggtacgcccccgatgagaagctgcacaaactatatgatggtatttacgatcaacttgccgctgatcctgatttgcgttttcccaacttgataaaggaccatcctctgcctcctcacccgacccagggctacgacgcagatcggcccgactggaaaccggggcagtga

SEQ ID NO: 4151 - DNA, 894 bp, Pseudomonas aeruginosa
atgtcccattcagatcagagccagcgtttccttttcgacgataccgacgtgcgcggcgagatggtcgatctcgagcgcagctacagcgaagtgctggccaaacatccctatccggaaccggtcgcgcagctgctcggggagatgctcgcggcggcctcgctgctctgcggcacgctcaagttcgacggcctgctggtattgcaggcgcgctccagcggcgcggttccgctgttgatggtggagtgttccagcgaccgccaggtgcgtggcctggcccgctattcggcggagtccatcggcgccgacgccggcatgcaggaactgatgcccgaaggcgtgctgaccctcaccgtggacccggtcaagggccagcgctaccaggggatcgtcgccctggagggggtgaacctggcggaatgcctgtccaactacttcgccagctcggaacagctgccgacccgtttctggctcaacgccaacggccgccgtgcccgcggcctgctgctgcagcagcttcccgccgaccgcctgaaggaccccgaggcccgcgaggccagttggcagcacctgaccaccctggccgacacgctgaccgccgaagagctgctggcgctggacaacgagaccgtcctgcaccgcctctaccacgaggaaaccgtgcgcctgttcgagccgcaaccgctggtcttccattgcagttgctcgcgggaacgttcggccaacgccctggtcagtctcgggcaggccgactgcgagcggctgctcgaggaggaagaaggctcgatcagcatcgactgccagttctgcaaccagcgctacctgttcgacgcctccgacgtcgcccagttgttcgctggcgctggcagccaggggccttccgagacccgccactga

SEQ ID NO: 4152 - DNA, 1320 bp, Pseudomonas aeruginosa
atgaaaacgccgctctggttcccgcaaagcttcttcgcccgcaccctctggctggtgctgatcgtcgtgctgttctccaaggcgctgaccctggtctacctgctgatgaacgaggacgtgatcgtcgaccgccagtacagccacggcgcggcgctgaccatccgcgcgttctgggctgccgacgaggagtcgcgcgcggccatcgccaaggcttccggcctgcgctgggtgccgagcagcgccgaccagcccggcgagcagcactggccgtacacagaaatcttccagcggcagatgcagatggagctggggccggacaccgagacccgcctgcgtatccaccagccgtcgcagctctgggtgcgcgcaccgagcctcggcgaaggctggctggcggtgccgctgtatccgcatcccttgcgtggccaacggatctggagcgtgctcggctggttcctcggcatcggcctgctctccaccgccgccgcctggatcttcgtccgccagctcagccagccgctcaagcgcctggtggtcgccgcccgccagttcggccaggggcgcagcgtgcgcctgccgctgggaccggagacgccgagtgaaatggccgaggtgtatcgcgccttcaaccagatggccgaggacatcgagcagggcgggcgcgaacgcgaattgatgttggccggtgtctcccacgacctgcgcaccccgctgacgcgcctgcgcctgtcgctggagttgctgccggagagcgaacgggagatggtcgaggacatgatccgcgacatcgaggacatggacgcgatcctcgaccagttcctcgccttcatccgcgacggccgcgacgagccggtggaggagggcgacctgaccgacctggtgcgcgaggtcgtggcgccgttcaaccagactcgcgagcaggtgcgcatggccttgcaaccggtaccggcgatgccgttgcggcgtgtgtcgatgaagcgtctgctgggcaacctgatcgacaatgccctgaaccacggcggcggttcggtggaggtggccagctacgtggccggcgaaagcgcggcgccctacgtggtgctgagcgtgctcgatcgcggccagggcatcgatcccgcggaagtggacagcatcttcaatcccttcatccgtggcgacaaggcgcgtggcggcaagggcaccggcctcggcctggcgatcgtcaagcgcatcgccgcccagcacggcggcagcgtcgaactgcgcaaccgcgatggcggcggcctcgaagcgcgggtctgcctgccgctggggttgctgctgccgcgcggcgcggcctga

SEQ ID NO: 4153 - DNA, 1269 bp, Pseudomonas aeruginosa
atgtccctgatcgccgaccacggcttcgccttcctcgtactcgcctgcctgttcggtttcttcatggcctggggcgtcggcgccaacgacgtcgccaacgccatgggcacttcggtggggtcgcgcgctctgaccatccgccaggcgatcctggtggccatggtcttcgagttctgcggtgcctatttcgctggtggcgaagtcaccgaaacgatcaggagcggcatcgtcgacccgcagtacatgacccccgacctgctggtcttcggcatgctctcggccttgctggccgccggggtctggctgttgctggcgacgatcaagggctggccggtgtcgaccacccactccatcgtcggcgcgatcatcggcttcgcctcggtcggtgtctcggtgcacgcggtgcactggggcgcgatcggcccgatcgtcgccagttgggtggtgacgccggtgctgtccgggctgctcgccttcgccctgttcaggagcgtgcagtggctggtactgcatgccgaggacccgttccgcagcgcgcgccgctacgtgccgctgtacatgttcctggcgggcttcatggtcgcgctgatgaccgtcggcaagggcctgaagcatgtcggcctggagctttccggcctccagacgctgggcctggcgttgctcgccggcggcctggtgatgggcctgggcatcgtcctgctgttgcgcatccgacccactggcggagccgatccgcgtggcggtttcgccagcgtcgagcgggtcttcgcggtgctgatgatcttcaccgcctgctccatggctttcgcccatggtgccaacgacgtggccaacgccatcggcccggtggcggcggtcgtcgcggtggtccaggccggcggcgacctggatctggtgagccgttcgccggtgccgtcctgggtactgctgctgggcgcggtgggcatcgtcatcggcctggctacctatggctaccgggtgatcgccaccatcggccgggagatcaccgagctgacccccagccgcggcttcgccgccgagctggcgaccgcctccacggtggttggcgcctcggccatcggcctgccggtatccaccacccataccctggtcggcgcggtgctcggcatcggcatggcgcgcggcatcggcgcgctcaacctgcgggtgatcggctcgatcttcctgtcctgggtagtgaccctaccggccggcgcggtgctggcgatcctgttcttcctggtcctgcgcgcgctgttcggcgcctga

SEQ ID NO: 4154 - DNA, 1365 bp, Pseudomonas aeruginosa
atgcagaaagaaaccgaaatcaaactccgcgtcagccgcgccaccctggaagccttgcaggagcacccgttgctgaagaagcgcaacaaatcgggctgggagcgccgcgaactgtacaaccagtactacgacacccccggccgcgagctggcccgggccaaggtcgcgctgcgcatgcgccgcgacggcgagcagtacatccagacgctgaagagccgcgggcagagcgtggccgggctgtccgaacgcaacgagtgggactggtacctggaaaagaacaagctcgacctgaagaaactcgacgacaagtgctggccggcggccctcaaggatctcgacaagaagcagctcaagccgatcttcagcaccgacttcgtccgccagcgcgccgagatcgcctggggccgcggcaaggccagggtagtcgtggaggcggcgctcgacctgggcaaggtggtcgccggcgacaaccaggaggaaatctgcgaactggagctggaactgcgccagggcgatgccgccgcgctgctggagctggccgcggaactggccgccgacctgccgctgatgccctgcgacatcagcaaggccgagcgcggctaccgcctgttcgacccgaacagctacgaggtcgatcccccggcccagaaactgctggcggaaaccccgctggacggtgccttcgccgccatcgcctggtacctgctcggcagcagccagcgactggccgaacagtatcgcttcaacggccactggcgcctgctggaggactggctgcaacacctgcagaacctgcgcaccctgctcggcagcctcggccaggcggtgccacgcgccagcagtcgcgagctgcgcgaagcgctggacgctctccttgccgactgggcgccgcgcatcgagcgcggccgtgacgacgagacgctacgccagcaggcgccgcaactgttccgcggcgaactcgacgagacccgctggggcctgttctccctgaatgcctcgcgctggctgctggccaaggcctggaccgagtcgcgcaacgagcgcggcaaccgccagggctctgccgcgctgggcaagtggctgctgcgtagccttgccgaagaagcccaggccacgccgctggcgcgcgcccaccagcatcccgagctgctccccgaccaagcgccgcgcctgcagcgcatgcttacctggttgcgcctggcgcgcggcgtgctcgacctgccggaagccgaccgcctctacggcgaactggccaagttgctggagctgctgcggcaacctgtcgatgccgagcgcctggctgcccgcgccgcgcaggcccatactgtgctgacgctcaaaccctggaaggcgctgatgaaataa

SEQ ID NO: 4155 - DNA, 1902 bp, Pseudomonas aeruginosa
atgcaccctccgaaaatcctgctgtggctgctgccgctggtctgcgcgttcagccttggagctcttgccgacacggccgtcgacccctcccaagccttgcatctgttgagttacctggcggccgactatccgccgaccgtggctgacggcaagatcgtcgaccccagcgaataccaggaacaggtggagttcgtcggcaacctgcaggcattggtcctgaccctgccgatgcgccccgagcgcgccgagctggagaggggcgtcgccagcctgcgccaggccatcgagcagcgcttgccgggaagggacgtggccctccaggcgcgcaacctcgaggcacgggtggcggatatctaccaggtggtgcagacccccgcgatcacccccgacccgagccgcgcggcgccgatctatgcccagcagtgcgcgatctgccatggcgatgcgggcaagggcgacggccccgccggcatcggcctggaaccgccgccagcgaacctcaccgatcgccagcgcctcgaccacctgagcctctacgacctgcgtaacgtcatcggcctgggcgtggccggcaccgacatgccggcgttcgccgaccagctcgacgaacgccagcgctgggacctggccagctatgtggccggcctgagcgccggcagtgcgcagccggacaaggcccatgcctacccgctggcgaccctggccacgcagactccggccgaagtcgccgagcacgacggcgaggccgctgcggagagcttccgcgccctgcgtgcgcatccgccgctggagcagcgcggtcctgggcagttgatcgactataccgccgccaccctggacaagagcttcgcggtctatcgcgaaggcgaccgcgaccaggcctacgacctgtcggtggcggcctacctggagggcttcgagctggtggaaagctcgctggacaacgtcgacgccgatttgcgccgctccaccgagaagcagctgatggcctaccgccaggcgttgcgcgatggcctcccggaaacccaggtggcgcaacagctggagctggccaagggcaagctggcagaggccgccaagcagcttggcggcgactcgctgagtttctccatcagtttcgtttccgccttgttgatcctgttgcgcgaaggggtagaggcaatcctggtgcttgccgccatcctcgccttcctgcgcaataccgggcaggaaagtgccgtgcgtggcgtgcacgtcggctgggggctggccttcgtcgccggtttcgccacctgggcgttggccgcctatgtgatcgatatcggcggtgcccagcgcgagctgatggagggcttcacctctctgttcgcctgcgtgatggtgctctggctcggcgtctggatgcacgaccgccgccacgcggcagcctggcaggactacatccgcagcagcctggtgggcggtggcggacgcttcggcttcgcagtgctggcgttcttctcggtctaccgcgagttgttcgaggtcatcctgttctacgaaaccctctggttgcaggccggaccggccgggcacaatgccgtgatcggcggcgcggcgaccgccgtggtcctgctgatcggcctggcctgggtgatcctgcgtggttcggcgaaactgccgctggggttgttcttcagcatcaacgcggcgttgctctgtgcgctctcggtggtgttcgccggacatggcgtcatcgccttgcaggaagccggggtgatcggcacccgtccggtgccgttcttcgacttcgactggctggggatcaaggccgacgcctattcgctgtcggcccaggccatggcgctggtggccatcgcgctgctctacggacgtagccggatcgtcgagcgccggcgtgcggcggccaacgcggccgactga

SEQ ID NO: 4156 - DNA, 1860 bp, Pseudomonas aeruginosa
atgggcctgcccctcgggctgggtaagcccaaccgactggtcaatgcgttgtaccagcggctgcggaccctgccggagcgccagctgacgctgtataccgcgctttccctggggcgtcccgccgctggcggcgacctgcaacggcgtttcctcgagcctttcgccgaacgggtcttcgccgactacccggagctggattacctgcacgccctgcgccgcgacgaactgccggcgaacatccgcgtcgaggagttctacctgcagcccggcagtctgctggacagcgcgccggcgcagcagcactacatcagttgcaactacagccacgtcgcccgcgacatcaacgccaagggcgtcaacgcggtggcgcaactggtggcgcggcatcccgagcggccgggcaagctgagcctggcctgcaacccggatatcaccctggacctcctgccgatgctggagaagcgtcgcgccgccggcgagaccatcgtcgccatcggcgtggtccacgatgacctgccctacctgccgggcgacgccgaggtcgaggagtcggtattcgacctgctgatcgacgcgccggcggaaagcagccggctgttctccacgccgaacatgccggtcaacctgcaggaccactgcatcggcctccacgccagcgcgctggtgcgcgacggcggcaccctgcagatcggcatcggctcgatgggcgacgcgctgaccgccgccctgctgctgcgccagcgcgacaacgccacctaccgagcgttgatcgacgagctgggtgtgcgtgcgcgctgggccgagacgatcgagcgcgacggtggcctggagccgttccgccgggggctttacggttgcagcgagatgttcgtgccgggtctgctggcgctggccgaggccggcgtgctgagccgccgggtctaccccgacgaagcgcggcagcgtgccgccgagcgcggtgaggcgccggtggagggcggggtgtggctgcacggcggctttttcctcggtccgttggcgttctaccggcgcctgcgcgagatgtcgctggaagagcgcgccgggatcggcatgaccggcatcggcttcgtcaacaacctgtaccgccaggaagagctgaagcgtctgcagcggcgcgacgcgcgcttcatcaacagcgccttcaccgtgaccctgctcggcgccggggtcgccgaccagctggaggacggccgggtgctcagtggcgtcggcgggcagtacaacttcgtcgcccaggctcacgagctggagggcgcacgttcgatcctgatgctgcgtagctggcgcgaatccggcggggaggtcagttcgaacatcgtctggcagtacgcccacaccaccattccccggcacttgcgtgacatggtggtgaccgagtacgggatcgccgacctgcgcggcaagaatgacgcggaagtgatcgccgcgctgctggccatcgccgactcgcgcttccagcaggcgctggccgagcaggcccagtcggccggcaagctgccgaaggatttcgtcctgcccgaacgctatcgcaacaataccccggagcgcctgcaggccttgcaccaggcccacgcagcggcgctgccggagtttcccctgggcagcgatttcgacgaggtcgagcaggacctgctgcgggcgctgggttggctcaagcgcaagctgaagctgagcgagatcctcgaactgggcaaggcgaccctggatgcgccggagccagaagcctacccggcgcatctgcggcgcatggacctggacgatccgcaggggcttcgcgaggaactctaccagcgcttgctgctggccggcctgcgagccagccaggaagagcggggctga

SEQ ID NO: 4157 - DNA, 237 bp, Pseudomonas aeruginosa
atgtctagagtctgtcaagtaaccggtaagggtccggttaccgggaataacatttcccacgcacacaacaaaacccgccgccgtttcctgccgaacctgcagcaccaccgtttctgggtcgagtccgagaagcgcttcgtacgtctgcgcgtttccgccaagggcatgcgtatcatcgacaagcgtggcatcgaggccgtcctggctgacctgcgtgcccgcggcgaaaaattctaa

SEQ ID NO: 4158 - DNA, 939 bp, Pseudomonas aeruginosa
atgaagacgacgattcgccagctgggctgcgccctgctgatcctggccagtggcgccgccctggccgccgaacccgagcagtgccgcacggtgcgcctgggcacggtgaactggaccgacgtggtcgccagcagcgccgtggccgaagccttgctcgacggcctgggctaccaggtgaagcagaccagcgcctcgcaacagatcgtcctggccggcctggccgacaagcagctggacctgttcctcggctactggcaaccgaccatgcagccggtcgccaggccttacctggacaaaggccggatcgaagtgatcgagccgccgaccctggccgacgcgcagtccacctatgcggtgccgagctacgtcgccgagggcgggctgaagaccttcgccgacatcgcccgcttcaaggacaagcttggcggccgcatctacgctatcgagccgggcagcggctcgaaccgcatcacccggaagatgatcgacgacaaccgtttcggcctgaagggcttccagctggtggagtccagcgaggccgggatgctcacggcggtgaagcgggcgatcaagcgcaagcagtgggtggtgttcttcggctggaagccgcatccgatgaacctgcagatcgacatgacctacctcaccggcagcgaggatgtgttcggtcccgacgaaggcgcggccaccgtctccaccatgaccgccgccggctaccaggcgcagtgcggcaacgtcgcccggctgctgcacaacctgcgcttcagcagcgcccaggtcagccaggtgatggcgccgatcctcgatcgcacccagcccctcgacgccgcgcggcagtggctgaaggccaaccccgagccgctgaaggcctggctggatggcgtgagcaccttcgacggcaaggacggcctggccgcgctccaggcctcgctgaagtaa

SEQ ID NO: 4159 - DNA, 1353 bp, Pseudomonas aeruginosa
atgaccgacctgaatcgcaccgccttgccctcgcgcacggacgggaccgtggaaaagaccgacaccctcgtcgtcggcgccggccaggccggcgtggcgatgagcgagcacctgagccggctcggcgtgccgcacctggtcctggagcgcaaccgcatcgccgaggcctggcgcagcggacgctgggattcgctggtggccaacggcccggcctggcacgaccgcttcccgggaatggaattcgacatcgatcccgacggtttccccggcaaggaccaggtggcggcctatttcgaggcctacgcgaagagattcgacgcgccgatccgtaccggcgtcgaggtgaggaaggtggtgcgcaatgtcggccgccccggcttcaccgtggacacctccgcagggaccatcgaggccaaccgcgtggtcgccgccactggcccgttccagcgtccggtgatcccgccgatcgcgccgcgcgacgagcgtatccggcagatccactcggcccactactacaacccgcagcagctgcccgaaggtgcggtactggtggtcggcgccggttcgtcgggggtacagatcgccgacgagctgcaacgtgccgggcgccaggtctacctctcggtgggcgctcatgaccgtccgccgcgttcctaccgcaaccgcgacttctgctggtggctgggcgtgctcggcgaatgggatgcggaagtcgccaagcccgggcgcgagcatgtgaccatcgccgtgagcggtgcccgcggcggacataccgtggacttccgcgccctggcgcatcagggcgtgaccctggtcggactgaccgaatccttcgtcgacggcgtcgcgaccttccggccggacctggcggagaacctggcgcgcggcgacgagaactacctggcgttgctcgacgccgccgacgcctatatcgcccgcaacggccttgacctgccggaagagcccgaggcgcgccgccggctgccggacccgcagtgcgtgaccgatccgatcctcgaactggacctggccgaggccggggtgggcagcatcatctgggccaccggctatgccgtcgacttcggctggctgcaggtcgatgccttcgaccgcgacggcaagccgcgccaccagcgtggcgtgtccagcgaacccggcgtgtatttcatcggcctgccctggctgtcgcggcgcggctcctcgttcatctggggcgtctggcacgacgcgcgccatgtcgccgaccacatcgccatccagcgcaagtacctcgcataccgcgacgctgcccagcgccaggaacaggaccgcgcctcgcaagctccgcaaaccagcctccaggaagtcagctga

SEQ ID NO: 4160 - DNA, 1416 bp, Pseudomonas aeruginosa
gtgatcaagaagatcctgatcgccaaccgcggcgagatcgccgtccgcatcgtgcgcgcctgcgccgagatgggcatccgctcggtggccgtctactccgaggccgatcgccacgcgctgcacgtcaagcgcgccgacgaagcccacagcatcggcgcggacccgctggccggctacctcaacccgcgcgccctggtgaacctggcggtggaaagcggctgcgacgccctgcaccccggctatggcttcctctcggaaaatgccgagctggcggaaatctgcgccgagcgcggtatcaagttcatcggcccgtcggcgcaagtgatccgccgcatgggcgacaagaccgaagcccgccgcagcatgatcgccgccggcgtgccctgcacccccggcaccgaaggcaacgtcgccgatctcgccgaggccctgcgcgaagccgagcggatcggctacccggtgatgctcaaggccacctccggcggcggcggccgtggcatccgtcgctgcaacagccgcgaggagctggaacaggcgttcccgcgggtgatctccgaggcgaccaaggccttcggcagcgccgaagtattcctcgagaagtgcatcgtcaatcccaagcacatcgaggcgcagatcctcgccgattccttcggcaacaccgtgcacctgttcgagcgcgactgctcgatccagcgccgcaaccagaagctcatcgagatcgccccgagcccgcagctcacccccgagcagcgcgcctatatcggcgacctggcggtgcgcgcggccaaggcggtgggctacgagaacgccggcaccgtggagttcctgctcgccgacggcgaggtgtacttcatggagatgaacacccgggtccaggtggagcacaccatcaccgaggaaatcaccggcatcgacgtggtccgcgagcagatccgcatcgcttccgggctggagctgtcggtcaagcaggacgacatcgtccatcgcggctacgccctgcagttccgcatcaacgccgaggacccgaagaacaacttcctgccctcgttcggcaagatcacccgctactacgcccccggcggccccggcgtacgtaccgacacggcgatctacaccggctacaccatcccgccgtactacgactcgatgtgcctgaagctgatcgtctgggcgctgacctgggaagaggccctcgatcgcggactgcgtgccctcgacgacatgcgcgtgcaaggggtcaagaccaccgcgccgtactaccaggaaatcctccgcaacccggaattccgcagcggccagttcaacaccagcttcgtcgaaagccacccggaactgacccagtactcgatcaagcgcaacccgtcgcacctggccatcgccatcgccaccgccatcgcggcccacgccggcctgtaa

SEQ ID NO: 4161 - DNA, 2187 bp, Pseudomonas aeruginosa
atgaacgacgacctctccctcctgctgaactccctcaacgacccgcagcgccaggccgtggccgcgccgctgggccgccaactggtcctcgccggcgccggctcgggcaagacccgcgtgctggtgcaccggatcgcctggctgatccaggtcgagcacgcctcgccctacagcatcctgtcggtgaccttcaccaacaaggcggcggcggagatgcgccaccgcatcgagcagttgctcgggatcaatccggcgggcatgtgggtcggcaccttccacggcctcgcccatcgcctgctgcgcgcgcactggcgcgaggccgggctgagcgagaacttccagatcctcgacagcgacgaccagcaacgcctggtcaagcgggtgatccgcgaactcggcctcgacgagcagcgctggccggcgcgccaggcccagtggttcatcaacgggcagaaggacgagggcctgcggccgcaacacatccagcccggcggcgacctgttcctcgccaccatgctgaagatctacgaagcctacgaggcggcctgcgcccgcgccggggtgatcgacttctccgagctgctgctgcgcgccctggacctctggcgcgaccatcccggcgtgctcgagcactaccagcggcgcttccgccatatcctggtggacgagttccaggacaccaacgccgtgcaatacgcctggctgcggattctcgccaagggcggcgacagcctgatggtggtcggcgacgacgaccagtcgatctacggctggcgtggcgcacggatcgagaacatccagcagttcagcgacgacttcgccgatgccgaggtgatccgcctggagcagaactaccgttccaccgcgtcgatcctcaaggccgccaacgccctgatcgccaacaaccagggacgcctgggcaaggagttgtggaccgacggcgaggacggcgagtcgctgagcctgtacgccgcgttcaacgagcacgacgaggcgcgctacgtggtcgagtcgatcgagagcgcgctcaagggcggcctggcgcgcagcgagatcgccatcctctaccgctccaacgcccagtcgcgggtgctggaggaagccctgctgcgggagaagattccctaccgcatctacggcggccagcgcttcttcgagcgtgccgagatcaagaacgccatggcctacctgcgcctgctcgacggccgcggcaacgacgcggcgctggaacgggtggtcaacgtgccggcacgcggcatcggcgagaagaccgtggagagcatccgcgaattcgcccgcggcaacgatgtgtcgatgtgggaggcgatccgcctgatgatcgccaacaaggtcctgcccggccgcgccgccagcgccctgaccggcttcgtcgagctgatcgagaatctttcggcgaaggtcatggacatgccgctgcacctgatgacccagacggtgatcgagcagtccggactgatcagctaccacaaggaagaaaaaggcgagaaaggccaggcccgggtggagaacctcgaggaactggtcagcgccgcccgcgccttcgagaacagcgaggaagaggaagacctcaccccgctgcaggccttcctcagccacgcctccctggaggccggggaaacccaggccgacgcccacgaggacagtgtccagctgatgaccctgcacagcgccaagggcctggagttcccgctggtgttcctggtcggcatggaggaagggctgttcccgcacaagatgagcctggaggaatccggccgcctggaagaggaacgccgcctggcctacgtcggcgtcacccgcgccatgcagcgactggtcctgacctacgcggagacccgccggctctacggtagcgagacctacaacaaggtttcgcgcttcatccgcgagatcccgccggcgctgatccaggaagtgcgcctgtccaataccgtcagccgcccctacggcggcacctcgcgcagtgccggcggcaacctcttcagcggcgccggggtgccggagacgcccttctccctcggccagcgggtgcgccacgcgctgttcggcgaagggactatcctcaacttcgaaggcgccggcgcccaggcccgggtgcaggtgaatttcgagagcgaaggcagcaagtggctgatgctcggctacgccaagctggaagccctgtag

SEQ ID NO: 4162 - DNA, 606 bp, Pseudomonas aeruginosa
atgaacaaacttctcgtgagtctgctgttgaccctgggtctgaccggccttgcccatgccgctggcgatgccgccgcgggccaggcgaaagccgcggtatgcggcgcctgtcacggtgcggatggcaacagcccggcgccgaacttcccgaaactggccggccagggcgagcgttacctgctcaagcagatgcatgacatcaaggacggcaagcgtaccgtgctggaaatgaccggcctgctgaccaacctcagcgaccaggacctggccgacatcgccgcctacttcgccagccagaagatgagcgtcggcatggccgatccgaacctggtggcccagggcgaagcgctgttccgcggcggcaagatcgccgaaggcatgccggcctgcaccggttgccattccccgagcggcgtcggcatcgcaaccgccggtttcccgcacctgggcggccagcacgcgacctacgtggccaagcagctgaccgacttccgcgaaggcacccgcaccaacgacggcgacaccaagatcatgcagtccatcgccgccaagctgtcgaacaaggacatcgccgcgatttccagctacatccagggtctgcactga

SEQ ID NO: 4163 - DNA, 2742 bp, Pseudomonas aeruginosa
atgagccaagcgcccctcgtcctggtggacggttcctcgtacctgtaccgcgccttccatgccctgccgccgctgaccacctcgaccggcaagcccaccggtgcggtgaagggcgtgctgaacatgctcctgagcctgcgcaagcagtacccggacagcccgttcgcggtggtcttcgacgccaagggcccgaccttccgcgacgagctgttcgccgagtacaaggccaaccggccgtcgatgcccgacgacctgcgggtccaggtcgagccgctgcatgccagcgtccgcgccctcggcctgccgctgctgtgcgtggagggggtcgaggccgacgacgtgatcggcaccctggcgcgcagcagcgccgcggctgaccgcccggtggtgatttccaccggcgacaaggacatggcgcaactggtcgacgggcacattacgctggtcaacaccatgaccggtagccgcctcgacgtggatggcgtgaaagagaaattcggcgtcggtcctgagctgatcatcgatttcctcgccctgatgggcgacaaggtcgacaacatccccggcgttccgggtgtcggcgagaaaaccgcgctgggcctgctgaccggtgtcggtggcggcctggaggtgctctacgccagcctggacaaggtgcccgagctaccgatccgcggcgccaagggcttgccggcgaagctcgaggaaaatcgcgagcaggcgttcctgtcctatcaactggcgaccatcaagaccgacgtcgaactggacgtggagatcgacaagctgtatcccggcgagccgcagcgcgaagcgctgatcgccctgtaccgcgagctggagttcaagaactggctggacgacctcctgcgcgaggccaaggaggccggcgagaacggcgaggcggaaacgcctatccaggccgaggtcgactacgacgtggtgctcgaccaggccggattcgacgcctggctgaagaagctggaggaggccgagctgatcgccttcgataccgagaccaccagcatcgacgcccagcaggcgcaggtggtgggggtgtccttcgccgtgaaggagggcgaggccgcctacgtgccgctggcccacagctacatgggcgttccggagcaactggatcgtgacgcggtgctgcgtgcgttgaaaccgctgctggaggatccgaagaagctcaaggtcggccagcatgccaagtacgacatcaatgtcctggccaatgccagcacccccatcgcgctgcggggcgtagcctacgacaccatgctcgagtcctatgtgctggactccaccgccactcgccacgacatggacagcctggccctgaagtacctcggccacagcaccatccgtttcgaggacatcgccggcaagggcgccaagcaactgaccttcgaccagatcgccatcgaacaggccgggccctatgcggcggaggacgccgacgtgaccctgcgcctgcaccaggccctgtggcagaagctggaggcgatcccgtccctggccagggtcctgaccgacatcgagatgccgctggtaccggtgctggcgcggatcgagcgcaacggcgcgctggtcgacgccaacctgctgggcatccagagccgcgaactgggcgagaagatggtcgccctggagcgccaggcatacgacctggcagggcaggaattcaacctcggctcgcccaagcagctcggcgcgatcctctacgacaagctcggcctgccggttctgagcaagaccgcgaccggccagccgtccaccgccgaggcagtgctcgccgaactggccgagcaggacttcgagctgcccaaggtgatcatgcagtaccgctccatgagcaagctcaagagcacctacaccgaccgcctgcccgagcagatcaacccgcgtaccggacgcatccatacctcataccaccaggcggtggcggctaccgggcggctgtcgtcgagcgacccgaacctgcagaacatcccgatccgtaccgcggagggccggcgcatccgccaggcgttcgtcgcgccgcagggctacaagctattggccgcggactactcgcagatcgagctgcggatcatggcccacctggccaaggacgatggcctgctggatgccttccgccacgacctggacgtacaccgcgccaccgcggcggaagtcttcggcgtgccgctggaagacgtcagcggcgaccagcgacgcagcgccaaggcgatcaacttcggattgatctacggcatgagcgccttcggcctggccaagcagatcggcgtcgagcgcaaggaggcccaggcctacatcgaccgttacttcgcccgctaccccggcgtcctggcgtacatggagcggacccgcgcccaggccgcggagcagggcttcgtcgaaaccctgttcggccgtcgcctgtacctgccggagatccattcgaagaacggtgccatgcgcaaggccgccgagcgcaccgcgatcaacgcgccgatgcagggcaccgcggcggacatcatgaagcgcgccatggtcgctgtggataactggctgcaggaaagcggcctcgatgcccgggtgatcctccaggtgcacgacgaactggtgctggaagtgcgcgaggacctggtcgagcaggtgtgcgagggaatccgcccgctgatgagcggagcggcgaccctggacgtaccgctggtggtcgaggcgggtgtcggttcgaactgggacgaagcccactga

SEQ ID NO: 4164 - DNA, 654 bp, Pseudomonas aeruginosa
atgttcagcctgccccaccactcgccgcgcgacctgccattcggccgccggcagaccgccatcctgttcgtcgacatgcagcgtgcctgggtcgagccggggcgcgacccgcacgtcgatccgcaggcagccggttacttctacgagcgcgtgcagaaccaggtgatccccaaccagcagcgcctgctcagggccatgcgcgcagtggacgagaacgtcctgcacaccgtcatcgagagcctcaccgccgatggtcgcgaccgctcgctggatcacaagctgtcggagatgcacctgcccaagggcagcccggacgccagggtgatcgacgccctggagccgaccgccaacgagatcgtgctgccgaagacttcttccggcgttttcaactccaccgccatcgactacgtactgcgcaacctcggcacccgccacctgatcgtctgcggggtggtcaccgaccagtgcgtggacatggccgtgcgcgatgccgccgaccgcggttacctggtcaccctggtcgaggatgcctgcgccacccataccccggaacgccaccaggcctgcctggaagcgatcaagggctactgctggatcagcgacaccgagaccgtcctgcaacgcatcgccgccctcggccggagcaacctgtga

SEQ ID NO: 4165 - DNA, 1368 bp, Pseudomonas aeruginosa
atgcaagccgccaccgaaaccatcgtcgcgatcgctaccgcccagggccgcggcggcgtgggaatcgtccgcgtctccggacctctcgccggacagatggccgtggccgtgagcggacgccagctgaaagcccggcatgcgcattacggaccgttcctcgatgccggtgggcaggtgatcgacgaaggcctgtcactgtatttccccggcccgaactcgttcaccggcgaagacgtactcgaactacaggggcacggcggccccgtggtactcgacctgctggtgcagcgttgtctggaactgggcgcccgccaggcgcgaccgggcgagttcagcgagcgcgcgttcctcaacgacaagctcgacctggcccaggccgaagccatcgccgatctgatcgaggccagctcggagcaggccgcgcgcaatgcattgcgttccctgcagggcgaattctcgcgccgggtacatgcattgaccgagcaactgatttccctgcgcatctatgtcgaagccgccatcgacttccccgaggaagaaatcgacttcctcgccgatggccatgtactggggcttctggaaaaagtacgcacagaattatccacagtgcagcgcgaagcttcccaaggcgccctgctgcgcgacggcatgaccgtggtcatcgccggacgaccgaatgccggcaagtccagcctgctgaatgccctggccggtcgcgaggcggccatcgtcacggacatagccggcaccacccgcgatgtactgcgcgaacatatccacatcgatggcatgcccctgcatgtggtggacaccgcaggcctgcgggataccgaggaccatgtggaaaagatcggcgtggaacgtgcgctgaaagccatcggcgaagccgatcgcgtgctgctggtggtggacgccaccgccccggaagcagcggacccgttttccctatggccggagtttctcgaccagcgaccggaaccgggcaaggtcaccctgatccgcaacaaggcggatttgtccacagagtccattggcctcgaggaaagcgcggacggccacgtcaccatcaccctctcggcgcgcaccggcgccggcctggagctgctgcgcgaacacctgaaggcctgcatgggcttcgaacagaccgcggaaagcggtttcagcgcccgccggcgccacttggaagcgctacgcctggcagggcaggcgctggagcatggccacagccaacttatccacaatggcgccggcgaactgctggccgaggatctgcgccaggcccagcagcacctgggcgaaatcaccggcgcattcacccccgacgacctgctgggtcgcatcttctcgagtttctgcatcggcaagtaa

SEQ ID NO: 4166 - DNA, 348 bp, Staphylococcus aureus
ccatatgacatcattggtaaagaagcgttatacgatatgattgattatttttacacccttgtagaaaaagatgaacgacttaatcacctgtttccaggggattttgcagaaacaagtcgtaaacaaaagcaatttttaacacagtttttgggcggtccaaacatttataccgaagaacacggacatcctatgctaagaaaaagacatatggcgtttactatcactgaatttgaaagagatgcatggttagaaaatatgcagacagcaattaatcgcgctgcgtttccacaaggtgttggagattatttatttgagcgcttaagattaactgctaattatatggtgaat

SEQ ID NO: 4167 - DNA, 1914 bp, Staphylococcus aureus
atgatacttttacaactcaatcatatatcaaaatcgttcgatggtgaagatatatttactgatgttgattttgaagtaaaaactggtgaacgaattggtatcgtaggaagaaatggcgccggtaaatcaacattgatgaaaattatagctggtgtagaaaactatgattctggaaatgtgtcaaaaattaaggacttaaggctaggttatttaactcaacaaatgactttcaattctaatgcaacagtttttgaagaaatgtcaaaaccatttgaacatattaaacgaatggaaagcttaatcaaagaagaaacagattggttatcaaaacatgcaaatgattacgatagtgatacatataaaacacatatgtcccgttatgaatctttatcgaatcaatttgaacaattagaaggatatcaatatgaaagtaaaattaaaacagtacttcacgggttaaattttagtgaagaagatttcaataaacctatcaatgattttagcggtggccaaaaaacacgtttatctttagctcaaatgctattaaatgaacctgatttattacttttagatgaacctactaaccacttagatttagaaacgacaaagtggcttgaagattatctacgttattttaaaggtgcaatcgtcatcatcagccatgatcgttactttttagataaaatagttactcaaatttatgatgtggctttaggtgatgtcaaacgctatgttggtaattacgaggaatttatacagcaacgggatttatattatcaaaaacgaatgcaagaatatgaaagtcaacaagcagaaataaaacgattagaaacttttgttgagaaaaatattacccgtgcttcaacaagtggaatggcaaaaagtagacgtaagattttagaaaaaatggaacgcattgataaaccaatgttagatgccaaaagtgcaaatattcaatttggttttgaccggaatacaggtaatgatgtcatgcatgtaaaaaatttagaaattggttatcaaactgcaattaccaaacctatcagtatagaggtctctaaaggcgatcatatagcaatcattgggccaaatggtattggaaaatcgaccttaattaaaactattgctaatcaacaaaaagcacttaatggcgatattactttcggcgcaaatttacaaattggttattatgatcaaaagcaagcagaatttaaatctagtaaaacgattttagattatgtgtgggatcaatatccgttaatgaatgaaaaagatattcgtgcagttcttggacgtttcttatttgtacaagacgatgttaaaaagataattaatgatttatctggtggtgaaaaagcacggttacaactagcactacttatgttgcagcgtgacaatgtacttattttagatgaacctaccaaccacctcgatatagattcaaaagaaatgttagagcaagcactccaacattttgaaggaacaatactatttgtttcccatgatcgttactttattaaccaattagcaaacaaggtatttgatttaacaattgatggcggaaagatgtatttaggagattatcaatattacattgaaaaagttgaggaagcggaagcgttgaaagcgcaccaagaagaacagtcagttaacgtacaagcacatgaaaagtctatggaacaatcgtcgtatcataaccaaaaagaacaaagacgtgaacaacgtaaacttgaacgacaaatatccgagtgtgaaaatgaaatagaaactttagagactactatcttacaaatagacgagcaattaacccaaccagaagtttataacaatccacaaaaagcaaacgaattagctatccaaaaacaagatagcgaacaaaaattagaacacgctatgtctaaatgggaagaatta

SEQ ID NO: 4168 - DNA, 2073 bp, Staphylococcus aureus
ttgttaaaaagactaaaagaaaaatcaaatgatgaaatcgttcaaaatacaattaacaagagaattaactttatatttggtgtgattgtatttatttttgcagtactagtactacgtttaggttatttacaaatcgcacaaggctcacattataaacaaattataaaaaatgatgaaaacattacagtgaatgagtctgtgccaagaggtcgtattttagacagaaatgggaaagttttagttgataatgcttctaaaatggctattacatatactaggggtcgaaaaacaacacaatcggaaatgttggatacggctgaaaagttatcgaagctaatcaagatggatactaagaagattacagaacgtgataagaaagatttctggattcagttgcatcctaaaaaagcaaaagcaatgatgacaaaagaacaagctatgttagcagatggaagtattaaacaagatcaatatgataaacaactgttatcgaaaatcggaaaatcacaattagatgaattgtcttctaaagatttacaagttttagccatttttcgagagatgaatgcaggaacagttttagatccacaaatgataaaaaatgaagatgtcagtgaaaaagagtatgcagcagtttctcagcaactttccaaattaccaggtgttaacacgtctatggattgggatagaaaatatccatatggcgacactttaagaggtatattcggagatgtatcgacacctgctgaaggtattccaaaagaattgacagaacattacttatccaaaggatattcacgcaatgatcgtgttggaaaatcttacctagaatatcaatatgaagatgtattgcgtggtaagaagaaagaaatgaaatacacaacggacaaatctggtaaagttacatcttcagaagtgttaaatcctggcgctcgcggtcaagatttgaaattaacgatcgatatagatcttcaaaaagaagtagaagcattattagataaacaaattaagaagcttcgcagccaaggtgcaaaagatatggataatgctatgatggttgtacaaaatcctaaaaatggagacattcttgcgcttgccggaaagcagattaataagagtggtaaaatgactgattatgacattggtacgtttacttctcaatttgcggttggatcttctgtaaaaggtggaacattattagctggttatcagaataaagctatcaaagttggagaaacaatggtcgatgaaccattacatttccaaggtggtttgacaaaacgatcatactttaataaaaacgggcatgtatctattaatgataagcaagctttgatgcattcatcaaacgtatatatgtttaaaacagcattaaaattagcgggagacccttattattctggcatggctttaccttcagacataagttcacctgcccaaaagctaagaagaggattaaatcaagtaggcttaggtgtgaaaacaggtatagatttaccaaatgaaacaagaggtcaaatcgaaccattaacaaataatccaggtaattatctagatttatcaattggtcaatatgatacctatacaccattacaattatcacaatatgtttcaactatagcgaatgatggttatagaatacagccacacattggattaacgattcatgaatcaactaataaagatgaggttggtccactcaagaagaaaattaatggcaccgtcttgaacaaggttaataatactgaaaaagaaatcaaacaaattcaagaaggattcaaaatggcatttaatgataaagatggtactggatatgttagttttaaagatacagtagtacctactgctggtaaaacgggtactgctgaagtgttccaaaacggagagccaagagttaactctacttatataggatacgcgccaattgatgatccaaaattagcgttttcaattgtatatacaaatcagcctgtaccaccaccatggttaacaggtggagacttaggtagagatgtaattaactactactttaagcagttaggtaaagatgataaaaataaagacaaagacaaa

SEQ ID NO: 4169 - DNA, 975 bp, Staphylococcus aureus
atgaaggaaaatttttggagtgaattaccacgtccattttttattttggcgccaatggaagacgttacagatatcgtctttcgacacgttgtaagtgaagcagctagaccggatgtatttttcactgaatttacaaataccgagagcttttgccaccctgaaggcatacatagtgtgcgcggtcgcttaacttttagcgaagatgaacagccgatggtcgctcacatatggggagataagccagaacagttccgtgaaacgagtattcaattagctaaaatgggctttaaaggcatagacttaaatatgggatgtcctgtagcaaatgttgctaaaaagggtaagggttccggcttaatcttaagacctgacgtcgctgccgaaattattcaagcaactaaagcaggtgggcttccggtaagtgttaaaacacgccttggctactatgaaatcgatgaatggaaagattggttgaagcatgtcttcgaacaagacattgcaaatttatctattcatcttcgtacacgtaaagaaatgagtaaagtagatgcacattgggaattaatcgaagctattaaaaatttacgtgacgaaattgcaccaaatacattgctaacaattaacggtgacattcccgatagaaaaacaggacttgaatttgcagaaaaatatggcattgatggcgtcatgattggtagaggcattttccataatccattcgcttttgaaaaagaaccacgcgaacacacaagcaaggaactattagatctattgagattgcatttatcattgtgtaacaaatatgaaaaagatgaaatacgacaattcaagagcttgcgtagattctttaaaatctatgtgcgtggcataagaggcgctagtgaacgtcgccatcaattgatgaacacacaatcaattgcggaagctcgagcactactagatgaatttgaggcccagatggacgaagacgttaaa

SEQ ID NO: 4170 - DNA, 882 bp, Staphylococcus aureus
caagctttacaacaacttatcccaaatgaaaaaattaaagttgatgaacctttaaaacgatacacttatactaaaacaggtggtaatgcggacttttatattacccctactaaaaatgaagaagtacaagcagttgttaaatatgcctatcaaaatgagattcctgttacatatttaggaaatggctcaaatattattatccgtgaaggtggtattcgtggcattgtaattagtttattatcactagatcatatcgaagtatctgatgatgcgataatagccggtagcggcgctgcaattattgatgtctcacgtgttgctcgtgattacgcacttactggccttgaatttgcatgtggtattccaggttcaattggtggtgctgtgtatatgaatgctggcgcttatggtggcgaagttaaagattgtatagactatgcgctttgcgtaaacgaacaaggctcgttaattaaacttacagcaaaagaattagaattagattatcgtaatagcattattcaaaaagaacacttagttgtattagaagctgcatttactttagctcctggtaaaatgactgaaatacaagctaaaatggatgatttaacagaacgtagagaatctaaacaacctttagagtatccttcatgtggtagtgtattccaaagaccgcctggtcattttgcaggtaaattgatacaagattctaatttgcaaggtcaccgtattggaggcgttgaagtttcaactaaacacgctggttttatggtaaatgtagacaatggaactgctacagattatgaaaaccttattcattatgtacaaaagaccgtcaaagaaaaatttggcattgaattaaatcgtgaagttcgcattattggt

SEQ ID NO: 4171 - DNA, 1329 bp, Staphylococcus aureus
atgactcatatgcaattagagtttagtataacgttagaatttttcggtgaacacgaattaaaacaacatcaagaaattgttaaatcaattcacaaaacaattcatgaaggtactggtgcaggtagtgacttcttaggctgggttgatttaccagttgattacgacaaagaagaattttcaagaattgttgaagcatcaaaacgcattaaagaaaattctgatgttttagtagtcatcggtattggtggttcttatttaggtgcacgtgcagcaatcgaaatgttaacgtcatcatttagaaacagcaatgaataccctgaaattgtatttgttggtaatcacttatcatcaacatacactaaagagttagttgattatttagcagacaaagatttctctgtaaacgttatttctaaatctggtacaactacagaaccagcagttgcatttagattgttcaaacaattagttgaagaaagatacggtaaagaagaagcacaaaaacgtatatttgcaacaacggataaagaaaaaggtgctttaaaacagttggctacaaacgaaggttatgaaacatttatcgtacctgatgatgtaggtggaagatattctgttttaacagcagtaggattattaccaattgcaacagctggaattaacatcgaagctatgatgattggtgctgcaaaagcacgtgaagaattatcttcagataaattagaagaaaacattgcataccaatatgcgacaattcgaaacattttatatgcaaaaggttatacaacagaaatgttgattaactatgaaccatctatgcaatactttaatgaatggtggaaacaattatttggtgaatcagaaggtaaagacttcaaaggtatctatccttcaagtgccaactacacaactgatttacattctttaggtcaatatgtacaagaaggccgtcgtttcttattcgaaacagttgtaaaagtaaatcatcctaaatatgatattactattgaaaaagatagtgatgatctagacggattaaattatttagctggtaaaacaatcgacgaagttaacacaaaagcattcgaaggtacattattagcgcatactgatggtggtgttcctaacatggtagtgaacattccacaattagatgaagaaactttcggttatgtcgtatacttcttcgaacttgcttgtgcaatgagtggataccaattaggcgtaaatccatttaaccaacctggtgtagaagcatataaacaaaacatgttcgcattattaggtaaacctggttttgaagacttgaaaaaagaattagaagagcgttta

SEQ ID NO: 4172 - DNA, 969 bp, Staphylococcus aureus
atgaaatttgatagacatagaagattgagatcatcagcgacaatgagagacatggttagagagaatcatgtaagaaaagaagatttaatatatccaatttttgtagttgaaaaagatgatgtgaaaaaagaaattaagtcattgccaggtgtataccaaatcagtttgaatttacttgaaagtgaattaaaagaagcttatgacttaggtatacgtgccattatgtttttcggtgttccaaactcaaaagatgatataggtactggtgcatacattcacgatggtgttattcaacaggcaacacgtattgctaaaaaaatgtatgatgacttattaattgttgcagacacttgtttgtgtgaatatactgatcatggtcattgtggtgtgattgatgaccatacacatgacgttgacaatgataaatcattgccactacttgttaaaacagcaatttctcaagtggaagctggagctgatattattgcaccaagtaatatgatggatggttttgttgctgaaattcgtcgtggactagatgaagccggctattacaatattcctataatgagttatggtgtcaagtatgcatctagtttctttggaccttttagagatgcagcagattcagcgccatcatttggtgatagaaaaacgtatcagatggaccctgctaaccgtttggaagcacttcgtgaattagaaagtgatcttaaagaagggtgcgacatgatgattgttaaacctgctctaagttatttagacatagttcgagacgttaaaaatcatacgaatgttccagttgttgcatataatgtgagtggagaatatagtatgactaaagcagcggcacaaaatggttggatagatgaagaacgtgtcgttatggaacaaatggtttcaatgaaacgtgcaggtgctgatatgattattacgtattttgcaaaggacatttgtcgctatttagat

SEQ ID NO: 4173 - DNA, 768 bp, Staphylococcus aureus
atgttaaatcttgaaaacaaaacatatgtcatcatgggaatcgctaataagcgtagtattgcttttggtgtcgctaaagttttagatcaattaggtgctaaattagtatttacttaccgtaaagaacgtagccgtaaagagcttgaaaaattattagaacaattaaatcaaccagaagcgcacttatatcaaattgatgttcaaagcgatgaagaagttattaatggttttgagcaaattggtaaagatgttggcaatatcgatggtgtatatcattcaatcgcatttgctaatatggaagatttacgcggacgtttttctgaaacttcacgtgaaggtttcttgttagcccaagacattagttcttactcactaactatcgttgctcatgaagctaaaaaattaatgccagaaggtggtagcattgttgcaacaacatatttaggtggcgaattcgcagttcaaaactacaatgtgatgggtgttgctaaagcgagcttagaagcaaatgttaaatatttagcattagacttaggtccagataatattcgcgttaatgcaatttcagctggtccaatccgtacattaagtgcaaaaggtgtgggtggtttcaatacaattcttaaagaaatcgaagagcgtgcacctttaaaacgtaacgttgatcaagtagaagtaggtaaaacagcggcttacttattaagtgacttatcaagtggcgttacaggtgaaaatattcatgtagatagcggattccacgcaattaaa

SEQ ID NO: 4174 - DNA, 3552 bp, Staphylococcus aureus
gtttatttaaaatcaatagatgccattggatttaagtcttttgcagatcaaaccaatgttcaattcgataaaggtgtaactgcaattgttggtccaaatggaagcggtaaaagtaatattacagatgctattaaatgggtgttgggcgaacaatcggctaaatcattacgtggctcaaaaatggaagatattatcttctcaggtgcagaacatcgcaaagctcaaaattatgctgaagtacagttaagattagataatcattctaaaaagctcagtgttgatgaaaacgaagttattgtaacaagaagattgtatcgaagtggtgaaagtgagtactacataaataatgaccgtgcaagattaaaagatattgccgatttatttttagattctggattggggaaagaagcatatagcattatctcgcaaggtagagttgatgaaatactaaatgctaaaccaattgatagacgtcaaattattgaagaatcggctggtgtacttaaatataaaaaacgtaaagctgaatcattaaataaacttgaccaaacagaagataatttaacgagagtagaagacattttatatgatttggaaggtcgcgtagaacctctaaaagaggaggcagctatagctaaagaatataagacactttcgcaccaaatgaaacatagtgacattgtagttacagtgcacgatattgatcaatatacaaatgacaatagacaattagatcaacgtttaaatgatttacaaggtcaacaagcaaataaagaagctgacaagcaacgtttaagccaacaaattcaacaatataaaggtaaacgtcatcaacttgataatgatgttgaatcgcttaattatcaattagtaaaagctacggaagcctttgaaaaatatacgggacaattaaatgttttagaagaacgtaagaaaaatcaatctgaaacaaatgcacgatatgaagaagaacaagaaaatttaattgagcttttagaaaatatatcaaatgagatttctgaagctcaagatacttataagtctctgaaaagtaaacaaaaagaactcaacgctgtcattcgtgaattagaagaacaactatatgtttcagacgaagcacacgatgaaaaattggaagaaattaaaaacgaatactatacattaatgtcagagcaatcagatgttaacaatgatattcgttttttaaagcatactatagaagagaatgaggctaaaaaatcaagactagattctcgattagttgaagtctttgagcaattgaaagatattcagggtcaaataaaaacgactaaaaaagaatatcaacagaccaacaaagaactttctgctgtagataaagaaattaaaaatatagaaaaagacctcactgatacaaaaaaagcacaaaacgaatacgaagagaaattgtatcaagcatatcgatataccgaaaaaatgaaaacacgtattgatagtttggcaacgcaagaggaagaatatacttattttttcaatggcgtcaaacatattttgaaagctaaaaataaagaattaaagggtattcatggtgcagttgcggaaattattgatgtgccatctaaattaactcaggcaattgaaacagcattaggtgcttcattacaacatgttattgtagattcagaaaaagatggacgccaggctattcaatttttaaaagaacgtaatttaggtcgtgcgacgtttttaccattaaatgttatacagagtagagtggtagcgactgatattaagtctattgctaaagaggcaaacggatttattagtattgcttcggaagcagttaaagtagcaccagaatatcaaaatattatcgggaatttattaggtaatacgattatcgttgatcatttaaagcatgcaaatgaattggcacgtgcgattaaatatcgaactcgtattgttactttggaaggtgatattgtaaatcctggtggttctatgactggtggtggcgctcgtaagtcaaaaagtattctgtctcaaaaagacgagttgacaacaatgagacaccaattagaagattacttgcgtcaaacagaatcatttgaacaacaatttaaagagttgaagataaaaagtgatcaattaagtgaactgtattttgaaaaaagtcaaaagcataatacacttaaagagcaagtgcatcattttgaaatggagctcgatagattaactacacaagaaacacaaataaaaaatgatcatgaagaattcgaatttgaaaaaaatgatggttatacgagtgacaaaagtcgacaaactttgagtgaaaaagaaactcatttagaaagtattaaagcatctttaaaacgactagaagatgaaattgaacgctacacaaaactttctaaagaaggtaaggaaagcgtaactaaaacacaacaaacgttacatcagaaacaatctgatcttgctgtggttaaagagcgtattaaaacacaacaacagactatagatcgattaaataatcaaagtcaacaaaccaaacatcaattaaatgatgttaaagaaaaaatagcattctttaattcggatgaagtgatgggcgagcaagcttttcaaaatattaaagatcaaattaatggtcaacaagaaacgagaacacgcttatctgatgaattagataaattgaaacaacaacgtattgagttgaatgaacaaatcgatgcgcaagaagctatactacaagtttgtcaccaagatattttagctatcgaaaatcactaccaagatattaaagctgaacaatcaaagctagatgtattaattcatcatgcgatagatcatttaaatgatgaatatcaattgactgttgaacgtgcaaaatctgaatatacgagtgatgaatcgattgacgcattacgtaaaaaagttaaattaatgaagatgtcgattgatgaactaggtcctgtaaacttaaatgcaattgaacaatttgaagagttaaatgaacgttatacatttttaagtgagcaacgtacagatcttcgtaaagctaaagaaacattagagcaaattataagtgaaatggatcaagaggttactgaaagatttaaagaaactttccatgctattcaaggacattttacagctgtgttcaaacaattgtttggtggaggcgatgcagaattgcaattaactgaagccgattatttaacagctggtattgatattgtggtacaaccaccgggtaaaaagttgcaacatttatcgttactaagtggtggtgagcgtgcattaactgctattgctttactatttgcaattttaaaagtaagatctgcaccttttgttatattagatgaggttgaagctgcattagatgaagcgaatgttattagatacgcaaaatatttaaatgagttatcagacgaaacacaattcattgttattacacaccgtaaaggaacaatggaatttgcagataggttatacggtgtaacaatgcaagaatcaggtgttactaaacttgtgagtgtgaatttaaatacaatagatgatgtgttgaag

SEQ ID NO: 4175 - DNA, 2607 bp, Staphylococcus aureus
atggatataaataaaatgacatatgctgttcaaagtgctttacaacaagcagttgaactgagtcagcaacataaattacaaaatatagaaattgaggcaattttaagcgctgccttaaatgaaagtgaaagcttatataaaagtattttagaacgagcaaatattgaggtagatcaattaaacaaagcttatgaagacaaactaaatacgtatgcatctgtagaaggtgacaatatacaatatggtcaatatattagccaacaagcaaaccaattgataactaaggctgaatcatacatgaaagaatatgaagatgaatatatttcaatggagcatattttacgttcggcaatggacattgatcaaacaacaaaacattatataaataataaagtagaagttatcaaagacattattaaaaaagtcagagggggaaatcacgtgacatcacaaaatcctgaagttaattacgaagcattagctaaatatggccgcgacttagtagaagaagttagacaaggtaaaatggatcctgttataggaagagatgaagaaattcgaaatacgattcgtattttaagtcgtaaaactaaaaacaaccctgtgctcattggtgaaccaggtgttggtaaaactgcaattgttgaaggattagcgcagcgtatagttaagaaagatgtgccagaatcattattagataaaactgtttttgagttagatttaagcgcattagtagcgggcgctaaatatcgtggtgaatttgaagagagattaaaagcagtcctaaaagaagttaaagagtctgatggtagaattatattatttattgatgaaatccatatgcttgtaggtgctggtaaaacagatggtgccatggatgcaggcaacatgctaaaaccaatgttagcacgaggagagttacattgtattggtgcaacaactttaaatgaatatagagaatatattgaaaaagattcggcattagagcgtcgtttccaaaaagtagcagttagtgagcctgatgttgaagatacaatttcaattttacgtggtttaaaagaacgatatgaagtgtatcatggtgtgcgtattcaagatagagccttagttgctgccgctgaattgtctgatcgttacatcactgatcgttttttaccagataaagcgattgatttagttgaccaagcatgtgcaacaattcgtacggaaatgggatcaaatccaactgaattggatcaagttaatagacgtgttatgcaattagaaattgaagaaagcgcacttaaaaatgaatctgacaatgcgagcaaacagagattacaagaactacaagaagagcttgccaatgaaaaagagaaacaagcagcacttcaatctcgtgtagaatcagaaaaagaaaaaatagcaaacttacaagaaaaacgtgcgcaactagatgaaagtagacaagcgttggaagatgcacaaacaaataacaatttagaaaaagcagctgaactacaatatggaacaattcctcaattggaaaaagaacttagagaattagaggataatttccaagatgagcaaggtgaagatacagatcgaatgattcgtgaagttgtaacagacgaagaaattggcgatattgtcagccaatggacaggcataccagtttcaaaattagttgaaacagaacgtgaaaaattacttcacttaagtgatatcttgcataaacgtgttgtaggtcaagataaagcggttgacctggtttcagatgcagtagttagagcaagagcaggtattaaagatccaaacagacctattggtagtttcttattcctaggtccaactggggtaggtaaaactgaattagctaaatcattagctgcatcattatttgattctgaaaaacatatgattcgtattgatatgagtgaatatatggaaaaacatgcagtatcaagattgataggggcacctccaggatatattggacatgatgaagggggtcaattaactgaagcggttcgtcgtaatccatactcagttattttattagatgaggttgaaaaagcgcatactgacgtctttaatgtattattgcaaattttagatgaaggccgtttaactgattctaaaggacgtagcgttgattttaaaaatactattattattatgacaagtaatattggatctcaagttttattagaaaacgtaaaagagactggtgaaattacagaatcaacagaaaaagctgttatgacaaatttaaatgcatatttcaaaccagaaattttgaatcgtatggatgacatcgtattatttaaacctttatctattgatgatatgagtatgattgtagacaaaatattaacgcaattaaatataagattactagaacaacgaatctcaattgaagtttctgatgatgctaaagcttggctaggtcaagaggcttatgaacctcaatacggtgcaagaccattaaaacgttttgtacaacgccaaattgaaacaccattagcacgtatgatgattaaagagggattcccagaaggtacaactattaaagttaatttaaattcagacaataacttaacgtttaatgttgaaaaaattcatgaa

SEQ ID NO: 4176 - DNA, 331 bp, Staphylococcus aureus
atgaaaatttctactaaagggagatatggacttacattgatgatttctcttgctaaaaaagaggggcaaggatgtatatcattaaagtcaattgctgaagaaaataatttgagtgatttatatttagaacagcttgtaggtcctttaagaaatgcggggttaattcgaagtgtacgcggtgctaaaggtggataccaattaagagtgccagcggaagaaatctcagcaggggatattataagactgttagaaggtccaattacatttgttgaaagtattgaatcagaaccacctgcgcaaaaacaactatggattcgcatgagagatgcag

SEQ ID NO: 4177 - DNA, 1425 bp, Staphylococcus aureus
agcaacgaaataaatacattgattattggtataccagaacatttaaatcagttagagcgcattagttttaatcatatcgatattacagaatcacttgaaagactaaaacatcaacatattattggtagtaaagttgggaagatttatacaactgcatttgatgtacaagatcaaacttatcgtttaattacagttggtttaggaaacttaaaaacacgtagttatcaagatatgttgaaaatatggggacatcttttccaatacataaagtcagaacacattgaagatacgtatttacttatggattcatttatttcaaaatatgatcagttatcagatgtattaatggcatgcggtattcaaagtgagcgtgcaacatatgaattcgatcattataaatcaagtaagaaggcaccgtttaagacgaatttaaaccttattagtgaatcattaattgaattagattttattcatgagggtatcagtattggccaatccattaatttggcaagagactttagtaatatgccaccgaatgtattaacaccacaaacatttgcagaagatattgttaatcattttaaaaatacaaaggtcaaagtagaggttaaagattatgacactttagtttctgaaggattcggacttttacaagcggtaggtaaaggtagtaagcataaaccgagattagtaaccatcacatataatggcaaagacaaagatgaagtaccaattgccttagttggtaaaggtataacgtatgattctggtggttatagtattaaaacgaagaatggcatggctacaatgaaatatgacatgtgtggcgctgcgaatgtcgttggtatcattgaagcggctagtcgtttacaactgcctgtaaatattgtcggagtgcttgcttgtgctgaaaatatgataaatgaagcatcaatgaagccagatgatgtatttacagcattaagtggtgaaactgtagaagtaatgaatacagacgctgaaggcagattagtccttgcagatgctgtgtattatgcaaatcaatatcagcctagtgtgattatggactttgctacattaacgggtgcagcaattgttgcactaggagatgataaagctgctgcatttgaatcgaatagtaaagtgatattaaacgatatattacaaataagttctaaagtcgatgaaatggtatttgaattaccgattactgcaaccgaacgtgcaagtattaaacacagtgatatcgctgatttagttaaccatacgaatggacaaggtaaagcgctatttgcggcaagttttgtaacacattttagtggtcaaacacctcacattcatttcgatattgcaggtccagcaacgactaataaagcttcatataatggtccaaaagggccaacaggatttatgattccgacgata

SEQ ID NO: 4178 - DNA, 1311 bp, Staphylococcus aureus
atggcaaaacatccattcgaacaatttaatctagaatctagtttaattgacgctgtgaaagaccttaattttgaaaaaccaactgaaattcagaatcgaattattccaagaatactaaagagaacaaatttaattggtcaatctcaaacgggtacagggaaatctcatgcatttttattaccattaatgcagttaattgatagtgaaataaaagaaccacaagcaatcgtagttgcaccaacaagagaacttgcacaacaactatacgatgcagcgaaccatttaagccaatttaaagctggtgtttcagttaaagtttttattggtggtacagatatagagaaagatagacaacgttgtaatgcacaaccacaattgattataggtacccctactagaattaatgacttagctaaaacgggacatttacatgtgcacttagcatcatatttagttattgatgaagcggatcttatgattgacttaggattaattgaagatgtagattacattgctgcaagattggaagataatgcaaatattgcggtgtttagtgctacaattccacaacagttacaaccatttttaaataaatatttaagtcatccagaatatgtagctgtcgacagtaaaaaacaaaataaaaagaacatcgaattctttttaatacctactaaaggtgcagctaaagttgaaaagactttaaatttaattgatatactaaatccatacttatgtattattttctgtaatagtagagataatgcaaatgatttagcacgttcactaaatgaagctggcattaaagttggtatgattcatggtggtttaacgccacgtgaacgtaaacaacaaatgaaacgtatacgtaatttagaattccaatacgttattgccagcgatttagcatctcgtggtattgatattgaaggtgttagtcatgtcatcaattttgatgtgccaaatgatattgacttctttacacatagagtcggccgaactggccgtgggaattataaaggtgtagcaattacgctttatagtcctgatgaagaacacaatatttcattaatagaagatcgtggttttgttttcaatactgttgatattaaagatggtgagttaaaagaagttaaagcgcacaatcagcgtcaagcaagaatgcgcaaagatgaccatttaactaatcaagtgaagaacaaagttcgaagtaaaattaaaaacaaagttaaaccaggttataagaagaaatttaaacaagaagttgaaaaaatgaaacgtcaagagcgtaaacaatttagtaagcagcaa

SEQ ID NO: 4179 - DNA, 276 bp, Staphylococcus aureus
atggctcgtagtattaaaaaaggacctttcgtcgatgagcatttaatgaaaaaagttgaagctcaagaaggaagcgaaaagaaacaagtaatcaaaacatggtcacgtcgttctacaattttccctaatttcatcggacatacttttgcagtatacgacggacgtaaacacgtacctgtatatgtaactgaagatatggtaggtcataaattaggtgagtttgctcctactcgtacattcaaaggacacgttgcagacgacaagaaaacaagaaga

SEQ ID NO: 4180 - DNA, 336 bp, Staphylococcus aureus
atggaagcaaaagcggttgctagaacaataagaatcgcacctcgtaaagtaagactagttcttgacttaatcagaggtaaaaatgctgctgaagctattgcaattttaaaattaacaaacaaagcttcatcaccagtaattgaaaaagtattaatgtccgctttagctaatgctgaacataactatgacatgaacacagatgaattagtagttaaagaagcatatgctaacgaaggaccaacattaaaacgtttccgtccacgtgcgcaaggtcgtgcaagtgcgattaacaaacgtacaagccacattacaatcgtcgtaagtgacggtaaagaa

SEQ ID NO: 4181 - DNA, 648 bp, Staphylococcus aureus
gtgggtcaaaaaattaatccaatcggacttcgtgttggtattatccgtgattgggaagctaaatggtatgctgaaaaagacttcgcttcacttttacacgaagatttaaaaatccgtaaatttattgataatgaattaaaagaagcatcagtttctcacgtagagattgaacgtgctgcaaaccgtatcaacattgcaattcatactggtaagcctggtatggtaattggtaaaggcggttcagaaatcgaaaaattacgcaacaaattaaatgcgttaactgataaaaaagtacacatcaacgtaattgaaatcaaaaaagttgatcttgacgctcgtttagtagctgaaaacatcgcacgtcaattagaaaaccgtgcttcattccgtcgtgtacaaaaacaagcaatcactagagctatgaaacttggtgctaaaggtatcaaaactcaagtatctggtcgtttaggcggagctgacatcgctcgtgctgaacaatattcagaaggaactgttccacttcatacgttacgtgctgacatcgattatgcacacgctgaagctgacactacttacggtaaattaggcgttaaagtatggatctatcgtggagaagttcttcctactaagaacactagtggaggagga

SEQ ID NO: 4182 - DNA, 468 bp, Staphylococcus aureus
atgcctcgtaaaggatcagtacctaaaagagacgtattaccagatccaattcataactctaagttagtaactaaattaattatcaaaattatgttagatggtaaacgtggaacagcacaaaggattctttattcagcattcgacctagttgaacaacgcagtggtcgtgatgcattagaagtattcgaagaagcaatcaacaacattatgccagtattagaagttaaagctcgtcgtgtaggtggttctaactatcaagtacctgtagaagttcgtccagagcgtcgtactactttaggtttacgttggttagttaactatgcacgtcttcgtggtgaaaaaacgatggaagatcgtttagctaacgaaattttagatgcagcaaataatacaggtggtgccgttaagaaacgtgaggacactcacaaaatggctgaagcaaacaaagcatttgctcactaccgttgg

SEQ ID NO: 4183 - DNA, 2079 bp, Staphylococcus aureus
atggctagagaattttcattagaaaaaactcgtaatatcggtatcatggctcacattgatgctggtaaaacgactacgactgaacgtattctttattacactggccgtatccacaaaattggtgaaacacacgaaggtgcttcacaaatggactggatggagcaagaacaagaccgtggtattactatcacatctgctgcaacaacagcagcttgggaaggtcaccgtgtaaacattatcgatacacctggacacgtagacttcactgtagaagttgaacgttcattacgtgtacttgacggagcagttacagtacttgatgcacaatcaggtgttgaacctcaaactgaaacagtttggcgtcaggctacaacttatggtgttccacgtatcgtatttgtaaacaaaatggacaaattaggtgctaacttcgaatactctgtaagtacattacatgatcgtttacaagctaacgctgctccaatccaattaccaattggtgcggaagacgaattcgaagcaatcattgacttagttgaaatgaaatgtttcaaatatacaaatgatttaggtactgaaattgaagaaattgaaattcctgaagaccacttagatagagctgaagaagctcgtgctagcttaatcgaagcagttgcagaaactagcgacgaattaatggaaaaatatcttggtgatgaagaaatttcagtttctgaattaaaagaagctatccgccaagctactactaacgtagaattctacccagtactttgtggtacagctttcaaaaacaaaggtgttcaattaatgcttgacgctgtaattgattacttaccttcaccactagacgttaaaccaattattggtcaccgtgctagcaaccctgaagaagaagtaatcgcgaaagcagacgattcagctgaattcgctgcattagcgttcaaagttatgactgacccttatgttggtaaattaacattcttccgtgtgtactcaggtacaatgacatctggttcatacgttaagaactctactaaaggtaaacgtgaacgtgtaggtcgtttattacaaatgcacgctaactcacgtcaagaaatcgatactgtatactctggagatatcgctgctgcggtaggtcttaaagatacaggtactggtgatactttatgtggtgagaaaaatgacattatcttggaatcaatggaattcccagagccagttattcacttatcagtagagccaaaatctaaagctgaccaagataaaatgactcaagctttagttaaattacaagaagaagacccaacattccatgcacacactgacgaagaaactggacaagttatcatcggtggtatgggtgagcttcacttagacatcttagtagaccgtatgaagaaagaattcaacgttgaatgtaacgtaggtgctccaatggtttcatatcgtgaaacatttaaatcatctgcacaagttcaaggtaaattctctcgtcaatctggtggtcgtggtcaatacggtgatgttcacattgaattcacaccaaacgaaacaggcgcaggtttcgaattcgaaaacgctatcgttggtggtgtagttcctcgtgaatacattccatcagtagaagctggtcttaaagatgctatggaaaatggtgtcttagcaggttatccattaattgatgttaaagctaaattatatgatggttcataccatgatgtcgattcatctgaaatggccttcaaaattgctgcatcattagcacttaaagaagctgctaaaaaatgtgatcctgtaatcttagaaccaatgatgaaagtaactattgaaatgcctgaagagtacatgggtgatatcatgggtgacgtaacatctcgtcgtggacgtgttgatggtatggaacctcgtggtaatgcacaagttgttaatgcttatgtaccactttcagaaatgttcggttatgcaacatcattacgttcaaacactcaaggtcgcggtacttacactatgtacttcgatcactatgctgaagttccaaaatcaatcgctgaagatattatcaagaaaaataaaggtgaa

SEQ ID NO: 4184 - DNA, 864 bp, Staphylococcus aureus
atgaataaattaatagatgaagtcaataatgaattatcggttgcgataaataaatcagtaatggatactcagctagaagaaagtatgttgtattcattaaatgctggaggtaaacgcatccgaccagttctgttattactcactttagattcactaaataccgagtatgagttaggtatgaagagcgcaattgcactagaaatgattcatacatattcacttattcatgatgacctaccagcgatggataatgatgattatcgacgagggaaattaacaaatcataaagtatatggtgagtggactgcgatattagcaggtgatgctttattaactaaagcatttgaacttatttcaagtgatgatagattaactgatgaagtaaaaataaaagttctacaacggctgtcaatagcaagtggtcatgttggaatggtcggcggtcaaatgttagatatgcaaagcgaaggccaaccaattgatcttgaaactttggaaatgatacacaaaacaaaaacaggagcactattaacatttgcggttatgagtgcagcagatatcgctaatgtcgatgatgcaactaaagaacatttagaaagttatagttatcatttaggtatgatgtttcagattaaagatgatttattagactgctatggtgatgaagcgaagttaggtaaaaaagtgggcagcgatcttgaaaataataaaagtacatacgtgagtttattaggaaaagatggcgcagaagataaattgacttatcatagagacgcagcagtggatgaactaatgcaaattgatgaacaattcaatacaaaacacttattagaaatcgttgatttattttatagcagggatcac

SEQ ID NO: 4185 - DNA, 1314 bp, Staphylococcus aureus
tatttaagtgtttcagctttaacgaaatatattaaatataaatttgatcaagatccacatctccaatctgtattgattaaaggtgagctttcaaatttcaaaaagcattcaagtggtcatttatactttaatgtgaaagataaagaaagcgttataagtgccatgatgttcaaaggtagtgcttctaaattaaacttcgaacctaaagaaggagatgaagtcttattagaagcacgtgtttctgtttttgaacgtcgtggaaactatcaaatttatgtaaataaaatgcaattagatggtatagggaacttatatcaaaaattagaagcattaaagaaaaaattaactgaagaaggttgttttgataaagcgaataagaaatcaatacctaagtttcctaaaaaaattgcagttttaacagcgagtacaggtgccgcaattcgagatatccattcaacgataaatagtcgttttccattagctgaacaaatacaaattagtactttggttcaaggtgaaaaagcaaaagacgacattattgaaaaaattgaatatgcagatagtttaggtgtagataccattattgtaggtcgaggcggtggatccatagaagatttatggaatttcaacgaagaagctgtcgtccgtgcaatatataattgtaagacaccgattatatcagcagtaggtcatgaaacagactttacattaagtgattttgctgcagacatcagagctgcgactccaactcaagctgctgttattgcaacaccagaccaatatgaattgctgcaacaaatacagcaatatcagtttacattgactcgtttcatcaaaaaacatttagaacaacaacgtaaacatgttgaacatttgtcatcgtattacaagtttaaacaaccaactttattgtatgatcaacagatacaacgtcgagatgatttagaaaagagactgaaacaacaaattcaggtaacttttgaacaacagagacatcgattaatactgttgcaacaacgctataatttaaaagcgttactaagtagtgttaatcaagaacaacaaaataatcttcaattgacaaaccaacttgttaaattattgaattctaagatattaagttataaaaatgatttgaaaaataaagtagaaaacttaaacaatttaagtccaactaatacaatgttgcgtggatatgcaattgttaataaaaaagacgaagtcattacgagtactaaagatttaacagaaaatgatcaattgacgttaacaatgaaagatggcttagtagatgcaaaagttacgaaagtaagg

SEQ ID NO: 4186 - DNA, 444 bp, Staphylococcus aureus
atgagtatcgaaggacataaagaacatattattagtaaaaacactgccaaagatgaacgtacttctgaatttgaagtaagtaagttgaacggtaaaatagatggaaaaattgacgtttatatcgatgaaaaagtgaacggaaaaccattcaaatatgaccatcattacaatattacatataaatttaatggaccaactgatgtagcaggtgctaatgcaccaggtaaagatgataaaaattctgcttcaggtagtgacaaaggatctgatggagcgactactggtcaaagtgaatctaacagttcgaataaagacaaagtagaaaatccacaaacaaatgctggtacacctgcatatatatatgcaataccagttgcatccttagcattattaatcgcaatcacattgtttgttagaaaaaaatctaaaggcaatgtggaataa

SEQ ID NO: 4187 - DNA, 552 bp, Staphylococcus aureus
atgagtgacattattaatgaaactaaatcaagaatgcaaaaatcaatcgaaagcttatcacgtgaattagctaacatcagtgcaggaagagctaattcaaatttattaaacggcgtaacagttgattactatggtgcaccaacacctgtacaacaattagcaagcatcaatgttccagaagcacgtttacttgttatttctccatacgacaaaacttctgtagctgacatcgaaaaagcgataatagcagctaacttaggtgtcaacccaacaagtgatggtgaagtgatacgtattgctgtacctgccttaacagaagaacgtagaaaagagcgcgttaaagatgttaagaaaattggtgaagaagctaaagtatctgttcgaaatattcgtcgtgatatgaatgatcagttgaaaaaagatgaaaaaaatggcgacattactgaagatgagttgagaagtggtactgaagatgttcagaaagcaacagacaattcaataaaagaaattgatcaaatgattgctgataaagaaaaagatattatgtcagta

SEQ ID NO: 4188 - DNA, 240 bp, Staphylococcus aureus
actgaagaagatgatattgatgtgaaagtcaaagataacgaatctaaattaggcggatttgattggtttaaacgtaaaacaaacaaaaaagatactcatgaaaatgaagtagagtcaacagatgaagaaatttatcaatcagaagataatcatcaggaacataaacagaatcatgaacatgttcaagacaaagataaagaagaaagtaaattcaaaaaactaatgaaatctctatttgaa

SEQ ID NO: 4189 - DNA, 1788 bp, Staphylococcus aureus
tttacaaaatataagaaaatgagatatatgccagggctcgatggtttgagggcaatcgctgttctaggaattattatttaccacttaaataagcaatggttgacaggtggctttttaggtgtggatacattttttgtgatctctggttatttaattacaagcttattactcaaagagtatgatgacacaggtatcattaaattgaaaagcttttggatacgtcgtttaaaacgtttattaccagcagtcatagttttattaatggttgtagggacagcaaccttattattaaaatcagataatatcattagggttaaacatgatattattgctgcgatattttatgtatcaaattggtggtatatagcaaaagatgttaattattttgagcaattttcatttatgccattaaagcatttatggtctttagcaattgaagaacagttttacatatttttcccagttattttggttacattattgttaacaattaaaaagcgatacaaaataggatttattttttggggagtatctataatttctttagggttaatgatgtttatctacagtattaatggggatcattcacgagtgtattttggaacagatacaagattacagacattgttactgggtgttattttagcttttttatggccaccgtttaaattgaaaaatgatccacctaaagttgtaaaatatgttattgatagcataggtagtttatcatttatagtacttatattattatttttcattattaatgatgagacgaattggatatatgatggaggtttctatttaatatccatattaacgttatttattattgccagtgtcgttcatccatctacatggatagcgaagatattttcaaatccagtgttagtatttatcgggaaaagatcttacagtctatatttatggcattttgcagtaattagtttcgtacatagttactatgtagacggacagatacctgtatatgtgtactttatagatataagtttaacaattatatttgcagagctatcatatcgctttatagaaactccatttagaaaagaaggtattaaagctttaaattggcgaccttcttatataccacaatttataagaatggcaattgtagtaaccttgttaattccatttatgttgattttagtaggtgcattcaataaatatggtaaagacattataggagaaaaagcgaatagctttgataccactattgaagataattatttaatgcggatagcaccaattgataacattcacattgatggcttagtaagtgagaagaaaaaggaatcttccgacgtatataataatattaaacctcttttaatcggtgattcagtaatggttgatatcggtgagtcatttaagtcatcagttcctaagtctagaattgatggaaaagtagggcgtcaattgtatcaaaccttacctttagttaaagcgaattattcacaatataaaaaatcatctgatcaagttgtattagaattaggtacaaatggcgactttactgtcaaacagctcgacgatttacttaatcaatttggaaaagccaagatttatttagttaatacacgtgttccaagaatttatgaggcaaatgtaaatcgattattagctgacgcggcgaaacgaaagtccaatgtcacattaattgattggtataagcgatcacaaggacatagtgaatattttgcaccagacggtgtacatttagagtacaaaggagtcctagctttaaaagatgaaatattaaaagcacttaaa

SEQ ID NO: 4190 - DNA, 318 bp, Staphylococcus aureus
gctttgtctatgcctaaagtttatggttcattaatcgatactgaaacacgctgtcgccattattttaccgaagaagatattattgctattaaatttaaatgttgcaataaatactatccatgctataagtgccataatgagtttgaaaagcacgccattaagcgttggtctgaaccttcatttaacgaaaaagcaatcttatgcggtgtatgcaaacacgaattaacaatcaatgaatatatgatggtagagcgttgtccaaattgccaatctcggtttaacaatcgctgcaaatatcactatcatatttattttgaa

SEQ ID NO: 4191 - DNA, 888 bp, Staphylococcus aureus
atgagtgtatttatagataagaatactaaagtaatggtacaaggtattacagggtctactgcccttttccatacaaaacaaatgcttgattatggtacgaaaatagtagcaggtgtgacgcctggtaaaggtggtcaagttgttgaaggcgttcctgttttcaacactgttgaagaagctaaaaatgaaactggggcaacggtttcagtcatttacgttccagcaccatttgctgcagactcaattttagaagcagctgatgcagacttagatatggttatttgtatcactgaacatattcctgtattagacatggttaaagttaaacgctacttacaaggtagaaaaacacgtttagttggtccaaactgtccaggtgtgattacagcagatgaatgtaaaattggtattatgcctggctatattcacaaaaaaggtcatgttggtgtagtatcacgttcaggtacactaacatatgaagcagtgcaccaattgactgaagaaggtattggtcaaactacagctgttggtattggtggagacccagtcaacggaacaaactttattgatgttttaaaagcattcaatgaagatgacgaaacgaaagcagttgttatgattggtgaaatcggtggtacagctgaagaagaagcagctgaatggattaaagcgaatatgacaaaaccagttgtaggctttatcggtggacaaacagcacctcctggaaaacgtatgggacatgctggtgcaatcatttcaggtggtaaaggtactgctgaagagaaaattaaaacattaaatagttgtggtgtgaaaacagcggcaacaccttcagaaattggttcaacattaattgaagctgctaaagaagcaggtatttatgaatca

SEQ ID NO: 4192 - DNA, 1268 bp, Staphylococcus aureus
ctagcgaaattggcgcgtaaagcaagtagagcagtaggtaaaagaggaacagatttacctggacaaatcgctagaaaagtggatacagatatattaagaaaattagcagagcaagttgatgatattgtatttatcagtggaacaaatggtaaaacaacgacttcaaacttaattggacatactttaaaagcaaataatattcaaattatacacaataatgaaggtgctaatatggctgcaggtataacttctgcattcatcatgcaatcaacacctaagactaaaattgcggtaatcgaaattgatgaaggttcgattccacgtgtgttaaaagaagttacaccttcaatgatggtatttactaatttctttcgagatcaaatggatcgcttcggtgaaattgatattatggttaacaacattgcagagacaattagtaataaaggcatcaaattattgctaaatgctgatgatccatttgtgagtcgtttgaaaatcgcaagtgatacgattgtgtactatggtatgaaagcacatgcacatgaatttgaacaaagtacgatgaatgaaagtagatattgtccaaactgtggtcgcttattgcaatacgattatattcattataatcaaattggtcattatcactgtcagtgtggtttcaaacgagagcaagcaaaatatgaaatatcaagttttgatgtggcaccgtttttacatttaaatatcaatgatgaaaaatatgatatgaaaattgcaggtgactttaacgcttataacgcgttacagcatatacagttttaagagagctagggttaaatgaacaagcaattaaaaatggctttgaaacgtatacatcagacaatggtcgtatgcagtactttaaaaaagaacgaaaagaagcgatgattaatttagctaaaaaccctgcaggaatgaatgcaagtttatcagttggtgaacaattagagggcgaaaaagtgtatgttatttcgctaaatgataacgctgcagatggtcgagatacttcatggatttatgatgcagattttgaaaaattatctaagcaacaaattgaagctatcatcgtgacaggtacacgagcagaagaacttcaattgcgattgaagttagcagaggttgaagtaccaattatagttgagcgtgatatttataaagcaacggcaaagactatggattataaagggttcacaagtgcaataccaaactatacatcattagcgcctatgcttgaacaattaaaccgttcg

SEQ ID NO: 4193 - DNA, 1077 bp, Staphylococcus aureus
atgagaaatgttaaacaaattgctacaaaatctattatagctattattagcttaggtatacttacatatacaacaatgattggtagcgtgttggctgatgagataaaatatccatcagccaaatttaatcaacctgaagcaaaagataaaacagaattaacttcatcaatttttgatgaaaagataaaagagaataaagcgttagagttactaatttttaatcaagaaaataaaaatgtaactgaggaacaacaactagttgacgaaaaggcgcaattgatttcagatatgactggtaaaatttacttacaagtaaagctaaaaggtcaaattgaaaaagaacaacttgtttttcaaaatgacaaaaatgaagaatttccttttgttataaaaggtgaaaaggatgacacaatagtaagaattttaattgaacagcatatggataaaatcaatatgcatgttaaaacgttggctgaaaagaaagatctagataacaaagaaatggtgtattctattcattttaaagagaaaaaagtacaacatgatgatgcaaaagaagtaccttcaaaacatcaaaatcaagaaaataatcaagataagcttaaaaaagatattgatgacaaaaaagatagtcaaaaatcagacattaaggaaagacgtactagcctttttactgaaaaaggattaaatgatattcctgtacaaaaagataaagtgcaacaagacagtaataaaaagattgaaaatgagcgacctaaagcatcaggtacattaaaagttgaaaatagccctccaacagtaaaaaaggttgaaaatgatcacaaagagcaaccgaaacataaagatgaaaaatcaaaaaaggaaaagaaaaaagtagttgaaaaagaaaaagcgttaccagcttttaatagagatgatgatagcaagaatagtagtcaattatctagtgatattaaagaacttgatgaaccaaatcataaaaagcaatatatgttatttgcagctggcattgtgttagcaaccattttacttatttcggcacatttatacagcagaaagagaggtaaccaagtttga

SEQ ID NO: 4194 - DNA, 957 bp, Staphylococcus aureus
aaatgtgtgaataggaatatcgttaaattagttgtgtttatgctaatcttcgttgtagcagtagcgggttgtggtcaaaaagatactgaagagaaaactgaaatgacgacaataaaagatgaattaggaactgaaaaaattaagaaaaatcctaaacgtgttgttgtattagaatatagttttgctgattatttagcagcattagatatgaaacctgttggtattgcagatgatggcagcagtaaaaatataacaaagtcagtaagagataaggttggggcatatgaatcggttggatctagaccgcaaccgaatatggaagtgataagtaaattaaaaccggatttgatcatagcagatgttagcagacataagaaaatcaaatcagaattaagcaaaattgctccgacaatcatgttagttagcggtacgggagattataatgcaaatattgatgcatttaaaacagtcgctaaagcagtaggcaaagagaaagaaggcgagaaacgtctggaaaagcatgataaaatattagcggagattagaaagaaaattgaacagagtacgttaaaaactgcatttgcattcggtatctcaagagcaggtatgtttattaataatgaagatacatttatgggacaattcttaattaaaatgggtattcaacctgaagtcacaaaagacaaaactacgcatgttggtgaacgcaagggtggtccttatatttatttaaataatgaagaacttgccaatatcaatccaaaagttatgattttagccactgacggaaaaacggacaaaaatagaacgaaattcattgatcctgcagtttggaaatcattaaaagctgtgaaagataacaaagtttatgacgttgaccgaaataagtggttgaaatcaaggggtattatcgcaagtgaaagtatggcagaagatttagaaaaaattgcagaaaaa

SEQ ID NO: 4195 - DNA, 1168 bp, Staphylococcus aureus
aatcaattagctaaatataaacaagatcatttatgtgaatatgaaaaaataatgagtaacaatgaaaaagaagcgcttgaagagaaggtagcgtcattagatttagattttattgccaaattatataacgatttatacatcaataagagaacaatagatgatgtatctgcagtttctgaagtgaaatatgatattaaatcacaaatgagtgatgatgagattaagcgtatagaggatcaaggacttcaagctattaaagaaggacagtttgcagtacttttgatggcaggtggtcaaggaacaagacttggttacaagggacctaaaggttcgtttgaaattgaaggtgtaagttcatttgaacttcaagctaaccaattacaaacattgaatcatcaatctggacatacgattcaatggtatattatgaccagtgatatcaatcatgaagaagctttagctaattgcaaagcacatagttatttgggaaatgaccaaaagccaatcccactctttaaaacaagataatattggggcgttaagtaaagaagggaagttatttttaaaccaacagggtcgtattatggaaacgccgaatggaaatggtggcgtgtttaaatctttagacaaggcaggatacttagaagaaatgtctaataatggcgttaagtatattttcttgaataatatcgataatgttttagtaaaagtgttggatccactatttgcaggatttacggtagaacatgattacgatattacttctaaaacgattcaaccaaaaccaggagaaagtgttggacgattagttaatgtcgattgtaaagatacagtattggagtattcagaattagatccagaagttgcaaatcaatttaacaatgctaatatcggtattcatgcatttaaacttggctttattttaaatgctgtaaatcgtgaattaccttatcatttagctattaagaatttgaagcaattagatgagaactttggggttattgaacaaccaactttaaaattcgaattgttctattttgacatatttacttatggaactagttttgtcacgttacaagttcctagagaagaagagttctcacctcttaaaaataaagaaggtaaagatagtgttgcaacagcaactgaagatttacgtagaatgggt

SEQ ID NO: 4196 - DNA, 2988 bp, Staphylococcus aureus
atgaaaccattacatttaaagttgaataatttcggcccctttttaaaagaagaaattgatttttctaaaattgataataatgaattgtttttaataagtggtaagactggatcgggtaaaacaatgatttttgatgcaatgacttatgccttgtttggtaaagcatctactgaacaaagagaagaaaatgatttgagaagtcatttcgctgatggtaaacagccgatgtcagtaacgtttgaatttcaattaaatcatcgaatttataaagtgcatagacaaggcccttatatcaaagaaggtaatacaacaaaaacgaacgctaaatttgatgtatttgagatggtggatggcaagtatgaaattagagaaagtaaagtgatttcaggtacccaattcattattgaattattaggagtaaatgcagatcaattccgacaattgtttattttgcctcaaggtgaattcaaacgctttttaatatcaaacagtcgtgaaaagcaagggatattaagaacgctgtttgacagtgaaaaatttgaagctatacgagaaatattaaaagaagaagtaaaaaaagaaaaagctcaaatcgagaatagatatcaacaaattgaccttttatggcaagaaattgaatcatttgatgatgacaaaataaaaggcttattagaagttgccactcaacagatagacaaagtgattgaaaatataccacttttacaagctaggtcgaaagaaatactagcatttgtaaatgaaagtaaagaaactgctattaaagaatatgaaataatagaaaagaaaacactagaaaataatatattaaaagataatattaatcaactcaacaaaaataaaattgatttcgttcaattgaaagagcaacaacctgaaatagaggaaattgaagctaagttaaagttgttacaagatattacaaacctattgaattatattgaaaatagagaaaaaattgaaactaaaattgctaaaagcaaaaaagatatttctgaaaccaataataaaatattgaaccttgattgtgataagcgaaacatagacaaagagaaaaaaatgttagaagaaaatggagatttaattgaaagtaaaatctcttttattgataaaactagagtattatttaacgacattaataagtatcaacaaagttatctcaatattgaacgcttgagaactgaggatgaacaattaggtgatgaattaaataatctaattaaaggtttagaaaaggtcgaagattcaataggtaataatgaaagtgattacgagaaaattatcgaactaaataatgcgataactaacataaataatgaaattaatgtaattaaagaaaatgaaaaagctaaagatgaattagataaactattaggtagtaagcaagagttagagaatcaaattaatgaagaaaaaactatattgaagaatctcgaaataaaattagatcgctatgataaatcaaaattggacttaaatgataaagaaagctttataagtgaaattaaatctgctgtaaagattggagatcaatgtccgatatgtggtaatgaaattcaggatttagggcatcatattgattttgacagtattgctaaacgtcaaaatgaaattaaagaaattgaagcaaatatccacactatggaatcgaatattgctgtgcataattctgaaattaaatttgttaatgaaaaaatatcgaatattaatattaaaacgcaaagtgatctttcactcgaagtattgaataagcgtctgctagaaaatgaaaatgcattgaataatcaaagagatcttaataaatttatagaacaaatgaaagaagaaaaagataatctaacgttgcaaatccataataaacaattgcgtctaaataaaaatgaatctgagttgaaaatatgtcgaaatctcatcactgaatttgaaacgctctcgaaatataataatatcactaattttgaggtggattataagaagtatattcaagatgtgaatcaacatcaagaacactcaaaccagattgaagataagttaatacaattatctcaaagaaagttaattgagcaaaataatctaaatcactatgaaaaccaactagaaacttacaataatgacttagaattgaatgaacaatctattgaaatggaaatgtcgaggctgaatttaactgacgacaatgatataaatgaaataatagcctggaggggcgagcaagaggaattagagcagaaaagggatacttataaaaaacgttatcatgaatttgaaatggaaatcgctaggttagaatcattaaccaaggataaagagttattggactctgataaattaaaagatgactatgaactaaaaaaaggaaagatgaatacactgatagatgaatactctgctgttcattatcaatgtcaaaataatattaaaaaaacacaatctatagtttcgcatattaattacttaaatcaagaattaaaggatcaacaagaaatatttcaattggctgagattcttagtggtaagaataacaaaaatcttacattggaaaactttgtcttaatttactatttagatcaaattattgctcaagcaaatctgagattagcaacaatgtcagataatcgataccaactaattaggcgagaagcggtttctcatggtcttagtggcctagaaattgatgtatttgatttgcattcaaataagtctagacatattagctcgttatcaggtggagaaactttccaatcgtcgcttgcattagctttagggttaagtgaaattgtacagcagcaatcaggaggtatttcactagaatcaatttttattgatgaaggattcggtacattagatcaagaaacgcttgaaacagtgttagacactttgttaaatcttaaatcaactggtagaatggttgggattatttcacatgtgagcgaattgaaaaatagaatacctttagttttagaagtgaaa

SEQ ID NO: 4197 - DNA, 708 bp, Staphylococcus aureus
atggcagtaatttcaatgaaacaattactagaagcgggtgttcacttcggtcaccaaacacgtcgttggaacccaaaaatgaaaaaatatatcttcactgagagaaatggtatttatatcatcgacttacaaaaaacagtgaaaaaagtagacgaggcatacaacttcttgaaacaagtttcagaagatggtggacaagtcttattcgtaggaactaaaaaacaagcacaagaatcagttaaatctgaagcagaacgtgctggtcaattctacattaaccaaagatggttaggtggattattaactaactataaaacgatctcaaaacgaatcaaacgtatttctgaaattgaaaaaatggaagaagatggtttattcgaagtattacctaaaaaagaagtagtagaacttaaaaaagaatacgaccgtttaatcaaattcttaggcggaattcgtgatatgaaatcaatgcctcaagcattattcgtagttgacccacgtaaagagcgtaatgcaattgctgaagctcgtaaattaaatattcctatcgtaggtatcgttgacactaactgcgatcctgacgaaattgactacgttatcccagcaaacgacgatgctatccgtgcggttaaattattaactgctaaaatggcagatgcaatcttagaaggtcaacaaggcgtttctaatgaagaagtagctgcagaa

SEQ ID NO: 4198 - DNA, 420 bp, Staphylococcus aureus
gtggctaaaaaagtagataaagttgttaaattacaaattcctgcaggtaaagcgaatccagcaccaccagttggtccagcattaggtcaagcaggtgtgaacatcatgggattctgtaaagagttcaatgcacgtactcaagatcaagcaggtttaattattccggtagaaatcagtgtttatgaagatcgttcatttacatttattacaaaaactccaccggctccagtattacttaaaaaagcagctggtattgaaaaaggttcaggtgaaccaaacaaaactaaagttgctacagtaactaaagatcaagtacgcgaaattgctaacagcaaaatgcaagacttaaacgctgctgacgaagaagcagctatgcgtattatcgaaggtactgcacgtagtatgggtatcgttgtagaa

SEQ ID NO: 4199 - DNA, 546 bp, Staphylococcus aureus
atgtctgaagaagttggcgcaaagcgttggtatgcagtgcatacatattctggatatgaaaataaagttaaaaagaatttagaaaaaagagtagaatctatgaatatgactgaacaaatctttagagtagtcataccggaagaagaagaaactcaagttaaagatggtaaagctaaaacaaccgttaaaaaaacattccctggatatgttttagtggaattaatcatgacagatgaatcatggtatgtggtaagaaatacaccaggcgttactggttttgtaggttctgcaggtgcagggtctaagccaaatccgttgttaccagaagaagttcgcttcatcttaaaacaaatgggtcttaaagaaaagactatcgatgttgaactcgaagttggcgagcaagttcgtattaaatcaggtccatttgcgaatcaagttggtgaagttcaagaaattgaaacagataagtttaagctaacagtattagtagatatgtttggccgagaaacaccagtagaagttgaattcgatcaaatagaaaagctt

SEQ ID NO: 4200 - DNA, 180 bp, Staphylococcus aureus
atggctaaaaaagaaagtttctttaaaggcgttaagtctgaaatggaaaaaacaagttggccgacgaaagaagagctatttaaatatactgtaattgtagtttctactgttatattcttcttagtctttttctatgccttagatttaggaattacagcattgaaaaatttattatttggt

SEQ ID NO: 4201 - DNA, 1530 bp, Staphylococcus aureus
attaatgaacttatatgcaaaagtatattgagaaataaacaggtaaaaaggagaattattttgcaaaattttaaagaactagggatttcggataatacggttcagtcacttgaatcaatgggatttaaagagccgacacctatccaaaaagacagtatcccttatgcgttacaaggaattgatatccttgggcaagctcaaaccggtacaggtaaaacaggagcattcggtattcctttaattgagaaagtagtagggaaacaaggggttcaatcgttgattttagcacctacaagagaattggcaatgcaggtagctgaacaattaagagaatttagccgtggacaaggtgtccaagttgttactgtattcggtggtatgcctatcgaacgccaaattaaagccttgaaaaaaggcccacaaatcgtagtcggaacacctgggcgtgttatcgaccatttaaatcgtcgcacattaaaaacggacggaattcatactttgattttagatgaagctgatgaaatgatgaatatgggattcatcgatgatatgagatttattatggataaaattccagcagtacaacgtcaaacaatgttgttctcagctacaatgcctaaagcaatccaagctttagtacaacaatttatgaaatcaccaaaaatcattaagacaatgaataatgaaatgtctgatccacaaatcgaagaattctatacaattgttaaagaattagagaaatttgatacatttacaaatttcctagatgttcatcaacctgaattagcaatcgtattcggacgtacaaaacgtcgtgttgatgaattaacaagtgctttgatttctaaaggatataaagctgaaggcttacatggtgatattacacaagcgaaacgtttagaagtattaaagaaatttaaaaatgaccaaattaatattttagtcgctactgatgtagcagcaagaggactagatatttctggtgtgagtcatgtttataactttgatatacctcaagatactgaaagctatacacaccgtattggtcgtacgggtcgtgctggtaaagaaggtatcgcggtaacatttgtaaatccaattgaaatggattacattagacaaattgaagatgctaatggtagaaaaatgagcgcacttcgtccaccacatcgtaaagaagtacttcaagcacgtgaagatgacatcaaagaaaaagttgaaaactggatgtctaaagagtcagaatcacgcttgaaacgcatttctacagagttgttaaatgaatataacgatgttgatttagttgctgcacttttacaagagttagtagaagcgaacgatgaagttgaagttcaattaacttttgaaaaaccattatctcgcaaaggccgtaacggtaaaccaagtggttctcgtaacagaaatagtaagcgtggtaatcctaaatttgacagtaagagtaaacgttcaaaaggatactcaagtaagaagaaaagtacaaaaaaattcgaccgtaaagagaagagcagc

SEQ ID NO: 4202 - DNA, 792 bp, Staphylococcus aureus
tataaagttgtcgttttagatatggatgacacattgctaaattcagataatgtgatatcagaagaaactgcaaattatttaacagcaattcaagatgaaggttattatgttgttttagcatctggtagacctactgaaggtatgattccaactgctagagatttaaaattacctgaacatcatagctatattattagttataacggcagtaaaacgattaacatgactaatgaagaagtagaagtaagtaaatcgattggtaagcaggatttcgatgaaattgtagattattgtcgagagagaggctttttcgttcttacatatcatgatggtcaaattatttacgacagcgaacatgaatatatgaatattgaagcagaattaactggtttaccgatgaaacgtgttgatgatatcaaagcatatattcaaggcgatgtacccaaggtcatgggagttgattatgtagcgaatattactgaagctagaattgatttgaatggtgtgttcaatgataatgtagatgctacgacaagtaagccattcttcttagaatttatggccaaagatgtttcaaaaggtaatgcaattaaagcgttatgtcacaaattgggatattcggtggatcaagtcattgcttttggtgatagtatgaatgataaatcaatgtttgaagtcgcaggtctagctattgctatggggaatgcatcagatgaacttaagcaatatgcagatgaaattacgttagatcataatgaaaatggtattccacatgcacttaaaaaattgtta

SEQ ID NO: 4203 - DNA, 924 bp, Staphylococcus aureus
gttttggagttaacaattcctgcatcaacagccaaccttggagttggctttgattctataggtatggctttagataaatttttgcatctgtctgtaaaagaaacatcagggacaaaatgggaatatattttccatgatgatgcatcgaagcaattacctactgacgaaacaaactttatttatcatgtggcacaacaagttgctgctaaatatagtgttgacttgcctaatttatgtatcgaaatgagaagtgatattccattggcaagagggttaggttcgtcagcttctgctttagtaggagctatatatatcgcaaattattttggtgatatccaactatctaaacacgaggtattacaattagcgactgaaatagaaggacatcctgataatgttgcgccgaccatttatggtggtttaatcgctgggtattataatgatgtctcgaaagaaacgtcagttgcacatattgacataccagacgtggatgtgattgtaacgataccaacctatgaactaaaaacagaagcatcaagacgtgctttaccacaaaagttaacacatagtgaagcggttaaaagtagtgcaattagtaatacaatgatttgtgcattagcacagcacaattatgaattagcaggtaaactcatgcaacaagatggctttcatgaaccgtatcgtcagcatttaattgctgaatttgatgaagtgaaaacaattgctagtcaacataatgcctatgcaactgtaattagtggtgctggaccaactattttaatatttagtcgcaaagaaaatagtggcgaattggttcgcgctttaaatagaaatgtagttacatgtcattctgaattagtagatattaatgttagtggtgttaaagaacgaattgtataccaatagacactttatattgtaaaa

SEQ ID NO: 4204 - DNA, 690 bp, Staphylococcus aureus
ttgtatcaacatggtacattaggtacgttaatggctggcttactagaaggaacagctacaattaatgaattgttagaacatgggaatttagggattgcaacgttaacagggtctgatggcgaagtaatatttttagacgggaaggcatatcatgctaacgagcataaagaatttatagaattaaaaggcgatgagaaagtaccgtatgcatcgattactaattttaaagcgagtaagacatttccattgcaacaattatcacaagatgatgtattcgcacaaattaaaaatgaaatgttaagtgagaatttattttcggctgttaaaatttatggcacatttaaacatatgcatgtacgaatgatgcctgctcagcaaccgccatatacacgtttgattgattcagcacgcagacaacctgaggaaaaaagacaagatattcgtggtgccattgttggattttttacaccagaattatttcatggcgtagggtctgctggttttcatatacattttgcggatgatgaaagagcttatggtggacatgttcttgactttgaagtggatgacgttgtcgttgagatacaaaactttgaaacattccaacaacatttcccggtaaataacgagacgtttgttaaagcgaaaatagactataaagatgtggcagaagaaattagagaagctgaa

SEQ ID NO: 4205 - DNA, 1814 bp, Staphylococcus aureus
agagaagatgtccgcaatatagcaattattgctcacgttgaccatggtaaaacaactttagtagatgagttgttaaaacaatctggtatattcagagaaaatgaacatgtcgatgaacgtgcaatggactctaacgatatcgaaagagagcgtggaattacgattctagccaaaaatacggctgttgattataaaggtacacgtatcaatattttggatacaccaggacatgcagactttggtggagaagtagaacgtattatgaaaatggttgatggggttgtcttagtagtagatgcgtatgaaggtacaatgcctcaaacacgttttgtacttaaaaaagcgctagaacaaaacctgaaacctgttgttgttgttaataaaattgataaaccatcagcacgtccagagggtgttgtagatgaagttttagatttatttattgaattagaagcaaacgatgaacaattagaattccctgttgtttatgcttcagcagtaaatggtacagctagcttagatcctgataaacaagatgataatttacaatcattatatgaaacaattattgattatgtaccagctccaattgataacagtgatgagccattacaattccaagtagcattgttggactacaatgattatgttggacgtattggtattggtcgtgtattcagaggtaaaatgcgtgtcggagataatgtatcactaattaaattagacggtacagtgaaaaacttccgtgtaactaaaatctttggttattttggactaaaacgtttagaaattgaagaagcgcaggctggagatttaattgctgtttcaggtatggaagacattaacgttggtgaaactgtaacaccacatgaccatcaagaagcattgccagttctacgtattgatgagcctactcttgaaatgacatttaaagttaacaattcaccatttgctggccgtgaaggtgactttgtaacagcgcgtcaaattcaagaacgtttaaatcaacaattagaaacagatgtatctttgaaagtttctaacacagattctccagatacatgggtagttgctggtcgaggtgaattgcatttatcaatccttattgaaaatatgcgtcgtgaaggttatgaattacaagtttcaaaaccacaagtaattattaaagaaattgatggtgtaatgtgtgaaccatttgaacgtgtgcaatgtgaagtgccacaagaaaatgcaggtgcggttattgaatcattaggtgcacgtaaaggtgaaatggttgatatgactacaactgataatggacttacacgtttaatctttaatgtaccggctcgtggtatgattggttatacgactgaatttatgtcaatgacaagaggttacggtattattaaccatacatttgaagaatttagaccacgtattaaagcacaaattggcggccgtcgtaatggtgctttaatttcaatggatcaaggttctgcaagtacttatgccattttaggacttgaagatagaggtgtaaacttcatggaacctggtactgaagtttatgaaggtatgattgttggtgaacataatcgtgaaaatgatttaactgttaacatcactaaaacaaaacatcaaactaacgtacgttctgcaacgaaagaccaaacacaaacaatgaatagaccgcgtattctaacattggaagaagcattacaattcattaatgatgatgaacttgttgaggtacaccagaaagcatacgtttaagaaagaaaattttaaacaaaaatgttcgtgaaaaagaagcaaagcgtatcaaacaa

SEQ ID NO: 4206 - DNA, 882 bp, Staphylococcus aureus
ttaggatcacatgtttcaatgagtggtaaaaagatgttagaaggttctgctatagaagcgcatgaatatggtgaaacaacatttatgatttatactggtgcacctcaaaacacgcgccgtaaaagtattgaagatttaaatataactaaaggtcatgaagtgatggaaaaatatggcttatctaatattgttgttcatgcaccatacatcattaatattgcaaatacaaccaaaccagaaacgtttaatcttggtgtagatttcttgcaacaagaaattgaaagaacgcaagctataggcgctaaagatattgtattacatccaggtgcgcatgttggagctggtgttgatgccggaattaataagattattgaaggattaaatgaagttttaacgaatgacaataatgttcgtattgcgcttgaaacgatggcaggtaaaggtacagagattggtcgctcgtttgaagagttagcacgtattattgatggagttcataataacgaacgtttatcagtatgttttgatacatgtcatacgcatgatgctggatataatgtgaaagaggactttgatggcgtattaaatgaatttgataaaatcattggagtcgacagaattaaagttgttcatgtcaatgattctaaaaatgaccgtggcgctcaaaaagaccgacatgaaaatattggcttcggttacattggttttgatgcattaaattacattgtgcatcataatagttttaaagatattccgaaaatcttagaaacaccttatgttggtgaagataagaaaaataaaaaaccgccatataaacttgaaattgaaatgttaaaacaacagcaatttgacccagaattaaaaaataaggttatgcaacaa

SEQ ID NO: 4207 - DNA, 2007 bp, Staphylococcus aureus
atggggaaaattaaagaactccaaacctcattagcaaataaaattgcagcaggtgaagtagttgaaagaccgagttctgttgtgaaagaactgttggaaaatgctatagatgcaggcgctacagaaataagcattgaagtagaggaatctggcgtccaatctattcgcgtagtcgataatggaagcggaattgaagcggaagacttaggattagtatttcatagacatgcgactagtaaattagatcaagatgaagatttatttcatattaggacattaggattccgtggtgaagcactagccagtatttcatcagttgcaaaagtaacattgaagacttgcacggataatgctaatggaaatgaaatatatgtagaaaatggtgaaatattaaatcataagcctgcaaaagcgaaaaaaggaacagatattcttgtagaatcattattttataatacaccagcacgtttaaaatatattaaaagtttatacactgaactaggtaaaataacagatattgtcaacagaatggcaatgagccatccggacattcgaatagcgctcatttcagatggcaaaacaatgttaagtacaaatggttcaggacgaactaatgaagtgatggcagagatttatgggatgaaagttgcacgagatttagtacatatatctggagatacaagtgattatcacattgaaggttttgttgcaaagcctgaacattctagaagtaataagcactatatttctatttttattaatggacgatacattaaaaactttatgctaaataaagcgattttagaaggctatcatacactcttaacaataggtaggttcccgatttgttatattaatattgaaatggatccaatcttagtagacgtaaatgttcatccaacaaaactagaagtgcgtttatcaaaagaagagcaactataccaattgattgtaagcaaaatacaagaagcatttaaagaccgtatattaattcctaaaaataacttggattatgtgccgaaaaaaaataaagtgttacattcattcgaacaacaaaaaatcgaatttgaacaaagacaaaacacagagaataaccaagagaaaacgttttcatctgaagaaagtaacagtaagccatttatggcagaaaatcaaaacgatgagatagttataaaagaagattcatataatccattcgtaacgaaaacgtctgaaagtttaatagctgatgatgaatcttccggttataataatacacgtgaaaaagatgaagactacttcaaaaaacaacaagaaattttacaagaaatggatcaaacatttgattcaaatgacgatacatctgtgcaaaattatgagaataaagcgtccgatgattattatgatgtaaacgatattaaaggaacaaaaagtaaagaccctaaacgaagaattccatatatggaaattgttggccaagtacatggaacgtatattattgctcaaaatgaatttggcatgtacatgattgaccagcatgcagctcaagaaagaataaaatatgaatattttcgagataaaataggtgaagttaccaatgaagtacaagatttattaatcccgttaacatttcatttttcaaaagatgaacaattagtcattgatcaatataaaaatgagcttcaacaagtaggtatcatgttagaacattttggtggtcatgattatattgtaagtagctatccagtttggttccctaaagatgaagtagaagaaattattaaagatatgattgagctaattttggaagagaaaaaagtagatatcaaaaaattacgtgaagatgtagcaatcatgatgtcatgtaaaaaatctattaaagcgaatcattatttacaaaaacatgaaatgtctgatttaattgatcaattaagagaagcggaagatccatttacatgtccacatggtcgtccaattatcattaatttttcaaaatacgaattagaaaaattatttaagcgtgtgatg

SEQ ID NO: 4208 - DNA, 900 bp, Staphylococcus aureus
aagaaaattaggaaattacctatcattcttctgattgttgtaattttacttatcgcattagttgtatatattgtacatagttacaatagcggtgtagaatatgccaagaaacatgcgaaagatgttaaagtacatcaatttaatggaccagtaaaaaatgatggtaaaatttctattcttgtactcggtgcagataaagcacaaggtggacaatcaagaacagattctatcatggttgttcaatatgactttatcaataaaaagatgaaaatgatgtctgtcatgcgtgatatttatgcagatattccaggatatggaaaacacaaaattaattcagcatacgctttaggtggtccagagctacttagaaaaacacttgataaaaatttaggaattaatcctgaatattatgcagtagttgattttactggatttgagaaaatgattgatgaattaatgccagaaggtgtaccaattaatgtcgaaaaagatatgtcgaaaaatattggtgtatctttgaaaaagggtaaccataggttgaatggtaaagaattacttggttatgcaagattccgtcacgaccctgaaggtgacttcggacgcgtgcgacgtcagcaacaagtaatgcaaacattgaaaaaagaaatggttaattttagaacagttgttaaattaccaaaagttgcaggtattttaagaggctatgtgaatacaaacattcctgattcagggattttccaaacaggtttgagttttggtatccgaggtgaaaaagatgttaagtcattgactgtgccaatcaagaactcatacgaagatgtcaatacaaatactgatggtagtgcattacagattaataaaaacacaaataaacaagctattaaagactttttagatgaa

SEQ ID NO: 4209 - DNA, 690 bp, Staphylococcus aureus
ttatatcaacatggtacattaggcacattaatggcaggtttattaaaaggaactgcatcaataaatgaattattgcaacatggtgatttaggtatcgctacactaacaggttcaaatggtgaggtcatctttttagatggaaaagcctatcatgcaaatgaacataaagaatttgtggaattaaaaggtaatgagttaacaccatatgcaactgtaactaaattcgtagcagatacaagctatgaaacgaaagataaatcttctgaagcagtttttgcagaaattaaggaaaagatgttgagtgaaaatttattttctgcagtaaaaatttcaggcttatttaaaaaaatgcatgtacgtatgatgccggcacaagagccaccttatacacgtttaattgattcagctagaagacaacctgaacaaactgaaacatacgtcaaaggttcagtcgttgggttctttacaccagaactattccatggtatcgggtcagcaggattccatgtacactttgcaaatgatgatcgtaactttggtggacatgtcttagattttgaagtagaagatgttaaggtagaaatccaaaatatagaaacatttgaacagcattttccaattcaagatgaagatttcataaatgcaaatattgactataaagatattgcagacgaaattagagaagctgaa

SEQ ID NO: 4210 - DNA, 1122 bp, Staphylococcus aureus
atggaaaaactaaaattaatgacaatagttggtacaaggcctgaaatcattcgcttatcatcaacgattaaagcatgtgatcaatattttaatcagatattagtacacactggtcaaaattatgattatacattgaatcaaattttctttgatgatttggaattaagacaaccggaccactacttagaggcagttggaagtaacttcggagaaacgatggggaatattattgcgaagacatatgatgttttattacgcgaacaaccagatgcacttttaattcttggtgatacaaatagttgtttagcagcagtatctgctaaacgattaaagattcctgtgttccatatggaagcgggtaatagatgctttgatcagaatgtacctgaagaaatcaatcgtaaaattgttgaccatgtcagtgatgtgaatctaccttatacagaacatagcagacggtatttattagatgaaggcttcaataaagcgaatatatttgtgacaggatcaccgatgacagaagtgatagaagcgcatcgagataaaattaatcacagtgacgttttaaataaactaggattagaaccgcaacaatacattttagtatctgcgcatagagaagagaatatcgataatgaaaagaattttaaatcattaatgaatgcgataaatgatattgccaaaaagtataaaatgcctgtgatttattcaacgcatccaagaagttggaagaaaattgaagaaagtaaatttgaatttgatccattagttaaacagctaaagccatttggtttctttgattataatgcattgcaaaaagatgcatttgttgtgctatcagatagtggaacattgtcagaagagtcgtctattttgaagttccctggtgtccttattcgaacttccacagaaagaccggaagtactagataaaggtacggttattgtaggtggtattacctataacaatctaatccaatccgttgaactagcaagagagatgcaaaacaataacgaaccgatgattgatgctattgattataaagacactaacgtttcgacaaaggtagttaaaattattcaaagttataaagatattatcaatcgaaatacttggaggaaa

SEQ ID NO: 4211 - DNA, 1584 bp, Staphylococcus aureus
ttacataaaaaattatggtcgattgcgaatgatttaagagggaacatggatgcgagtgaattccgtaattacattttaggcttgattttctatcgcttcttatctgaaaaagcggaacaagaatatgcagatgccttgtcaggtgaagacatcacgtatcaagaagcatgggcagatgaagaatatcgtgaagacttaaaagcagaattaattgatcaagtcggttacttcattgagccacaagatttattcagtgcgatgattcgtgacattgaaacgcaagatttcgatatcgaacacctggcgacggcaattcgtaaagttgaaacatcaacactaggtgaagaaagtgaaaatgactttatcggactgttcagcgatatggacttaagttcaacgcgactaggtaacaatgttaaagaacgtactgcactaatttccaaagtcatggttaaccttgacgacttaccattcgttcacagtgacatggaaattgatatgttaggtgatgcatacgaatttcttatcgggcgctttgcggcgacagcaggtaaaaaagcaggcgagttctatacaccacaacaagtatctaagatactggcgaagattgtcacagacggtaaagataaattacgtcacgtatatgacccaacatgtggttcaggttcattattgttacgtgttggtaaagaaacgcaagtgtatcgttatttcggtcaagaacgtaacaataccacatacaacttagcgcgtatgaatatgttattacatgatgttcgttatgaaaatttcgatatccgtaatgatgacacgttggaaaatccagcctttttaggccatacatttgatgcggttattgcgaacccaccatacagtgcgaaatggacagcagattcaaaatttgaaaatgatgaacgatttagtggttacggcaaacttgcgccaaaatccaaagcagactttgcctttattcaacacatggtacattacttagacgatgaaggtaccatggccgttgtactcccacatggtgtcttattccgtggtgccgcagaaggcgtgattcgtcgttatttaattgaagaaaagaactacttagaagccgtgattggtttgccagcgaatattttctatgggacaagtattccaacatgtattttagtgtttaaaaaatgtcgccaacaagacgacaacgtattatttatcgatgcatccaatgattttgaaaaaggaaaaaatcaaaaccatttaagtgatgcccaagtcgaacgtattatagacacatataagcgtaaagaaacaattgataaatatagctacagcgcgacattacaagagatcgccgataacgattacaacttaaacataccgcgatatgtcgatacattcgaagaagaagcgccaattgatttagatcaagtccaacaagatttgaaaaatatcgataaagaaatcgcagaaattgaacaagaaatcaatgcatacctgaaagaacttggggtgttgaaagatgagtaatacacaaaagaaaaatgtgccagagttgagattcccagggtttgaagacgagtgggaagagaagaa

SEQ ID NO: 4212 - DNA, 942 bp, Staphylococcus aureus
atgtttaagaaaaaaatgttagctgcaactttgtcagtaggactgattgcgcctttagcatctccgattcaagaatctagagcaaatactaatattgaaaatattggtgatggtgctgaagtaatcaaacgtacggaggatgtaagtagtaagaaatggggcgttactcaaaatgtccaattcgactttgtaaaagataaaaaatataacaaagacgctttaattgttaaaatgcaaggttttatcaattccagaacttcattttcagatgtgaagggtagtggatatgaattaacaaaacgaatgatttggccatttcaatataatataggactgacgactaaagatccaaatgttagcttaatcaattacctccctaaaaacaaaatagaaactacggatgttggtcaaacattaggatataacattggaggtaatttccagtcagcaccatctataggtggcaatggctcatttaattattctaaaacaattagttatacccaaaagagttatgtcagtgaagtagacaagcaaaactcaaaatctgttaaatggggcgttaaagcaaacgaatttgttacgcctgatggtaaaaaatctgcgcatgatagatatttattcgtacaaagtccaaatggtccgtcaggttcagcaagagaatactttgctcctgataatcaattgccaccattagttcaaagtggctttaatccatcatttatcactacactatcacatgaaaaaggttcaagtgatacgagtgaatttgaaatttcatatggtagaaacgtagatattacatatgcgactttattccctagaactggtatttacgcagaaagaaagcataatgcatttgtaaatagaaactttgtagttagatatgaagttaactggaaaacacatgaaattaaagtgaaaggacataattaatatgaa

SEQ ID NO: 4213 - DNA, 399 bp, Staphylococcus aureus
aatgatgctattaaaattttaaaagagaacggtttaaaatatacagataaacgtaaagatatgttagatatttttgtcgaagaagataagtatataaacgcaaagtatatacaacaagttatggatgaaaattatcctggaatttcattcgacacaatatatagaaatctgcacttatttaaagatttagggattattgaaaatacagaacttgatggtgaaatgaagtttagaatcgcttgtacaaaccatcatcatcatcattttatctgtgaaaagtgtggagatacaaaggtaatagattattgtccaatagatcagataaaattatcactacctggtgttaatattcacaaacacaaacttgaagtttatggtgtatgtgagtcttgccaagat

SEQ ID NO: 4214 - DNA, 885 bp, Staphylococcus aureus
atgggacttgtaattgaacatgttacgaaacgttttggcaagatgacggcagtaaatgatatttcattagagttagaatcaggcaaaatgttaggttttctaggaagaaatggtgcaggtaaaacaacgacatttcgtatgattttaggcttaagtgaaccaactgaaggacacattacgtataacggtaaaaaactagataaaacaatgtacaatcgtattggttatttgccggaagaacgcggtttacatgggaaactgacagttgaagaagaattgaaatatttggcaactttaaagggaatgtcaaaaacagaaatacaacagcaaatatcgtattggcttgagcgttttgatattactgaaaaccgtaaaaaacgaattgatagtctatcaaaagggaatcaacaaaaaattcagctgttagcaagtatgttacataaaccagaattactaatattagatgagcctttcagtggtctagacccagttaatgttgagttattaaaagaagcagttaaagacttaaatgattggggcagtacaatcgtttatagttctcaccgtatggagcatgttgaagaattatgtgatgatgtttgtattttagataaaggtcaacttgttgtttctggtgatatcaatcatgtacgtgcatctaatggtaacaagaaagttgtcattgagtcagaaacaacactaccagatttaacacacattagaggcatcattcatagtgaaaacatgaagcaaggtattcagttgacgattgagaatgaagacgtagccaaagatatttatcaagttgtagcacatcaaggttatgttaaacgattccaagttgtagaaccatcattacaagatatattcattgagaaggttggt

SEQ ID NO: 4215 - DNA, 1487 bp, Staphylococcus aureus
atgtcagaagaaatgaatgaccaaatgttggttcgacgtcaaaaattacaagaattatatgatcttggtatagacccgtttggttctaaatttgaccgttcaggtttatctagtgatttgaaagaagagtgggaccagtattctaaagaagaattggtagaaaaagaagcggatagtcatgtcgctatagctggacgattaatgactaagcgtggtaaaggtaaagcaggatttgcacacgttcaggacttagctggacaaattcaaatttacgttcgtaaagatcaagttggcgatgacgaatttgatttatggaaaaatgctgatttaggcgatatcgttggtgttgaaggtgtaatgttcaaaacaaatactggcgaattatcggttaaagcgaagaaattcacgctactaactaaatcattgcgaccattaccggataaattccacggtttacaggatattgaacagagatatcgtcaaagatatttagatttaattacgaacgaagatagcactcgtacatttattaatcgtagtaaaatcattcaagaaatgcgtaattatttaaataataaaggtttcttggaagtagaaacacctatgatgcaccaaattgctggtggagcagctgctagaccatttgtaacacatcataatgcattagatgcaacgttatacatgcgtattgctattgagttgcatttgaaacgtttaattgtcggtggacttgaaaaagtatatgaaattggtagagtattccgtaatgaaggtgtatcaactagacataaccctgaattcacaatgattgaattatatgaagcatatgcagattatcatgacattatggatttgacagaatctatggtgagacatattgccaatgaagtattaggttctgcaaaagtacaatacaatgggaaacgattgatttagaatctgcttggactcgtttgcatattgttgatgctgtaaaagaagctactggtgtagatttttatgaagttaaaagtgatgaagaagctaaagctttagctaaagaacatggtattgaaattaaagatacaatgaaatatggtcatattttaaatgaattctttgagcaaaaagttgaagaaacacttattcagccaacgtttatctatggtcatccgactgaaatttcacctttagcgaagaaaaatcctgaagatcctagatttactgatcgtttcgaattgttcattgtaggtagagagcatgcaaatgcatttactgaattaaatgatcctattgatcaaaaaggtcgttttgaagcgcaacttgttgaaaaagcacaaggtaatgatgaagcgcatgaaatggatgaagattacattgaagcgttagaatatggtatgcctccgacaggtggtcttggtatcgggattgacagattagttatgttattaactgactctccatcaatcagagacgtattattattcccttatatgagacaaaaataa

SEQ ID NO: 4216 - DNA, 489 bp, Staphylococcus aureus
atgtctgctatcattgaagctaaaaaacaactagttgatgaaattgctgaggtactatcaaattcagtttcaacagtaatcgttgactaccgtggattaacagtagctgaagttactgacttacgttcacaattacgtgaaactggtgttgagtataaagtatacaaaaacactatggtacgtcgtgcagctgaaaaagctggtatcgaaggcttagatgaattcttaacaggtcctactgctattgcaacttcaagtgaagatgctgtagctgcagcgaaagtaatttctggatttgctaaagatcatgaagcattagaaattaaatcaggcgttatggaaggcaatgttattacagcagaagaagttaaaactgttggttcattaccttcacacgatggtcttgtatctatgcttttatcagtattacaagctcctgtacgcaacttcgcttatgcggttaaagctattggagaacaaaaagaagaa

SEQ ID NO: 4217 - DNA, 360 bp, Staphylococcus aureus
aatcatgaacaaatcattgaagcgattaaagaaatgtcagtattagaattaaacgacttagtaaaagcaattgaagaagaatttggtgtaactgcagctgctccagtagcagtagcaggtgcagctggtggcgctgatgctgcagcagaaaaaactgaatttgacgttgagttaacttcagctggttcatctaaaatcaaagttgttaaagctgttaaagaagcaactggtttaggattaaaagatgctaaagaattagtagacggagctcctaaagtaatcaaagaagctttacctaaagaagaagctgaaaaacttaaagaacaattagaagaagttggagctactgtagaattaaaa

SEQ ID NO: 4218 - DNA, 1257 bp, Staphylococcus aureus
atgaaatttacagagttaactgttaccgaatttgacaactttgtacaaaatccatcattggaaagtcattatttccaagtaaaagaaaatatagttacccgtgagaatgatggctttgaagtagttttattaggtattaaagacgacaataacaaagtaattgtagcaagccttttctctaaaattcctactatgggaagttatgtttactattcgaatcgtggtccagtaatggatttttcagatttaggtttagttgattattatttaaaagagttagataaatatttacagcaacatcaatgtttatatgttaaattagatccgtattggttatatcatctatatgataaagatatcgtgccatttgaaggtcgcgagaaaaatgatgccttagtaaacttgtttaaatcgcatggttacgagcatcatggctttacaactgagtatgatacatcgagccaagtacgatggatgggtgtattaaaccttgaaggtaaaacacctgaaacattgaaaaaaacatttgatagtcaacgtaaacgtaatattaataaagcgataaactatggtgttaaagtcagattccttgaacgtgatgagttcaatcttttcctagatttatatcgtgaaactgaagagcgtgctggatttgtatcaaaaacagatgattatttttataactttattgacacatatggagataaagtattagtaccattagcatatattgaccttgatgaatatgtgttaaagttgcaacaggaattgaatgacaaagaaaatcgtcgtgatcaaatgatggcgaaagaaaacaaatcagataaacaaatgaagaaaattgcagaattagataagcaaattgatcatgatcagcatgaattattgaatgcaagtgaattgagcaaaacggacggcccaattctaaaccttgcttctggcgtttattttgcaaatgcatatgaagtgaattatttctctgggggttcatcagaaaaatataatcaatttatgggaccatacatgatgcattggtttatgattaactattgcttcgataatggttatgatcgttataatttctatggtttatcaggtgattttacggaaaacagtgaagattatggcgtataccgctttaaacgtggatttaatgtacaaatcgaagaattaataggggatttctataaaccaattcataaagtgaaatattggttgttcacaacattggataaattacgtaaaaaattaaagaaa

SEQ ID NO: 4219 - DNA, 2613 bp, Staphylococcus aureus
atgtctaatgttacaccaatgatgcagcaatatttaaaaataaaatcagaataccaagattgcttattattttttagactaggtgatttctatgaaatgttttatgaagatgccaaggaggcatcacgtgtacttgaaattactttaactaaaagagatgctaaaaaagaaaatccaattccgatgtgtggtgttccgtatcattctgcagatagttatatagatacacttgttaataatggatataaagtagctatttgtgaacagatggaagatccgaaacaaacgaaaggtatggttagacgtgaggtggtaagaattgtgactccaggaactgtgatggagcaaggtggtgtagatgataaacaaaataactatattttaagttttgttatgaatcagcctgaaattgcgcttagttactgtgatgtttctactggtgaattaaaggttacacattttaatgatgaagcgactttattaaatgaaattacgacgataaaccctaacgaagttgttatcaatgacaatatttccgatcatttaaaaagacaaattaatatggtgacagaaacaataacagtcagggaaacattatcatctgaaatctatagtgtgaatcaaactgaacataaattaatgtatcaagcgacacaattattgctagattatattcatcatacacaaaaacgtgatttatcgcatatcgaggatgttgttcaatatgcagctatagattatatgaaaatggatttttatgctaagagaaaccttgagttaacggaaagcattcgattaaaatccaaaaaaggaacgctactttggctgatggacgaaacgaaaacaccaatgggagcacgtcgattaaaacaatggatagatagaccactaataagtaaagaacaaattgaagcacgattagatatcgttgatgaatttagtgctcatttcatagaaagagacactttaagaacatatcttaatcaagtgtatgatattgaacgtcttgttgggcgtgttagttacggaaatgttaatgcgagagatttaattcaacttaaacattccatttctgaaataccgaacattaaagcattactaaattctatgaatcaggatactcttgtacaagttaatcaactagaaccacttgatgatttacttgatatattagaacagagtttagtagaagaaccaccaatttcagttaaagatggtggactattcaaagttggttttaatatgcaattagatgaatatcttgaagcttcaaaaaacggaaaaacatggttagcagaactacaagccaaagaaagacaacgtacaggaataaaatcattgaaaataagctttaataaagtgtttggttattttatagaaataacacgtgccaacttgcaaaattttgaaccaagtgaatttggttatatgaggaagcaaacgttatcgaatgcggaacgatttataactgatgaacttaaagaaaaagaagatatcattttaggtgcggaagacaaagccattgaattagaatatcaattatttgttcagctacgtgaaaaagttaaaaaatatactgaacgtttacaacaacaagctaaaattatttcagagttagattgtttacagagttttgcagaaattgctcaaaaatataattatactaggccttcatttagtgaaaataaaacattagaattagtggaatctaggcacccagtagtggaaagagtaatggattataatgactatgtgcctaataattgtcgattagataatgaaacatttatatatttaattacaggtccgaatatgtctggtaaatcgacgtatatgagacaagttgccataattagcataatggcccaaatgggagcttatgtcccttgtaaagaggctgtgttacctatatttgatcaaatattcactagaataggtgcggcagatgatttggtttcaggtaagagtacgtttatggtagaaatgctagaagcacaaaaggcattaacttatgcaacagaggatagtttgattattttcgatgaaattggacgtggtacttcaacgtatgacggtttagctttagcgcaggcaatgatagagtatgtagctgaaacatcacatgctaaaacgttattttcaacacattatcatgaattgacaacattagatcaagcattaccaagtctaaaaaatgttcacgtcgctgctaatgaatataatggtgaacttatattcttgcataaagtcaaagatggtgcagttgacgatagttatggtattcaagttgcgaaattagctgatttacctgaaaaagttattagcagagcacaagttatcctaagcgagtttgaagcgtctgctgataaaaaatcatcgatatcaaatttaaaaatggtcgaaaatgaacctgaaattaatcaagaaaattcaaacttaagtgttgaagaaacaactgatactttatctcaaaaagactttgaacaagcatcatttgatttgtttgaaaatgatcaagaaagcgagattgaactacaaattaaaaatttgaatttatctaatatgacaccaattgaggcattggtgaagttaagtgaattacaaaatcaatta

SEQ ID NO: 4220 - DNA, 609 bp, Staphylococcus aureus
ctaaatgtgtattttatttgtgggacctccgatgttccgagtcatcgaactattcatgaagtattagaagcagcattaaaggcagggattacacttttccaatttcgagaaaagggtgaatcagctttaaaaggaaacgataaacttgtattagctaaagaattacagcatctctgtcatcaatatgatgtgccttttatcgttaatgatgatgtatccttagcaaaagaaattaacgcggatggtatacatgtcggtcaagatgatgcgaaagtcaaagagatagcacaatatttcactgataaaattattggactaagtattagtgatttaggtgagtatgcaaaatctgatttaactcatgttgattatataggtgttggaccaatctatcctacgccgtcaaagcatgacgcgcatacaccagtaggtccagaaatgattgcaacatttaaagaaatgaatccgcaactaccgattgtagctattggcggtataaatactagtaacgtggcgccgattgtagaagcaggtgccaatggaatttcagtcatttcagccatttctaaaagtgaaaatattgaaaagactgttaatcgattcaaagat

SEQ ID NO: 4221 - DNA, 666 bp, Staphylococcus aureus
aaaggaattattcatatatttcatggtatggctgaacatatggaacgttacgataaattagcacatgcactttcaaaggatggcttcgatgtgatacgtcataatcatcgaggccatggtattaatattgatgaatcaacaagagggcattacgatgatatgaaacgagttatcggtgatgcctttgaagtagcgcaaacagtgagaggcaatgttgataaaccatacattataatcggacattcaatgggatccgttatagctagattgtttgtagaaacatatccgcaatatgttgatggtctaattttaagtggtactggtatgtatccattatggaaaggattaccaactgttaaggtgttacaactgattacaaaaatttatggtgccgagaaacgggttgaatgggttaaccagttagtatcaaatagttttaataaaaaaatacgtccattacgtacacaaagtgattggatttctagtaatccaactgaagtagacaactttattaaagatccatatagtggatttaatgtgtcaaatcaattattatatcaaacagcctattatatgctacatacatcacaattaaaaaatattaaaaagttaaatcatgccatgcctatattattagtttcaggatatgacgatcctttaggtgat

SEQ ID NO: 4222 - DNA, 1116 bp, Staphylococcus aureus
aagcgaatgaagataggtataacatgttacccgtccatgggtggttctggaattattgccacagaattaggaattaaattagcagagcgaggtcacgaagtacattttatcacttcaaatatcccgtttagaataagaaaaccattaccgaatatgatttttcatcaagttgaagtgaatcaatatgcagtatttcaatatccaccgtatgatattacgttaagtactaaaatcgctgaagttattaaagaatatgatcttgatttgttgcatatgcactatgctgtacctcatgcaatttgtgggattttagctcgtgagatgtcaggtaaagatataaaaattatgacaacgttacacggtactgatattactgttttgggctatgatcattcactccaaggtgcaattaaatttggcattgaaaaaagtgatattgtgacaagtgtgagtaaatctttagcgcaagaaacacatgaaattatcgaaactaacaaagaaattatcccgatttataattttgtacgtgaaaatgagtttccaactaaacataacacagcattaaaagcacaatttggtatagcaccagatgaaaaagtgttaatacatgtatcgaattttagacaagtaaaacgcatagatactattatagaaacatttgcaaaagtacgtgaaaagatacctagtaaattaattttacttggtgatggccctgaattagtgccaatgcgtcaaaagacgaaagagttaaacgtagaagaggatgttttatttttagggaaacaagattgcgtaagtgaattttaccaattatctgacttagtattattattaagtgaaaaagaaagctttggactaactttacttgaggctatgaaaacaggcgtcgttccaattggttcaaatgccggtggaattaaagaggttattaaacatggtgaaactggatttgtcgtagatgtgggtgattgtgattcagcgagtgactatgctatccgattacttgaagataaggtgttatacaacaaacttcagaaaaacatgctagcagatattgctgaacgttttggatcagaactcattacagatcaatatgagtattattatcaaaaaatg

SEQ ID NO: 4223 - DNA, 783 bp, Staphylococcus aureus
gttatcggaaatcctatttcacattccttgtcgcccgttatgcatagagcaaattttaattctttaggattagatgatacttatgaagctttaaatattccaattgaagattttcatttaattaaagaaattatttcgaaaaaagaattagacggttttaatatcacaattcctcataaagaacgtatcataccgtatttagatcatattgatgaacaagcgattaatgcaggtgcagttaacactgttttgataaaagatggcaagtggatagggtataatacagatggtgttggttatgttaaaggattgcacagcgtttatccagatttagaaaatgcatatattttaattttgggcgcaggtggtgcaagtaaaggtattgcttatgaattagcaaaatttgtaaagcccaaattaactgttgcgaatagaacgatggctcgttttgaatcttggaatttaaatataaaccaaatttcattggcagatgctgaaaagtatttagctgaattcgatatcgttattaatacaacaccagcgggtatggctggaaataacgaaagtattattaatttaaagcatctttctcccaatactttaatgagtgacattatttatataccgtataaaacacctattttagaggaagcagagcgcaagggaaaccatatttataatggcttagatatgtttgtttaccaaggtgcggaaagctttaaaatttggactaataaagatgctgatattaattctatgaaaacagcagttttacaacaatta

SEQ ID NO: 4224 - DNA, 3636 bp, Staphylococcus aureus
gtaacgatagtatttggtattacaacgtatttctctgaaaagaaaaagtataacaaagatgttgaaaaacgagagaaagattacaaagcttatttggataataaatctaaagaaattaataaagcgattaaagcacaacgttttagtttgaattatcattatccaacagttgctgaaattaaagatatcgttgaaacgaaagcaccaagaatatatgaaaaaacatcgcatcatcacgatttcttacattataagttaggtattgcgaatgtagaaaagtcattcgaattagattaccaagaagaagaatttaaccaacgtcgggatgaactattcgacgatgctaaagaattgtatgaattttacacagatgtagaacaagcaccattaatcaatgatttaaatcatggaccaattgcatatattggtgcacgacatctcattttagaagaattggagaaaatgctaatccaattgtcaacattccatagttatcatgatttagagtttctatttgtgacacgtgaagatgaagttgaaacattgaaatgggcacgttggttgccacatatgacattgagaggtcaaaacattagagggtttgtttacaatcaacgaacgcgtgaccaaattttaacgtcaatctacagcatgattaaagaacgtatccaagctgtgcgtgaacgcagcagaagtaatgagcaaattattttcacaccgcaattagtgtttgtcattacagatatgtcattaattattgatcatgtcattttagaatatgtaaaccaagatttatcagaatatggtatttcattaatctttgttgaagatgtgattgaaagtttgccagagcatgtagataccattattgatatcaagtctcgtacagaaggcgaactgattacgaaagaaaaagaattagttcaattgaaatttacacctgaaaatattgataacgtcgataaagaatatatcgcgcgacgtttggcgaatttgatacacgtcgaacatttgaaaaatgcaattcctgatagtattacatttttagagatgtataacgtgaaagaagtagatcagcttgatgtggttaatcgatggagacaaaacgaaacatacaaaacgatggcagtacctttaggtgtaagaggtaaagatgatattttatcattgaacttacatgaaaaagcacacgggccacatggtttagttgctggtaccactggttcagggaaatctgagattattcaatcatacattttatctttagctattaattttcatccacatgaagttgcgttcctattgattgactataaaggtgggggtatggcgaacttatttaaagatttagtccatttagttggtacgattacaaacttagatggcgatgaagcgatgcgtgccttaacatcaatcaaagctgaattgagaaaacgtcaacgtttattcggagagcatgatgttaaccatattaatcaataccataagttatttaaagaaggtgttgcgacagaaccaatgccacatttattcattatttccgatgagtttgccgaattaaaatcagaacaacctgattttatgaaagaacttgtatcaacggcacgtattggacgttcgttaggtattcatttaatacttgcgacacaaaaaccatcgggtgttgttgatgaccaaatttggtctaactctaaatttaaattggcattaaaagtacaagatagacaagacagtaatgaaattttaaaaacaccagatgcagcagacattacattaccaggtcgtgcgtatttacaagttggtaataatgaaatttatgaattgttccaatctgcatggagtggagcaacatatgacatcgaaggcgataaattagaagttgaagataagacgatttacatgattaatgattatggtcaacttcaagcaatcaacaaagacttgagtggacttgaagatgaagaaacgaaagaaaatcaaactgagttagaagcggttatcgatcatatcgaatctattacaacacgattagaaattgaagaagttaagcgtccatggttaccaccattaccagaaaatgtatatcaagaagatttagtagaaacagatttcagaaaattatggtcagatgatgcaaaagaagtggaattaacattaggacttaaagacgtaccagaagaacaatatcaaggaccgatggtattgcaattgaaaaaagctgggcacatcgcgttaatcggaagtccaggatatggtagaacaacgttcttacacaacattattttcgatgttgcaagacaccatcgtcctgatcaagcacacatgtacttgttcgatttcggtaccaatggtttgatgccagtcacagatataccacatgtcgctgattactttacagtagatcaagaagacaagattgcgaaggcgatacggaagatacatgatattatttctgagcgaaaaagactattaagtcaagagagagtagttaatatagagcaatataataaagaaactggaaattcaattccaaatgttttcttaattatcgataactacgacacggtgaaagaatcaccatttatggaagaatatgaagaaatgatgtctaaggtgacacgtgaaggtttagcattaggggtatacatcgttctttcaggatcaagatcaagtgcaataaaatcagctatatttactaacattaaaacaagagttgcgctgtacctctttgaaaataatgaattaacaaatattattggttcttataaaaaaggtgtgaaagatgttaaaggtagagctgcaataaatgatgataacttcacacagttccaaattgcgcaaccatttgaattagcagatggacaaacatataacgagcgcattaaaaatgaagtagcacaaatgaaagaattctatgtaggagattatccaaaacatatcccaatgatgccagataaggtattaatggaggatatacaagaaacatatgatttggaaaaaatcattcatgaagaacacaaattaccattaggattagactttgaggatgtggaactagttagcttagatctgacaagttcttcgattgtaacagcaattaaaccaactgagatggaaaaaatgaatgatgttataatgtctagtttatcagtatatagtaaaaaccaatttgttatcttggttgatgcagaagataatatgagccagtatgcagaagatgtaacctcttattattcagcaccatcagatttgagcaacattagattaggatttaagcaagaaatagaagcaaggaaaaatggcgagaaaagtatagaggaatgcaagattgtatttataaataatattaaacgattcaatcaattaactggaatgacagaagctgaactacgtgtgttatttcatgacggtcagaaagttcatattatcattattgcaagtggactatactcagatacaattggtgcatttgatagagaaagtaaaatgatggtaagaactataaatcaagctttgattagtcataagatatcggaacaagaatttataagagttaaagatcgatttggtgaaccagaattaaaagtgggagaaatgtattacattaataatcaagaatatcaaaaaataaaacta

SEQ ID NO: 4225 - DNA, 1971 bp, Staphylococcus aureus
gatcaattagctgttgatacgctacgtgcactaagtatcgacacaatcgaaaaagcgaattctggtcatccaggattacctatgggagctgccccaatggcttacactttgtggacacgtcatctgaattttaatccacaatctaaagattacttcaatagagaccgtttcgtattatcggcagggcatggttcagcattattgtatagcttgttacatgtttctggtagtttagaattagaagaattaaagcaatttagacaatggggttctaaaacgccaggccatcctgaatacagacatactgatggtgtagaagttactactggaccacttggacaaggttttgctatgtcagtaggattagctttagcagaagatcacctagcagggaaatttaataaagaaggatataatgttgtagatcattacacatatgtattagcttctgacggtgatttaatggaaggtatttcgcatgaagcagcttcatttgctggacataataaattaagtaaattagttgttttatacgattcaaatgatatttcattagatggcgaattaaataaagctttttctgaaaacacaaaagctcgttttgaagcatatggttggaattacttactagttaaagatggtaatgatttagaagaaattgataatgcgattactactgctaaatctcaagaaggaccaacaattatcgaagttaaaacaacaatcggatttggttcaccgaataaagcaggaactaatggtgttcatggggcacctttaggtgaagatgaaagaaaattaacattcgaaaattacggtttagatcctgaaaaacgttttaatgtttcagaagaagtatacgaaattttccaaaatactatgttaaaacgtgctaatgaagatgaatctcaatggaattcattattagaaaaatatgcagaaacatatcctgaattagcagaagaatttaaattagcgattagtggtaaattgcctaaaaattataaggatgaactaccacgttttgaacttggtcataatggtgcatctcgtgctgattctggtactgttattcaagcaatcagtaaaactgtcccttcattctttggtggatcagcagaccttgctggttcaaacaaatccaatgtaaatgatgcaacagattatagttctgaaacacctgaaggtaaaaatgtgtggtttggtgtacgtgaatttgctatgggtgctgctgtaaatggtatggctgcacatggaggtttacatccatatggtgcaacattcttcgtatttagtgattatttaaaaccagcgttacgcttatcatcaattatgggattaaatgctacgttcatcttcacacatgattcaattgcagtaggtgaagatggtcctactcatgaaccaattgaacaattagctggactaagagccattccaaatatgaatgttatccgtcctgcagatggtaatgaaacaagagtagcatgggaagttgccttagaatctgaatctacacctacttcattagtattgacacgtcaaaacttaccggttttagatgtaccagaagatgtagttgaagaaggcgttcgaaaaggtgcctatacagtttatggctctgaagagacaccagaattcctattattagcttcaggttcagaagttagtcttgcagttgaagctgctaaagatcttgaaaagcaaggtaaatcagtgcgtgttgtttcaatgcctaactggaatgcatttgaacaacaatctgaagaatataaagaatcagttattccatcaagcgtaacaaaacgtgttgcgattgaaatggcttcaccgctaggatggcataaatatgtaggtactgcaggtaaagttattgctattgacggctttggcgcaagtgcacctggcgatttagtagttgaaaaatatggctttacaaaagaaaatatcttaaaccaagttatgagctta

SEQ ID NO: 4226 - DNA, 1407 bp, Staphylococcus aureus
gtcaaaaggggacttaaagatcgtcatatttctatgattgcgattgggggttgtattggtacaggtttatttgtaacttctggtggagcaattcatgatgcaggtgctttgggagcattaataggatacgcaattatcggaataatggtatttttcttaatgacgtcacttggcgaaatggctacttatttgccagtatcaggttcatttagtacatatgctacaagatttgttgatccatctttagggtttgcgcttggttggaactattggtttaactgggtagtaactgtagcagcagatattacgattgcagcacaagtcattcaatattggacaccattgcaaggcatacccgcttgggcgtggagtgcattgttcttagttataatttttagtctgaattctttatcggttcgtgtctatggtgaaagtgaatattggcttgcattaataaaggttgttacagttatcgtttttattgctattggtttattaacgattgtaggaattatgggtggacattttgtaggatttgaaatatttaataaaggtgaaggacctattttaggtggcaacctaggaggaagtttgttatcaattctaggtgtattcttaatcgctggtttctcattccaaggtactgagttaattggtattacggctggtgaatcagaaaatcctgaacgtgctgtgccgaaagcgattaaacaagtattctggagaattgtattattttacattttagccatttttgttatcggtatgttaattccttatgatagtagtgcattaatgggaggcggtaatgacgttgcaacctctccgttaacgctagttttcaaaaatgcaggatttgcttttgcagcctcatttatgaatgctgttatcttaacatcagttttatcagcaggaaactctggaatgtatgcctcaacgcgtatgctttattcaatgagtaaagataaattggcgtttgaaacatttgggaaaacaaataaaaatggtgtgccatatatgtctttattagtaactgcaattattgtagtcatcatatttgtggtacaaagtgttacagaaggtgcttatcaatatatcgttgctgcaagtgggttaactggctttattgcctgggtaggtatcgcagtgagtcattatcgatttagaagagcatttgataaacaaaattatgataaatctaaattgaaatatacagctaaattgtttccgttcggacctatttttgcagcaatcttatgtattgttgtaatcatcggtcaagatgtggactttattaaaacaggagattttaattttagccgcttcctaattacgtatatgggaattccagtatttttagcattctttatttatcataagcttcgatataaaacgaaaaaaattcca

SEQ ID NO: 4227 - DNA, 603 bp, Staphylococcus aureus
ttagtcgcgctgattgtatttataggtatgttttacagtgtagtgacaaaccaagaatggcttgaaaatatagatatgggatcattgacatggtttacagattatttcggtgagccacaacgtcagtatgttaacaatttgtttaattactatatgacgtttagtgcggaaattggagatgtcaaaggtgtcgtgttgatttccattatcgtcacaatcatactgtttattaaacagaggcatttagcggtttggtttgtgacatatttggtttcaggtgtcatcatgaacaaattaattaaagatactgttttacgtccaagaccatataatcatttagccgttgatacaggcttttcatttccgagtggacactccaacgccagcacattattatatttcgccttaatgatcattattatttcagttgctgctaagacaataacaaaagtgttgagtgcgctggttatgggaatattatggcttagcatattattttgtcgcctttattttcatgcgcattacttttcagatgtcattggcggcacgtcactagcaatcatttgggtagcgttattcttaatggtatacccatactttatt

SEQ ID NO: 4228 - DNA, 1305 bp, Staphylococcus aureus
atgactaaacctatagtagctattgtaggtaggcctaatgtaggtaaatctacaatttttaatagaatagttggagaacgtgtttcgattgttgaagatacgccaggtgtaacacgagatcgtatttattcttcaggtgagtggttaacacatgatttcaatattattgatacaggtggtattgaaattggtgatgcaccattccaaacacaaattagagcgcaggcagaaatcgccatagatgaagcggatgttattatttttatggttaacgtgcgtgaaggattgacacaaagcgatgaaatggtcgctcaaattttatacaaatctaaaaaaccggtcgtattagcggttaacaaagtagataatatggaaatgcgtacagacgtgtatgatttctattcattaggatttggtgaaccgtatccaatatcagggtcacatggtttaggtcttggtgacttgttagatgcagttgtttctcattttggtgaagaggaagaagatccttatgatgaagatacaattcgactatccattattggacgaccaaacgtaggtaaatcaagtttagtaaatgctattttaggtgaagatcgcgttatcgtttctaatgttgcagggacaacgagagacgctattgatacagagtatagttatgatggacaagattatgttttaatcgatactgctggtatgcgtaaaaaaggaaaagtatatgaatcaactgagaaatattcagtattaagagctttaaaagcgattgaacgttcaaatgttgttttagtggttattgatgcagaacaaggcattattgaacaagataaacgtgttgcaggatatgcacatgaacaaggtaaagcagtcgtgattgtcgtaaataaatgggatactgtggaaaaagatagtaaaacgatgaagaaatttgaagatgaagtacgtaaagaattccaatttttagattatgcacaaattgcttttgtgtctgctaaagaacgcacaagattacgtacattattcccttacattaatgaagcaagtgaaaaccataaaaaacgtgttcaaagttcaactttaaatgaagtcgttactgatgcaatttccatgaaccctacaccaacagacaaaggtagacgtttgaatgtcttttatgcaacacaagttgctatagaaccaccgacatttgttgtatttgttaatgatgtagaattaatgcatttttcttataaacgctatttagagaatcaaatccgtgccgcttttggttttgaaggtacaccaattcatattatagctcgaaagaga

SEQ ID NO: 4229 - DNA, 1170 bp, Staphylococcus aureus
atgactgaagaattcaatgaatcaatgattaacgatattaaagaaggtgacaaagtcactggcgaggtacaacaagttgaagacaagcaagttgttgttcatatcaacggtggtaaatttaatgggattattcctattagtcaactatctacgcatcatattgatagcccaagtgaagttgtaaaagagggcgacgaagttgaagcatatgtcactaaagttgagtttgatgaagaaaatgaaactggagcttacatcttatctagaagacaacttgaaactgagaagtcttatagttatttacaagaaaaattagataataatgaaatcatcgaagcgaaagtaacagaagtagttaaaggtggtttggttgttgatgtaggacaaagaggttttgttccggcttcactaatttcaacagacttcattgaggatttctctgtgtttgatggacaaacaattcgtattaaagttgaagaattggatcctgaaaataatagagtcattttaagccgtaaagcagttgaacaagaagaaaacgatgctaaaaaagatcaattattacaatctttaaatgaaggcgatgttattgatggtaaagtagcgcgtttaactcaatttggtgcatttatagacattggcggtgttgatggtttagtgcatgtatctgaactttctcacgaacatgttcaaacaccagaagaagttgtttcaattggtcaagatgttaaagttaaaattaaatctattgatagagatacagaacgtatttcattatcaatcaaagatacgttaccaacacctttcgaaaatattaaaggtcaattccacgaaaatgatgtcattgaaggtgtcgtagtaagattggcaaactttggtgcatttgttgaaattgcaccaggtgtacaaggacttgtacatatttctgaaattgcacacaaacacattggtacgccaggtgaagtgttagaacctggtcaacaagtaaatgttaaaatattaggtattgatgaagagaatgaaagagtatcactatctattaaagcaacattaccaaacgaagatgttgttgaaagtgatccttctacgactaaggcgtacttagaaagcgaagaagaagataatccaacaattggcgatatgattggtgataaacttaaaaatcttaaa

SEQ ID NO: 4230 - DNA, 573 bp, Staphylococcus aureus
ttaatgaaagagattgttattgcatcgaataatcaagggaaaataaatgactttaaagtgatatttccagattaccacgtaataggtatttcagaactaataccagattttgatgtggaagaaacaggatcaacatttgaagaaaatgctatattaaaatcagaagctgctgcaaaagcattgaataaaacggtcatagctgatgacagtggactagaagtttttgcattaaatggtgagccaggtatatactctgcacgttatgctggtgaaaataaaagcgatgaagcaaatattgaaaaattattaaataagcttggtaatacaactgatcgtcgtgcgcaatttgtttgtgtcataagtatgagtggccctgatatggaaacaaaagtatttaaaggtactgtttcaggtgaaattgcagatgggaaatatggcgaaaatggtttcggatatgatccgatattttatgtaccgaaattagataaaactatggctcaactttctaaagaacaaaaagggcaaattagtcatagacgaaatgcgattaatttacttcaagcttttcttgaa

SEQ ID NO: 4231 - DNA, 351 bp, Staphylococcus aureus
atgaaaataattttaaaaaacaatagtgattttccgatttatgaacagattaagcaacaagtaaaacaaaatattttaaaggggcatgttgctcctggagagcatttgccatcaatgagggaacttgccaaagatcttcaagtaagtttgattactaccaaacgagcttatgaagatttagagaaagacggttttgttacaacaattagaggaaaaggaacctttgttaaggaaaaagatagttctattttaaaagagaaacaattttttaccattgaaaatttggttaaagaattggttaatgaagcgcaagccatcgaaatgtcacttgaggaacttcaagatatttta

SEQ ID NO: 4232 - DNA, 1050 bp, Staphylococcus aureus
agaataacacaagtgcatcgtattttagaacaaaaacatttagatgcgattatcattctttcggattacaatagaagatatttatcaggttttactggtaccagtggagcacttatcatatctaaagataaacaatatttgataacagactttagatatattgatcaagcaactaagcaggcgccaaattatgaaattattaatcgtaaatctactattattggtgagattaaagaattactacaccaagagaattttgaaaatgtaggctttgaggggcaccatgtaagttatgatacataccttgaattaaataaaagtcgtatatcattaataagcatttctaatactgtagataaaattagagacgtcaaagatgctgacgaaattgctttaattcaaaaagcagctaatattgttgatgaaacatatgaatatattttaactgttgtaaaagcaggtatgactgaaaaagaattaaaggcaatattagaaagtaaaatgctagaattaggagcagatggaccatcattcgatacgattgtagcatctggtcatagaggtgcattaccacatggtgttgcaagtgacaaaattattgaaaaaggcgacatgattacattagattttggcgcatattataacggctattgttcagatattactagaacatttgctattggagaaccagatcctaaactgaaagaaatatatcaaatagtacttgaatctcaaatgaaagcaattaatgagattagacctggcatgactggtgcagaagctgatgctatttcaagaaactatttagagtcaaaagggtatggaaaagaatttggacattcactaggacatggtattggtttagaaatccatgaagggccaatgctggctcgtacgatacaagataaacttcaagttaacaactgtgttacagtagaacctggtgtttatatagaaggtttgggcggtataagaatagaagatgatattttaattacagaaaatggttgtcaagtctttactaaatgcacaaaagaccttatagtttta

SEQ ID NO: 4233 - DNA, 984 bp, Staphylococcus aureus
gagacattattttcaggcatccaacctagtggaattcctactattggaaattatattggcgcactaaaacaatttgttgatgtgcaaaatgactatgattgttatttctgtatcgtagatcaacatgcaattacaatgccacaagatcgcttaaaattacgtaaacaaactagacaattagcagcgatttatttagcttctggtatagatccagacaaagcaacattgttcatacaatctgaagtccctgcacacgtacaagcaggatggatgttaactacgattgcttctgttggagaactagagcgtatgacgcaatacaaagataaagctcagaaagcagttgaaggtataccagctggtctattaacatatccacctttaatggcagctgatattgttctttacaatactaatatcgttccagttggcgatgaccaaaagcagcatatcgaattgactcgtaaccttgtagatagatttaatagccgctataatgatgtgcttgtaaaacctgaaattcgtatgcctaaagttggtggacgtgtcatgagtttacaagacccaacaagaaaaatgagtaagagtgatgataatgctaaaaacttcatttcattattagacgagccgaatgttgcagctaaaaaaattaaaagcgcagtaactgattcagatggtattattaaatttgatcgtgacaacaagccaggtataacgaatttaatttcaatatacgctggattaacagacatgccaattaaagatattgaggcaaaatatgaaggcgaaggttacggtaaattcaaaggcgaccttgctgaaatagttaaagcatttttagtagaattccaagaaaaatacgaaagtttctataactcagataaacttgatgatattttagatcaaggtagagataaagcacacaaagtttcatttaaaactgtcaagaaaatggaaaaagcgatgggtttaggacgtaagaga

SEQ ID NO: 4234 - DNA, 648 bp, Staphylococcus aureus
atgaccaaaggaatcttaggaagaaaaattgggatgacacaagtattcggagaaaacggtgaattaatccctgtaacagtagtagaagctaaagaaaatgttgtattacaaaagaaaactgtagaagttgatggatacaacgcaatccaagttggatttgaagacaaaaaagcatacaaaaaagatgcaaaatctaataaatatgctaataaaccagctgaaggtcacgctaaaaaagctgacacagcacctaagcgcttcattcgtgaattccgcaatgtagacgtggatgcttacgaagtaggtcaagaagtctcagtagatacttttgtagctggcgacgttattgacgtaacaggcgtatcaaaaggtaaaggtttccaaggtgcaattaaacgccacggacaatctcgtggacctatgtcacacggttctcatttccacagagcaccaggttctgtaggtatggcttcagatgcttctagagtatttaaaggccaaaaaatgccaggacgtatgggtggaaacactgtaactgttcaaaacttagaagtagttcaagttgacacagaaaacaaagttatcttagtaaaaggtaacgtacctggacctaaaaaaggtttagtagaaatcagaacttcaattaaa

SEQ ID NO: 4235 - DNA, 618 bp, Staphylococcus aureus
atggctaattatgatgttttaaaattagacggaactaaatcaggttcaatcgaattaagcgatgcagtattcggtattgagccaaataatagcgttttattcgaagctattaatttacaacgtgcttcattacgtcaaggtacgcatgctgttaagaatcgttcagcagtaagcggtggcggacgtaaaccatggaagcaaaaaggaacaggtcgtgctcgtcaaggtacaatccgtgctccacaatggcgtggcggtggtatcgtattcggaccaactccaagaagttatgcatacaaaatgcctaagaaaatgcgtcgtttagctttacgctcagcattatctttcaaagctcaagaaaatggcttaactgtagttgacgcattcaacttcgaagctccaaaaactaaagaattcaaaaatgtattatctacattagaacaacctaaaaaagtattagtagttactgaaaacgaagatgtaaatgttgaattatcagcacgcaacatccctggcgttcaagtgacaactgctcaaggtttaaatgttttagatatcactaatgctgacagcttagtaattactgaagctgctgctaaaaaagttgaggaggtgctc

SEQ ID NO: 4236 - DNA, 1080 bp, Staphylococcus aureus
tgtatcggttgtggtgcgccacttcaatctgaagataaaaataaacctggttttgtaccagagcataatatgtttcgtgatgacgtgatttgcagacgttgtttccgcttgaaaaattataacgaagttcaagatgtaggattagaaagtgaagactttttaaaattattatcaggacttgcggataaaaagggtattgtcgtcaatgttgtggatgtatttgactttgaaggatcatttattaatgcagttaaacgtattgtcggaaacaaaaaaatcattttagcagcaaataaattggatttattgccgaagcaaattaataaacgtcgagttaaagaatggttaaaacgaacagcaagaaaatatggtttggaagctgacgatgtcgtattaatttcagctgaaaaaggctggggcatagacgacttattatcatcaattgcgaatattcgagaaaatgaagatgtgtatattgtagggacaacgaatgttgggaaatctacattgattaataaactgattgaagctagtgttggtgaaaaggatgtagtaacaacttcaagattccctggaacaactttagatatgatagatattcctttagatgaaacatcatttatgtatgatacaccaggtattattcaagatcatcaaatgacgcatttagttagtgaaaaagaattgaaaattattatgcctaagaaagaaataaaacaacgcgtatatcaattaaacgaggcgcaaacattattcttcggcggtctagcgcgcatagattatgtatcaggtggtaaacgtccgttagtttgtttcttttctaatgacttgaatatacatcgtactaaaacggagaaggccaatgatttatggcgtaatcaacttggcgatttattaacgccacctggaaatccacaaaattttgatcttagtgaggtaaaggctgttagacttgaaacaggcaaagagaaacgtgatgttatgatctctggtctaggctttataactataggaccaggagctaaagtaatcgttcgtgttcctaaaaatgttgatgttgtattaagaaattctatttta

SEQ ID NO: 4237 - DNA, 1503 bp, Staphylococcus aureus
atgaaaaagaaaatgattacattaggaacagtcgcaattgcaacaagcttattcacatgggataataaagctgatgcaatagtaaatgataattatacaggacagtcacaagttaaagaagatagcaaaaatagtaataaaatatcgaacgacagcctttattggggagtttttggcaatttagaagcgcagtttaaaaacgctttgaatttgttaaaagaatatcagtatagcgaagaagaatataaagaagctaaagataaattaatgacaagaattgtaagtgaaaatcaatacttacttgataaaaagtttaaagaatacgaagcctataaggctgcattcccaaattttaaagctcaaaatccaacactaaaaagattgagctttgataactacgacatacgagatttaagacagggtgagtataacgatatccgcgcgtcattaaaaaatgctgtagaaacattccataaagatgtttcagctgtccagtctaagcaaacagatctaaaaacatttgatcaacaagaaatggatcaagcaaaactaaaaataaatgaattagaaaataaagcgttaatgttagggtttgctttttctaagcaaacagatgctagacaagatttgtacaataaattggacatgattttaggctattcagaaaaagaaagaacagaaaaacaacctaagaataaaagaatgtttgaagaaactgtaaaagacttggaaacaattatggatgaattctttacagatataggtaaacaaagaccatcagaaataccaacgttaacggacaacaatgaaaataataaagctttagcaaagagtttaagagaccttacaaactcaataacaagtaactcttctcagaaaaaaactgtagataaagtggtgaaaaaacctgatacacaaagtacaggaaataaagagttcgtaatcaaagaaccaacaaaaccatcaatcccaacatatacagaagaaattactaaaaagccaatgccgtcaattaaacaagagataaaagagaaaatcatttatagttctccacaacgctttgctggtttatcaggtgaaagagacgactcctctacttcatataacagcttacaaacaagaataactacaaacagtaatcttgtagaatttgaagaggatacaagcgctagaagccaatatggcccaagacctcaatttaacaaaacacctaaatacattaaatataaagatgctagtacaggcattcacgaatacaacgatggtacatttggatatgaagcaagacctaaattcaataaaccagcgtcaacaaacaaatataacgtaacaacaaagcaagatggaacagtatcatacggtgctagaccaacatttaataaatcaagttatacaaatgcatacaatgtgacaacacatgcaaacggtactacaacgtatggtcctagagtgacaaagtaacaatcgttaaactgaataagtattgcggtatctaatcgagca

SEQ ID NO: 4238 - DNA, 990 bp, Staphylococcus aureus
atcagaaaaatttgtaaaaatgccactatttgtagtttagcaatatcaactgctatagttgcgtttcccgaaacttctttagcgaaaataaagacagaaatcactccggtagtagagaaagcaattgatagtgaaacgaaaatgtacacacgtactgctacgacaagcgatactgagaagaatatttctcaaagtctacaatttaattttttaaatgaaccaaactatgataaagaaacgttatttatcaaagcgaaaggtacgattagtagcggcttagaaattttatatcctaatggttattggagtagtacattgaggtggccaggttcttattctgtttcaattcaaaatgttgacgataatacaaatactaaagttactgactttgcaccgaaaaaccaagatgaaacaagagatgttaaatatacgtatggttataaaacaggcggtaattttaccattaatcagaatggtttaagtggcaacattacccaagaatataattattcagagacaattagttaccaacaaccatcttatcgtacgttaattgataaacctacatcaaataaagcagttgcatggaaagtagaagcaaacgtcataaaaaatatggggtatgaccatactagggatgctactactgatggcaataccaaagtaggaagtgaaattttcacactaactaggaacggtaacttatgggctagagataattttacccctaagaataaaatgcctgtgactgtatctgaggggtttaatccagagtttttaacagtaatgtcacatgataaaaagggtaaaggtcattcgctatttgtagtacgctataaaagagtgatggatgatttcgaaataaggtggaactatcggaatatttgggggtattggtctggaaaaaataacgtgaataaaaaagaggaaagtttagcagctttgtacgaaatagactggaagacacatagtgtgaaacttataagtacg

SEQ ID NO: 4239 - DNA, 648 bp, Staphylococcus aureus
cctaatattcagtggccagaagtttggacagcaatagtcgaaacactatacatgacagtcgtctcaactatatttgcatttatactcggtcttattttaggtgtgttattattcttgtctgctaaaggtaagtctattggtgcgaggttattttattctatcgtttctttcattgttaacttatttagagcgataccatttattattttaattttattattaattccatttacaagtttgatacttggaacgataagtggtccgacaggtgcattaccagccttgatcattggcgcagcgccgttttatgcaaggctcgtagaaattgcttttaaagaaattgataaaggtgtcatcgaagcggcctggtcaatgggtgctaatacttggacagtaattcgtaaagtcctcttacctgaagccatgccagcactagtgtctggcattacagttacagcaatcgctttagttggttcaacggcagttgcaggtgtaattggtgccggtggtttaggaaatttagcatacttaacaggtttcactcgaaatcaaaatgatgtcattttagtatcaacagtttttattctaattattgtatttataatccaattcattggggattggcttacaaataaacttgataaacga

SEQ ID NO: 4240 - DNA, 813 bp, Staphylococcus aureus
atgaaaaaattatttggtcttattttagtattaacatttgcagttgtattagcagcttgcggtaatggaagcaaaagtggcagtgacgacaagaaaataacagtaggtgcttcaccagcaccacatgctgaaattttagaaaaagcaaaaccattattagagaaaaaaggttatgaactagatattaaaacaattaacgattacactacgcctaataaattactagacaaaggtgaaattgacgctaactatttccaacatacaccatatttaaacacagagaaaaaggataaaggttacaaaattgtaagtgccggtgatgttcacttagaacctatggctgtatactctaaaaagtataaaagtttaaaagaattaccaaaaggtgcaacagtctatgtgtctaataatccagctgaacaaggacgtttcttaaaattcttcgttgatgcaggtttgattaaaatcaaaaaaggcgtaaaaattgaagatgctaagtttagtgatattacagagaataaaaaagatattaagtttaataataaacaatcagcagaattcttacctaaaatttatcaaaatgaagacgcggatgctgttatcattaattcaaactttgcaatcgaacaaaaactaaatcctaaaaaagattctattgctgtagaaagtgcgaaagataatccttatgcaaacttaattgctgttaaagaaggacatcaagatgataagaaaatcaaagcattaattgaagtattacaatctaaagatattcaagacttcattaatgaaaaatacaacggtgcagttattcct

SEQ ID NO: 4241 - DNA, 1920 bp, Staphylococcus aureus
atgctgtagaactaaacttttaaagagggataaaacatgagtgatcgtttcataaaatttaacgacgaacagttagatgccaagcaagtaatgatgttgcaagacttagctcgactcttattaaaaaatgaacaaacacaagttaaaatccaaaaattcccttactataatcctgttcaaaatgttttgattacgagttggttttggtcacatcgaccaagccatatcgaaatggctggtttaaaaacagatgttatgttagctgcttacggttatcatatgatggatgtacaaattgtaaatgaagtagtacaagataaaacttttaaacaccctaaattttatcaacaactttttaaattattagaagatatgcgcgtattaaattctattaaaattgagcgcccaagtactgctaaattaattgatcttcgcttagatacacggatatcatatacggaatctcaaattaaagtgtatcgtactaaaacacaatatacagatttattatttttgtatttagaacatgcatttttaagtcaagatttctttgatataccatctatacattcagatttagatgatattttagttaatatgttcttatatttacctaattttttccaaaatcaaaattctgaagataatatgtatctggctcaaagaattatgtatcaagtagatgatattttaaaagaagatatgctaaacgaatattattacttacctaaaacactatataatacattagctagtccagagtttgaagatttaaagagaactgatgcaagtcaagttgatggggaagatgatacttcagaagatgataataacgaaagtgaaaaagctgactctaaatctgcagatagtgagtcaaaaggtggcgcttatttagaaatggagcttcacgaaggacaaaatagtgaaacattgggtaatgatgaagcacgtgaaggcgatgctacagacgatatgactgatatgatgaccaaaaagggcaaaggatcaaacgatacgctaaatcgtgaagaaggcgatgctgttggtcaaagccaggcatttcaacttgatggtgtgaacaaaaatgtagaaataaaatggcaaattcctgaaattgagccacaatatgttttagaatatcaagaatcgaaacaagacgtacaatatgaaatcaaagacttaattcaaattataaagaaaacgattgaacgagaacaacgagatgcacgttttaatttaacaaaagggcgattacaaaaggatttaattaattggtttatcgacgatcaatataaattgttttacaaaaaacaagatttaagtaaatcatttgatgcgacgtttacattgttaattgatgcgtcagcaagtatgcatgataaaatggctgaaacgaagaaaggtgtagtgttattccacgagacgttaaaagcattgaacattaaacatgaaattttatcattcagtgaggatgcctttgattcagacgatcatgcgcaaccaaatatcattaatgaaattattaactatgattactcaacctttgaaaaagatggcccacgtattatggcacttgaacctcaagatgataatcgtgatggtgttgctattagagttgcaagtgaacgattaatgcgtcgaaatcaacatcaacgatttttaatcgtattttctgacggcgaaccgtctgcatttaattatagtcaagatggtattattgatacgtatgaagctgtagaaatgtcacgtaaatttggcattgaagtatttaatgtatttttgagtcaagatccaataactgaagatgttgaacaaacaattcataatatttatggtcaatatgccattttcgttgaaggtgttgcgcatttacctggacatctctctccattattaaaaaaattactacttaaatcttta

SEQ ID NO: 4242 - DNA, 1311 bp, Staphylococcus aureus
atgacacactatcattttgtcggaattaaaggttctggcatgagttcattagcacaaatcatgcatgatttaggacatgaagttcaaggatcggatattgagaactacgtatttacagaagttgctcttagaaataaggggataaaaatattaccatttggtgctaataacataaaagaagatatggtagttatacaaggtaatgcattcgcgagtagccatgaagaaatagtacgtgcacatcaattgaaattagatgttgtaagttataatgattttttaggacagattattgatcaatatacttcagtagctgtaactggtgcacatggtaaaacttctacaacaggtttattatcacatgttatgaatggtgataaaaagacttcatttttaattggtgatggcacaggtatgggattgcctgaaagtgattatttcgcttttgaggcatgtgaatatagacgtcactttttaagttataaacctgattacgcaattatgacaaatattgatttcgatcatcctgattatttcaaagatattaatgatgtttttgatgcattccaagaaatggcacataatgttaaaaaaggtattattgcttggggtgatgatgaacatctacgtaaaattgaagcagatgttccaatttattactatggatttaaagattcggatgacatttatgctcaaaatattcaaattacggataaaggtactgcttttgatgtgtatgtggatggtgagttttatgatcacttcctgtctccacaatatggtgaccatacagttttaaatgcattagctgtaattgcgattagttatttagagaagctagatgttacaaatattaaagaagcattagaaacgtttggtggtgttaaacgtcgtttcaatgaaactacaattgcaaatcaagttatcgtagatgattatgcacaccatccaagagaaattagtgctacaattgaaacagcacgaaaaaaatatccacataaagaagttgttgcagtatttcaaccacacactttctctagaacacaagcatttttaaatgaatttgcagaaagtttaagtaaagcagatcgtgtattcttatgtgaaatttttggatcaattagagaaaatactggcgcattaacgatacaagatttaattgataaaattgaaggtgcatcgttaattaatgaagattctattaatgtattagaacaatttgataatgctgttgttttatttatgggtgcaggtgatattcaaaaattacaaaatgcatatttagataaattaggcatgaaaaatgcgttt

SEQ ID NO: 4243 - DNA, 1365 bp, Staphylococcus aureus
atgacgcaacaacaaaataataaaagaacattaaaaaataaacacacttatcaaaatgaaccactaccaaaccgtaaagattttgttgttagttttataactggcgcgcttgttggttcagctttaggtttgtattttaaaaataaagtttatcaaaaagcagatgatttaaaagtcaaagaacaagaactgtcgcaaaagtttgaagaaagaaaaacgcaacttgaagaaacggttgcctttacaaaagaacgtgttgaaggatttttaaacaaatctaaaaatgagcaagcggcattaaaagcacaacaagcagcgataaaagaagaagcaagtgcaaataatttaagcgatacatcacaagaagcacaagagattcaagaagctaaaagagaagcacaagcagaaacagataaaagtgcagctgtatcaaatgaagaatcaaaagcagtggcattgaaagcacaacaagcagcgataaaagaagaagcaagtgcaaataatttgagtgacacgtcacaagaggcacaagagatccaagaagcgaagaaagaagcacaagcagaaacagataaaagtgcagctgtatcaaaaccagaatcacaagcatcggcattgaaagcacaacaagcagcggtaaaagaagaagcaagtgcaaataatttaagtgatacatcacaagaggcacaagagattcaagaagctaaaaaagaaacacaagcagaaacagataaaagtgcagctgtatcaaatgaagaatcaaaagcatcgactttaaacgtatcgaaagaagagtcacaagctgaaagattagcaaacgctgcaaaacagaagcaagctaaattaacaccaggttcaaaagagagtcaattaactgaagcgttatttgcagaaaaaccagttgctaaaaatgacttgaaagaaattcctcaattagttactaaaaagaatgacgtatcagagacagagacagttaatacagataataaagacactgttaaacaaaaagaagctaaatttgaaaatggtgttattacacgtaaagctgatgaaaaaacaactaataatacagctgttgacaagaaatcaggtaaacaatctaaaaaaacaacaccttcaaataaacgaaatgcatcaaaagcatctacaaataaaacttcaagtcagaaaaagcaacataataagaaatcatcacaaggtgcaaagaaacaaagtagttcaagtaagtcaactcaaaagaataatcaaactagtaataagaattcaaaaacaacaaatgctaaatcatcaaatgcatcaaaaaaatcaaatgcaaaagttgaaaaagctaaaagtaaaatagagaaacgtacattcaatgactaa

SEQ ID NO: 4244 - DNA, 948 bp, Staphylococcus aureus
gaagctcaaaaaatgggtgctaaatttaaagcaggactcgaaaaatctcgtcaaaatttccaagaacaattaaataatttgatagcgagatatcgtaaagtagatgaagacttttttgaagctttagaagaaatgttaatcactgcagacgtcggttttaatacagtgatgacgttaactgaagaattacgtatggaagcacaacgacgtaatattcaagatactgaagatttgcgtgaagtcattgttgaaaaaatcgtagagatttaccatcaagaagatgataattcagaagctatgaacttagaagatggtcgtttaaatgtcattttaatggtcggtgtgaatggtgttggtaaaacaacaacaattggaaaattagcttaccgatataaaatggaaggtaaaaaagtaatgttagctgcgggcgatacttttagagcgggtgctattgatcaattgaaagtttggggcgaacgtgttggtgtagatgtaattagccaaagtgaaggttctgatccagctgctgttatgtatgatgcgattaatgccgctaaaaacaaaggtgttgatattttaatctgtgataccgctggacgtttacaaaataaaacaaatctaatgcaagaattagaaaaagttaagcgtgtaattaatcgagcagtgccagatgcgcctcatgaagcattactatgtttagatgctacaactggtcagaatgcgttgtcacaagctagaaactttaaagaagtaacaaatgttacaggtattgtattaacgaaattagatggtacagccaaaggtggtatcgtattagccattcgtaatgaattgcacattccagttaaatatgtaggtttaggtgagcaattagatgacttacaaccatttaaccctgaaagttatgtctacggcttattcgctgatatgattgaacaaaatgaagaa

SEQ ID NO: 4245 - DNA, 1050 bp, Staphylococcus aureus
atgaaagtattagtagccatggatgagtttcatggaattatttcgagttatcaagctaatagatatgttgaagaggcagttgcaagccaaattgaaactgcagatgtagttcaagtaccattgtttaatggaagacatgaattattagattctgtatttttatggcaatctgggcaaaagtatcgtataccagtacatgatgcagatatgaatgaagttgaaggtgtttacggacaaactgatacagggatgaccgttatcgaggggaatttatttttaaaaggtaaaaagccaattgttgaacgaacaagttatggtttaggagaaatgattaaccatgcattagataacgacgcaaaacatgttgtaatttcattaggtgggattgatagttttgatgctggtgcaggtatgttacaagcattaggtgctcaattctatgatgacgaaggacgtgtcgtagatatgagacaaggtgctggtgtaattaaatatattcgtcgtatggatatgtcgaacttacaccctaaaatggaaacagcaagaattcaagtaatgtcggatttttcaagtcgattatatggtaagcaaagtgaaatcatgcaaactcatgatgcgcatcagttgaatcataatcaagcagcagaaatcgataatttaatttggtattttagtgagttatttaaaagtgaattgaaaattgcaattggtccagttgaacgtggtggtgctggtggtggaattgcagcagtcttgaatggactgtatcaagctgaaatattaaccagtcatgcattagtagaccaactaacacatttagaaaatttagttgaacaagcggatttaattatttttggagaaggattaaatgaaaatgatcagttgctagaaacgacaacattgcgtattgcagaactttgtcataaacatcaaaaggttgccattgcaatttgtgcaactgctgaaaagtttgatttatttgaatcacaaggggttacagcaatgtttaatacatttatcgatatgccggaaacttatactgactttaaa

SEQ ID NO: 4246 - DNA, 1455 bp, Staphylococcus aureus
atgacagatattattaacaagctgcaagcgtttgcggatgcaaatccacaaagcattgctgttagacacacaactgatgaattaacttatcaacagttaatggatgagtctagtaaattagcacatcgattacaaggtagtaagaaaccgatgattttattcggtcacatgtcaccatatatgattgttgggatgattggtgccattaaagcaggatgtggatatgtacctgtagacacttcaattcctgaagaccgtattaaaatgattattaacaaggttcaaccagagtttgtatttaatacgactgatgaatcatttgaaagtttagaaggcgaagtatttacaatagaagatattaaaacatctcaagacccagtaatttttgatagtcagattaaagataacgacacagtatacacaatctttacatctggttctactggggaacctaaaggtgttcaaattgaatatgcaagtttagttcaatttactgagtggatgttagaacttaataaatcaggaaatgaacaacaatggcttaaccaagcgccattttcatttgatttatctgtaatggctatttatccatgtttagcatcaggcggtacattaaatcttgtagataaaaacatgattaataaacctaaattattaaatgaaatgctaacagcaacaccgattaacatttgggtatcaacaccatcatttatggaaatgtgtttattattaccaacgcttaatgaagaacagtatggtagtcttaacgaattcttcttctgtggtgaaattctacctcacagagcagcaaaagcgttagtaagccgtttcccaagtgcgacgatttacaacacatatggtccaactgaagctacggtagcagttacaagtattcaaattacacaagaaatcttagatcaatatccgacattacctgttggcgttgaaagatcaggcgcaagattatctacgacagatgaaggtgaacttgttatcgaaggtcaaagtgtaagtttaggatacttaaaaaatgaccaaaaaacagctgaagtatttaatttcgatgacggtattcgtacttatcacactggtgataaagcgaagtttgaaaatggtcaatggttcattcaaggtcgtattgatttccaaatcaaattgaatggctacagaatggaattagaagaaattgaaacacaattacgccagtctgagttcgtaaaagaagcgattgttgtacctgtatataaaaatgataaagttatccatttaattggtgcaattgtgccaacgactgaagttacggacaatgcagaattgactaaaaatattaaaaatgacttgaaatcacgcttaccagagtatatgattcctagaaagtttgaatggatggaacaattgccattgacttcaaatggtaaaattgacagaaagaaaattgcagaggtaattaacgga

SEQ ID NO: 4247 - DNA, 624 bp, Staphylococcus aureus
ttattacaagcattatacgaaacgctatatatggtatctattgctttatttttaggagcagtgattggtattccattaggtgtcttattggtaattactcgaaaacaaggcatatggcccaatatagtgatacatcaagttttaaatcctttaatcaatattttaaggtcactaccatttattattttgttaattgcgattgtgccattcacaaaattagtagtaggtacttcaattggtacgactgctgccatcgtgcctttaacagtatatgtggcaccttacattgcaagacttgttgaaaactcattattagaagtagacgaggggattattgaagcggcgaaagcgatgggcgcttcaccactacaaatcattagatattttttaattcctgaagcgttaggttcattagtattagcaattaccactgcgattattggacttattggaagtacggcgatggcaggagctgttggcggtggtggtataggagacttagctttagtgtatggttatcaaagatttgatacgacggtcattattattaccgttattgtattagtcattattgtccaagtgattcaaacgctagggaatgtcctagctagattcatacgtaga

SEQ ID NO: 4248 - DNA, 1263 bp, Staphylococcus aureus
atggataaaatagtaatcaaaggtggaaataaattaacgggtgaagttaaagtagaaggtgctaaaaatgcagtattaccaatattgacagcatctttattagcttctgataaaccgagtaaattagttaatgttccagctttaagtgatgtagaaacaataaataatgtattaacaaccttaaatgctgacgttacatacaaaaaggacgaaaacgctgttgtcgttgatgcaacaaagactctaaatgaagaggcaccatatgaatatgttagtaaaatgcgtgcaagtattttagttatgggacctcttttagcaagactaggacatgctattgttgcattgcctggtggttgtgcaattggaagtagaccgattgagcaacacattaaaggttttgaagctttaggcgcagaaattcatcttgaaaatggtaatatttatgctaatgctaaagatggattaaaaggtacatcaattcatttagattttccaagtgtaggagcaacacaaaatattattatggcagcatcattagctaagggtaagactttaattgaaaatgcagctaaagaacctgaaattgtcgatttagcaaactacattaatgaaatgggcggtagaattactggtgctggtacagacacaattacaatcaatggtgtagaatcattacatggtgtagaacatgctatcattccagatagaattgaagcaggcacattactaatcgctggtgccattactcgtggcgatatttttgtacgtggtgcaatcaaagaacatatggctagtttagtgtataaattagaagaaatgggcgttgaattggactatcaagaagacggcattcgtgtaagagctgaaggagatttacagcctgttgacatcaaaacattaccgcatcctggtttcccaaccgatatgcagtcacaaatgatggcattattattaacagcaaacggacataaagtagtaactgaaactgtatttgaaaatcgttttatgcatgttgcagagttcaaacgtatgaacgcgaacatcaatgttgaaggtcgcagtgcaaaacttgaaggcaaaagtcaattgcaaggtgcgcaagttaaagcgactgatttaagagcagcagcagccttaattttagctggattagttgctgatggtaaaacaagtgtcactgaattgaatcatttagatagaggatatgttgacttacatggcaaattgaagcaattaggtgcagacattgaacgtattaacgat

SEQ ID NO: 4249 - DNA, 384 bp, Staphylococcus aureus
atttttgattataaccaaattaaacaaattatacctcacagacagccatttttattaattgataaagtagttgaatatgaagaaggtcaacgttgtgtagctattaaacaagtatcaggaaacgaaccgttctttcaaggacattttcctgagtatgcggtaatgccaggcgtattaattacagaagcgttagctcaaacaggtgcggtagctattttaaatagtgaagaaaataaaggtaaaatcgctttatttgctggtattgataaatgtcgttttaaacgtcaagtagtacctggtgatactttaacgttggaagtagaaatcactaaaattaaaggaccaatcggtaaaggtaatgctaaagctactgtcgatggtcaa

SEQ ID NO: 4250 - DNA, 606 bp, Staphylococcus aureus
atgatgataatcgtcatgttactactaagttatcttatcggcgctttcccaagtggattcgtaattggaaaattatttttcaaaaaagatattagacaatttggtagtggtaatactggcgctactaatagctttagagtattaggtcgtcctgcaggattcttggtaacatttctagatattttcaaagggttcataactgttttcttccctttatggttaccagttcacgcagatggccctattagtactttttttacaaatggtttaattgttggcttattcgctatacttggacacgtttatcctgtttatttaaaattccaaggtggcaaagcggttgcaactagtgcaggtgtcgtcttgggagtcaacccgatacttttactaatacttgcaattatcttctttattgtattgaagatttttaaatatgtttctttagcaagtatcgttgcagcaatttgctgtgtgattggctcgcttatcattcaagactatattttattagtcgttagtttcttagtttcaatcatattgataattagacatcgctctaatatctcaagaatttttagaggcgaagaacctaaaataaaatggatg

SEQ ID NO: 4251 - DNA, 924 bp, Staphylococcus aureus
atgcgtaaattagtcgttggctccagaagaagtaaattagctttaacacaaagccagcaatttattgataaattaaaagctgtcgagccaaatctagaaattgaaattaaagaaattgtcacgaaaggcgatcgtatagtagataaacaactgtctaaagtcggaggcaaaggcttatttgttaaagaaatacaacatgaactttttgaaaaaaatatcgatatggcaatacactcgcttaaagacgtaccaagtgtaattccggaaggtttaacattaggttgtatccctgatagagaattaccttttgatgcgtatatttctaaaacacatacaccactatcccaattgccagaaggcagtattattggtactagttcattacgtcgtggtgcacaaatattatctaagtatcctaatttagagattaaatggattagaggtaatatagatacacgattagaaaagttacaaactgaagattatgatgcgattattttagctgcagctggtttaagaagaatgggctggtcagatgatatcgtaacatcttatcttgatagagatacattgttacctgcaatcggacaaggtgctttagggatagaatgtcgtagtgacgatgaagaactattaacattattaagcaaagtacataatgatgaggttgcaaaatgtgtgactgctgaaagaacgtttttagcagaaatggatggtagttgtcaggtgccaatcgcaggatatgctacaatctcagatcaaaaagaaatcgaatttacaggtttaattatgaccccagatggtaaagaacgatttgaatatacaatgaacggaacagatccggttgagttaggcaaaaaagtgagtaacaaattaaaagagcaaggtgcttatgaaattataaaatgcttaaatgaacaacat

SEQ ID NO: 4252 - DNA, 666 bp, Staphylococcus aureus
atgaagccagttgtagttatgacacaaacaaatgacatgcaaagtgatttagtatcaattattcacaaaccctttattgatataaagccactaaattttgatattcatttgttaaatcaacgctatgactggcttattttttcatctaaaaatgctgtgaaatttttttataaatatctaaaaggaattaatgttgataacattgctgtgataggaagtaagacagcgcaatattgtgaatcacttggcattcaagttgattttatgccaaacgacttttctcaagaaggatttttaaaatcatttaatcaaactaaccaaaaaatacttttgccttcgagtgaattggcgagaccattgttatcagcagcgttatctaaagataatgaagttgttaaaatagatttatatacttcagtgcctaacaaacaaaatatacaagatgttaaagaaatgatagaacatcaacaaatcgatgcattaacattttcaagttcgtcggcagtacgttattattttaatgaaggatttgtaccaaaattcaagtcgtattttgctattggagaacaaacagcacggaccattaaatcatatcaacaaccagtaacaattgcagaaattcaaacacttgaatcactaattgaaaagattttagaaagtaggggc

SEQ ID NO: 4253 - DNA, 837 bp, Staphylococcus aureus
atggttattcaatggtatccaggacatatggcgaaagccaaaagagaagtaagtgaacaattaaaaaaagtagatgtagtgtttgaactagtagatgcaagaattccatatagttcaagaaaccctatgatagatgaagttattaaccaaaaaccacgtgttgttatattaaataaaaaagatatgtctaatttaaatgagatgtcaaaatgggaacaattttttattgataaaggatactatcctgtatcagtggatgctaagcacggtaaaaatttaaagaaagtggaagctgcagcaattaaggcgactgctgaaaaatttgaacgcgaaaaagcgaaaggacttaaacctagagcgataagagcaatgattgttggaattccaaatgttggtaaatccacattaataaataaactggcaaagcgtagtattgcacagactggtaataaaccaggtgtgaccaaacaacaacaatggattaaagttggtaatgcattacaattattagacacaccagggatactttggcctaaatttgaagatgaagaagtcggtaagaagttgagtttaacaggcgcgattaaagatagtattgtgcacttagatgaagttgccatctatggtctgaactttttaattcaaaatgatttagcgcgcttaaaagcacattataaaatcgaagtacctgaagatgcagaaatcatagcgtggtttgatgcgatagggaaaaaacgtggcttaattcgtcgtggtaatgaaattgattacgaagcagtcattgaactgattatttatgatattcgaaatgctaaaataggaaattattgttttgat

SEQ ID NO: 4254 - DNA, 171 bp, Staphylococcus aureus
atgacgtcaaatcatcatgccccttatgatttgggctacacacgtgctacaatggacaatacaaagggcagcgaaaccgcgaggtcaagcaaatcctataaagttgttctcagttcggattgtagtctgcaactcgactacatgaagctggaatcgctagtaatcgtagat

SEQ ID NO: 4255 - DNA, 936 bp, Staphylococcus aureus
atgcgttttgtgcatcattctatcccatcaattaatgtaaatgatatcgatttgacatcacagacacctgacttaacgatggcatatccggtttatattaatgcaatgacgggtggtagcgagtggacgaaaaacatcaatgaaaagctagctgtagttgcaagagaaactggcttagcgatggcagttggatcaacacatgcggcattgagaaatccacgcatggctgagacgtttacgattgcgcgaaaaatgaatcctgaaggcatgatttttagcaatgttggtgcggacgtaccagtagaaaaggctttggaagcagttgaattacttgaggcacaagcgttacaaatccatgttaattctcctcaagaattagttatgcctgaagggaatcgtgaatttgtgacttggttagataatatagcgtcgattgtatcacgagtgtctgttccagtcattataaaagaagttggatttggtatgagcaaagaattaatgcatgacttacaacaaataggcgttaagtatgtcgatgttagtggcaaaggtggtactaactttgtagatattgaaaatgaacgtcgtgcaaataaagatatggattacttatcatcatggggacagtctacagttgagtcattacttgaaacaacggcttatcaaagcgaaatttcagttttcgcgagtggtggtttacgtacaccactcgatgcaattaaaagtttagcacttggcgcaaaggcaactggtatgtcacgtccgtttttaaatcaagttgaaaataatggcattgcacatacagtagcttatgtagaatcatttattgaacacatgaaatcaataatgacgatgttagatgctaaaaatattgacgacttaacacaaaaacaaatcgtatttagtccggaaatattgtcatggatagaacaacgt

SEQ ID NO: 4256 - DNA, 507 bp, Staphylococcus aureus
ttacaacaagcaatagctaatagaagaagtgtgaaaaaatttaaaagagatatgcacatagatgacgcattgctatatcaagcaattgagaaagctgctgatgctccaaatcacggaatgagggaaccatggagagttgtgcatgttccgaaagacagattaggagatatgagtaaggatatttctaaatttgcatttcctaatgaattagataagcaacaatgtcattatgatgcagtaacgaaactaggtggcatgttattgcttattttaaaaacagatccaagacaacgtcaaaatgatgaaaactactttgcatttggtgcatatgcacaaaatcttatgttgttactttatgaagcgggaataggtacatgttggaaatcgccattatatatctatgatcctaaagtaagaaaaacacttggtataaagaaagatgaagttcttgctggattcttatatttaacggatttagaagaagatatgcctaaagcaccacgtaaa

SEQ ID NO: 4257 - DNA, 2637 bp, Staphylococcus aureus
gaggtatagcaaatggatatgaaaccaaaatatgatcctcgtgaagttgaagcgggacgttatgaagaatgggtaaagaatggttattttaaaccgtcagaagataaatcataagagacatatacaattgttatcccgccaccgaatgtaactggtaaattacatttaggacatgcatgggatacgactttacaagatatcattacacgtatgaaacgtatgcaaggatacgatacgttatacttaccaggtatggatcatgctggtattgcgacacaggcaaaggtagaagctaaattaaatgaacaaggaataactagatatgatcttggtcgtgaaaagtttttagaacaggcatgggattggaaagaagagtatgcgtcatttattcgtgcgcaatgggctaaattaggtctaggtttagattatagtagagaacgttttactttagatgaaggtttaagtaaagcagttaaaaaagtttttgttgatttatacaataaaggaattatttatcgtggcgaacgtattataaattgggatcctaaagcacgtacagctttatctgatattgaagtaatacatgaagatgttcaaggtgcgttttatcattttaaatatccttacgctgatggtgaaggttttattgaaattgcaacaacaagaccagaaacgatgttaggtgatacagcgattgttgttaaccctaatgacgaacgatacaaagatgtaatcggtaaaactgttatattaccaatcgtaggacgcgaactgcctattttagcagatgagtatgttgatatagacttcggttctggtgctatgaaagtgacaccagcacatgaccctaatgattttgaaattggtcaaagacatcaattagaaaatattatcgttatggatgaaaatggtaaaatgaacgacaaagctggcaaatacgaaggtatggaccgttttgattgtcgtaaacagctagttgaagatttaaaagaacaagatttagttatcaagattgaagatcatgttcattctgtaggtcattcagaacgatctggcgctgttgttgaaccatatttatcaacacaatggtttgtgcgcatggaagacttagcgaaacgttcattagataaccaaaaaacagatgatcgtattgatttttatccgcaacgtttcgaacatacatttaaccaatggatggaaaatattagagattggacgatttcaagacaattatggtggggtcatcaaattccggcttggtatcataaagaaacaggcgaaatatatgttggagaagaagcgccaactgatattgaaaattggcaacaagatgaagatgtattagatacgtggttctcaagtgctttatggcctttctctacgttaggttggcctgatttagaaagcgaagactttaaacgatactacccaacaaatgccttagttacaggttacgatattatctttttctgggtagcacgtatgatattccaaggcttagaatttacagatcgtcgtccatttaatgatgtgttattacacggcttagttcgtgctgaagacgggcgtaagatgagtaaatcattaggtaatggtgtggatccaatggatgttattgacgaatacggtgctgatagcttgcgttacttcttagcaacgggttcatctccaggacatgatttaagatactcaactgaaaaagttgagtcagtgtggaactttatcaataaaatctggaatggggcacgtttcagtttaatgaatatcggtgaagactttaaagttgaagatatcgatttaagtggtaacttatcattagcagataaatggattctaacacgtttaaatgaaacgattgcaacagttactgatctaagtgacaaatatgaattcggcgaagttggacgtgcattatataatttcatttgggatgatttctgtgattggtacattgaaatgagtaaaattccaatgaatggtaatgacgaagaacaaaaacaaattacacgttcagtattgagttatactttagacaatattatgagaatgctacatccattcatgccatttgtaacagagaaaatatggcaaagtttaccacatgaaggtgacacaattgttaaagcttcatggccagaagtgcgtgaatcattgatttttgaagaaagtaaacaaacaatgcaacaacttgttgaaatcattaaatctgtaagacaatcacgtgtagaagtaaatacgccattgtctaaagaaatacctattttaattcaagctaaagataaagaaattgaaacaactttatcacaaaacaaagattatttaatcaaattctgtaatcctagtacgttaaatattagcactgacgtggaaattcctgagaaagcaatgacatcagttgtaattgcaggtaaagtggtattaccattagaagggctaattgatatggataaggaaatcagccgtttggaaaaagaattagctaaacttcaaagcgaattagatagagtagataaaaagctctctaatgaaaactttgtaagtaaagcacctgaaaaggttataaatgaagaaaaacgtaaaaaacaagattatcaagaaaaatatgatggtgtgaaggcaagaattgaacaattaaaa

SEQ ID NO: 4258 - DNA, 270 bp, Staphylococcus aureus
atgaacaaaacagatttaatcaatgcagttgcagagcaagctgatttaactaaaaaagaagctggttcagcagtagatgctgtattcgaatcaatccaaaactcacttgctaaaggtgaaaaagtacaattaattggtttcggtaactttgaggtacgtgaacgtgctgcacgtaaaggtcgtaaccctcaaactggtaaagaaattgatatcccagcaagtaaagttccagcattcaaagctggtaaagcattaaaagatgctgtaaaa

SEQ ID NO: 4259 - DNA, 702 bp, Staphylococcus aureus
gacaataaagcaaataaagagcaagtacatcgcgtttttcaaaatatttcaaaaaaatatgacagattaaataatattattagttttgagcagcataaagtatggagaaaacgtgtcatgaaagacatgggtgttagacaaggtacgaaagcattagatgtttgttgtggtactggtgattggacaatcgcattaagcaaagctgtaggaccaataggagaagttactggtattgactttagtgagaatatgttagaagtaggaaaagaaaaaactgcttcaatggaaaatgttaaacttgttcatggtgatgcaatggaattgccgtttgaagacaattcttttgattatgtaacaattgggtttggattaaggaatgtgccagactatttagtcgcgttaaaagaaatgaatagagtacttaaaccaggtggtatggtggtatgtcttgaaacgagccaaccaactttgccagtctttaaacaaatgtatgcattatactttaaatttgttatgcctatttttggaaaattatttgcaaaatcaaaagaagaatatgaatggttacagcaatctacgtttaattttcctggaaaagaagagttgaagcgcatgtttgaagaagcgggtttcataaatgtaagagtacgtagttttacagggggcgttgctgcaatgcaccttggctataaagaaaaagat

SEQ ID NO: 4260 - DNA, 936 bp, Staphylococcus aureus
atgaacaatgaaattaagaaagtggaacaacgacttgaaaaggcaataaaaagtaaagattctgtattagaacaggcatcattacacttattgtcttctggtggtaaaagagtacgcccggcatttgtaattctgagtagccaatttggcaaagatgaacaaacgtctgaacaaacgtatcaagttgcagtcgcattagagttaattcatatggcaacacttgttcatgatgacgttattgataaaagcgacaagcgtcgaggcaagttaaccatatcaaagaaatgggatcagacaactgctattttaactgggaattttttattggcattaggacttgaacacttaatggccgttaaagataatcgtgtacatcaattaatatctgaatctatcgttgatgtttgtagaggggaacttttccaatttcaagaccaatttaacagtcaacagacaattatcaattatttacgacgtatcaatcgtaaaacagcactgttaattcaattatcaactgaagttggtgcaattacatctcaatctgataaagagactgtacgaaaattgaaaatgattggtcattatataggcatgagcttccaaatcattgatgatgtattagacttcacaagtactgaaaagaaattaggtaagccggtcggaagtgatttgcttaatggtcatattacgttaccgattttattagaaatgcgtaaaaatccagacttcaaattgaaaatcgaacaattacgtcgtgatagtgaacgcaaagaatttgaagaatgtatccaaatcattagaaaatctgacagcatcgatgaagctaaggcagtaagttcgaagtatctaagtaaagctttggatttgatttctgagttgccagatggacatccaaaatcactacttttaagtttgacgaaaaaaatggggtcaaga

SEQ ID NO: 4261 - DNA, 516 bp, Staphylococcus aureus
atggaattttcacaaaaattgtaccaagctgcaaagccaatcattaatgatatttatgaggatgactttattcaaaaaatgttattaggcaatatacaagctgatgcattacgtcactatttacaagctgatgcagcttatttaaaagaatttacaaacttatatgctttgttaattccaaaaatgaatagcatgaatgacgtaaaatttttagtagagcaaatagaatttatggttgaaggtgaagtacttgcgcatgatattttagcgcaaattgttggtgaatcatacgaagaaatcattaaaacaaaagtttggcctccaagtggcgaccattacataaaacatatgtatttccaagcgcatagtcgtgaaaatgctatttatacaattgctgcaatggcaccttgtccatatatttatgcagaattagctaagcgctctcaaagtgatcataagcttaatagagaaaaagatacggcaaaatggtttgatttttatagtactgaaatggat

SEQ ID NO: 4262 - DNA, 1014 bp, Staphylococcus aureus
atgtcaacgaatattgcaattaatggtatgggtagaattggaagaatggtattacgtattgcattacaaaataaaaatttaaatgtagtagcgataaatgctagttatccacccgaaacaattgcacatttaatcaattacgatacaacacatggaaaatataatctaaaagttgaaccgattgaaaatggattgcaagttggagatcataaaattaaattggttgctgatcgcaatcctgaaaacttgccatggaaagaattagatatcgatattgctatagatgcaactggtaaatttaatcatggtgataaagccatcgcacatattaaagcaggtgccaaaaaagtattgttaactggtccttcaaaaggtggacatgttcaaatggtagttaaaggcgtaaatgatgaccaattagatatagaagcatttgacatttttagtaatgcttcatgtactactaattgcattggtccagttgcaaaagttttaaataatcagtttggaatagttaatggtttaatgactactgttcacgctattacaaatgaccaaaaaaatattgataatccacataaagatttaagacgtgcacgctcatgtaatgaaagcattattcctacttctactggtgcggcgaaagctttaaaagaagtattaccagaattagaaggtaaattacatggcatggcattacgtgtaccaacaaagaatgtatcgctcgttgatttagttgttgatttagaaaaagaagtaactgtagaagaagtaaaccaagcttttgaaaatacaggtttagaaggtatcattgaagtcgaacatcaaccactagtgtctgttgattttaatactaatccacattcagctattattgatgcaaaatcaacaatggtcatgtcagggaataaagtaaaagttatcgcttggtatgataatgaatggggttattcaaatagagttgtagatgttgctgagcaaattggagcacttttgacatcaaaagaaactgta

SEQ ID NO: 4263 - DNA, 567 bp, Staphylococcus aureus
atgtcattaattaacaaagaaatcttaccatttacagcgcaagctttcgatccaaaaaaagatcaatttaaagaagttacacaagaagatttaaaaggttcttggagcgtagtatgcttctatcctgctgacttctcatttgtttgtccaactgaattagaagacttacaaaaccaatatgaagaattacaaaaattaggcgtaaatgtattctcagtatcaactgatactcacttcgtacacaaagcatggcatgaccattcagatgcaattagcaaaatcacttacactatgattggtgacccatcacaaacaatcactcgtaattttgatgtattagatgaagctactggtttagctcaacgtggtacattcattatcgacccagacggtgttgtacaagcatctgaaattaacgctgacggaattggccgtgacgctagtacattagctcacaaaatcaaagcagctcaatatgttcgtaaaaaccctggcgaagtatgcccagctaaatgggaagaaggcgctaaaacattgcaacccggtttagatttagtaggtaaaatc

SEQ ID NO: 4264 - DNA, 675 bp, Staphylococcus aureus
ttagaacgattacaaaaacgtatagcaaatagcggttatacttcaagacgtaaagcagaaactttaatttctgaaggaaaagtgaaagtgaatggtacaactgtcactgaattaggaacaaaagtgaagccttcagatacgattgaagttgaaggtattaaaatagaactagaagacaaaatttatattttattccataaaccaactcaagtgataacaagtgtatctgatgatagaggacgtacagtggttacagattactttaaagatatagaagcacgtatttatcctgttggtcgtttagactatgatacttctggattgttattacttacaaatgatggtgaatttactaatttaatgacacatccaagatatcaaattaagaagaaatatgtcgcaaaattaaaaggttatttaatgagagaagaagtgaaagcgctagaaaaaggtattgaattagaagatggtatgacgcaaccggctgaagtgaaagttaagaaacaagataaagataaaaacacaacattggttgaaattacaattacagaagggcgtaatcgtcaagtcagaagaatgttcgaacattttggtcatcaagtgacgaaactgtctcgtattgaatatgggcctttaaatgttgtcggtttgaatgctggtgaaggacgtgtattg

SEQ ID NO: 4265 - DNA, 1737 bp, Staphylococcus aureus
atgagccggctaaatagtgtcgtaattaaactgtggttaactattattttaatagtgacgacagttttaattttattaagtattgctttaattacctttatgcaatactatttcacacaagaaaccgaaaatgccataagagaagatgctagacgtataagttcactggtcgaacaatcacataataaagaagaagcaataaaatatagtcaaacattaattgaaaatcctggtgggttgatgattataaataataaacatcgtcaatcaacggcttcactttctaatattaaaaagcaaatgttgaatgaagtagtcaacaacgaccattttgacgatgtgtttgataaaggtaaatctgttactcgaaatgtaacgattaaagaaaagggctcatctcaaacatatattttgttaggctatccaacaaaagcacagaagaatagtcatagcaaatatagtggagtctttatatataaagacttgaaatcaatcgaagatacaaataatgctattacgattatcactataattacggctgttattttcttaacaattacaacagtctttgcgtttttcttatcgtcaagaattacaaaacctttaagacgtttaagagaccaagctacacgtgtatctgaaggggattactcttataaaccttctgtcacaacgaaagatgaaattggtcaattatcgcaggcatttaatcagatgagtacagaaatcgaagagcatgtcgacgcattatccacatctaaaaatattagagacagcttaattaactctatggtagaaggtgtcctaggtattaatgagagtcgacaaattatcttatctaataagatggcgaatgatattatggacaatattgatgaggatgctaaagctttcttattaagacaaattgaagatacttttaaatcaaaacaaacagaaatgcgtgatttagaaatgaatacacgattctttgttgtgaccacaagctatatcgataagattgaacaggggggtaaaagtggtgttgttgtgacagttcgtgatatgactaatgagcacaatctagatcaaatgaagaaagatttcattgctaatgtatcacatgaattacgtacaccgatatcattacttcaaggttatactgaatcaattgtagatggtattgttacagaaccggatgaaataaaagaatcgcttgccattgtccttgacgaatcgaaacgtttaaatcgtttagttaatgaattgttaaatgtcgctcgcatggatgctgaagggttatccgtaaataaagaagttcagcctattgcagcgttactagataagatgaaaattaagtatcgtcaacaagctgataatttaggtctaaatatgacttttaattattgtaagaagcgtgtttggagttatgatatggatcgaatggaccaagtactaacgaacttaattgataatgcatcacgttatacgaaacctggtgatgaaattgcaattacttgtgatgaaaatgaaagtgaagatattttatacattaaagatacaggtacaggcattgcaccagaacatttacaacaagtatttgatcgtttttataaagttgatgcagcgagaacgcgaggtaaacaaggtaccggtttaggtttgttcatttgtaaaatgattatcgaagagcatggtggttccatagatgttaaaagcgaattagggaaaggcacaacatttattattaaactacca

SEQ ID NO: 4266 - DNA, 1488 bp, Staphylococcus aureus
atggaaaaatatattttatctatagaccaaggaacaacaagctcaagagcgattttattcaatcaaaaaggggaaattgcaggggtagcacaacgtgagtttaagcaatattttccacaatcaggttgggttgaacatgatgcaaatgaaatttggacatctgtgttagctgtaatgacggaagtaattaatgaaaatgatgttagagctgatcaaattgcaggtatcggtattacaaaccaacgtgaaacaacggttgtttgggacaaacatactggccgcccaatttatcacgcaattgtttggcaatcacgtcaaacacaatcaatttgttcagaattaaaacaacaaggatatgaacaaacatttagagataagacaggattgcttttagatccgtattttgcaggtacaaaagttaaatggattctagacaatgttgaaggtgcacgagaaaaagcagaaaatggcgatctattatttggaacgattgatacttggttagtatggaaattatcaggaaaagctgcgcatattactgattattcaaatgcgagtcgtacattaatgtttaatatccatgatttagaatgggacgatgagttattagaactacttacagtacctaaaaatatgttgccagaagttaaaccttcaagtgaagtatatggtaagacaattgattaccacttctatggtcaagaagtaccaattgctggtgtagctggtgatcaacaagcagcattatttggacaagcttgcttcgaacgtggtgacgtgaaaaacacatatggaactggtggtttcatgttaatgaatacaggtgacaaagcggttaaatctgaaagtggtttattaacaacaattgcttatggtattgatggaaaagtaaattatgcgcttgaaggttccatctttgtttcgggttcagcaatccaatggttacgtgatggattaagaatgattaattcagcaccacaatcagaaagttatgcgacacgagttgactctactgagggtgtttatgttgttccagcttttgtaggtttaggaacaccgtattgggattctgaagcacgtggtgcgattttcggtttaacacgtggaactgaaaaagagcactttatccgtgcaacattagaatcattatgttaccaaactcgtgacgttatggaagcaatgtcaaaagactctggtatcgatgtccaaagtttacgtgtcgatggtggtgcagttaagaataactttattatgcagttccaagcagacattgttaatacttctgttgaaagacctgaaattcaagaaactacagctttaggtgctgcatatttagcaggtttagcagttggattctgggagagtaaagatgatatcgctaaaaactggaaattagaagaaaaattcgatccgaaaatggatgaaggcgaaagagaaaaattatatagaggttggaaaaaagctgttgaagcaacacaagtttttaaa

SEQ ID NO: 4267 - DNA, 894 bp, Staphylococcus aureus
atgaaattcttatcattcaagtataatgacaaaacttcatatggcgttaaagtaaaacgcgaagatgctgtatgggatttaacacaagtatttgctgactttgcagaaggagatttccatcctaaaacattgttagctggtttacaacaaaatcatactttagattttcaagaacaagtacgtaaagcagttgtagcagcagaagatagcggcaaagctgaagactataaaatttcatttaatgacattgaattcttaccaccagtaacacctccgaataatgtgattgcttttggtagaaattacaaagatcatgcgaacgaattaaatcatgaagtggaaaaattatatgtatttacaaaagcagcgtcatctttaacaggaggtaatgcaacaattccaaatcataaagatattactgatcaattagattatgaaggtgaattaggtattgttattggtaagtctggtgaaaagattccaaaagcattagctttagattatgtttacggctatacaattattaacgatatcactgatcgtaaagcgcaaagtgaacaagatcaagcatttttatcaaaaagtttaactggcggttgcccaatgggtccttatatcgttactaaagacgaactaccattacctgaaaatgtaaatattgttacaaaagttaacaatgaaattagacaagatggtaacactggcgaaatgattcttaaaattgatgaattaatagaagaaatttcaaaatatgttgcactacatccgggagatattattgcaactggtacaccagcaggcgttggtgcaggtatgcaaccacctaaattcttacaaccaggtgatgaagttaaagtgactattgataatattggaacgctgacaacttatatc

SEQ ID NO: 4268 - DNA, 1059 bp, Staphylococcus aureus
ttaaaacaaacacctttatatcaaaattatgttgatagaggtgcaaaaattgtggaattcggaggatgggcgatgcctgttcaattttcaagtattaaagaggagcataatgctgttcgatacgaaattggcctgtttgatgttagtcatatgggtgaaattgaagtaacaggtaaagatgctagtcagtttgtgcaatatttattatcaaatgatactgataatttaactacttcaaaagcattatatactgctttatgtaatgaagaaggcggtattattgatgatttagtaatatataaattagctgacgacaattatttattagtcgtaaatgctgctaatactgaaaaagattttaattggattttaaaacacaaagagaaatatgatgttgaagtacaaaatgtatcaaaccaatatggtcaattagcaatacaaggaccaaaagctagagatttaattaatcaattagttgatgaagatgtaactgaaatgaaaatgtttgaatttaaacagggtgtcaaattatttggagcaaacgtcattttatctcaatcaggttacacaggtgaagatgggtttgaaatttattgtaatatcgatgatactgaaaaaatttgggatggtttattagagtataatgttatgccatgtgggttaggcgctcgtgatacattaagattagaggccggattgccattacatggacaagatttaactgaatcaattacaccatatgaaggtggtatcgcttttgcaagtaaaccattaattgatgctgattttattggtaaatctgtattaaaagatcaaaaagaaaatggtgcaccaagaagaacagtgggattagaattacttgaaaaaggaattgcaagaactggttatgaagttatggatttagatggaaatattattggagaagtaacttcaggaacacagtctccatcatcaggaaaatcaattgcacttgcaatgataaaaagagatgagtttgaaatgggtagagagttgcttgttcaagttcgtaagcgtcaattaaaagcgaaaattgttaag

SEQ ID NO: 4269 - DNA, 1206 bp, Staphylococcus aureus
attgttgtcgctgtttctacaggtattgatagtatgtgtttattgtatcaactactaaatgattataaagatagttatagaaaactaacatgtttacatgtcaatcatggcgttaggtcagcttcaatcgaggaagccagatttttagaagcatactgcgaacgtcatcacatcgatttacatatcaaaaagttggatttgtcgcatagtctcaatcgaaataacagcattcagaatgaagctcgaattaaacgttacgaatggtttgatgaaatgatgaatgtattagaagcggatgtattgctaacggcgcatcatttggacgatcaattagaaactattatgtatcgcatttttaatgggaaatcaacgcgcaataaactaggatttgatgagttgtcgaagcgaaaaggttatcagatttatcgaccacttttagctgtctctaaaaaagaaataaaacaattccaagagagatatcatataccatattttgaagatgaatctaataaagataacaaatatgttagaaatgatattcgtaatagaattattccagctattgatgaaaataatcaacttaaagtatcacatttattaaaattaaaacaatggcatgatgaacaatatgatattttgcaatattcagctaaacaatttattcaagaatttgtgaagtttgatgaacagtcaaaatatttagaggtttctagacaatcttttaatgacttgccaaactcattaaagatggttgtgttggattgcctattatcaaagtattatgagttgtttaatattagtgctaaaacatacgaagagtggtttaaacaatttagtagtaagaaagcacaattcagtattaatctcacggataaatggataattcaaatcgcatatggtaaattaataataatggctaaaaataatggcgatacatattttagagttcaaactattgaaaagccaggtaattatatttttaacaaatatcgattagagatacattctaatttaccaaaatgtttatttccgcttacagtgagaacacgacaaagtggcgatacatttaaactgaatgggcgcgatggttataagaaagtgaatcgcctgtttatagattgtaaagtgcaacagtgggttcgggatcaaatgccaatcgtattggataaacaacagcgcattattgcggtaggagatttatatcaa

SEQ ID NO: 4270 - DNA, 561 bp, Staphylococcus aureus
atgcgccacggacaaactttgtttaattttaagggactaattcagggatttggagattcgccgctaacagaacttggaattgctcaagctcaaaaggcacgtagttattatgaaactaaggggataaacttcgatttatatgcatcatcaacgcaagaacgcgcaagtgacacacttgaaaatgttgcacctaaccattcgtatcaacgttttaagggactgaaggaatggcattttggattatttgaaggtgagtcagtctatctatttgataatctatacaagcctgaggacttattcggagatcgaattgttcctttcaaaggagaggcaaggcaacaagttgaagatcgcgttgtgaaaactttacatgacattatgtctcaaacaaagaataatgcattagtcgtgagtcatggaacaataatgggagtatttttaagatattgccttaaactagatgaagcattaaagcataatattggtaattgtaatatcctgaaatttgaatatgacaatggaacatttaaatttgttgagttaattgatccaaatttataa

SEQ ID NO: 4271 - DNA, 243 bp, Staphylococcus aureus
atgaaacaaggaattcatcctgagtatcaccaagtaatctttttagatactactacaaacttcaaattcttaagcggttctacaaaaacatcttcagaaatgatggagtgggaagatggaaaagaatacccagttattcgtttagatatttcatctgattcacatccattctacactggacgtcaaaaattcgctgctgcggatggacgtgtggaacgtttcaacaaaaagtttggtcttaaa

SEQ ID NO: 4272 - DNA, 966 bp, Staphylococcus aureus
atgtagcatgttttatacattaaaaaattatcagcagcagcgattgcaacgatgggcttcgctacatttacaatggcgcatcaagcctatgcagcagatacgacaaacacccaacaagcacatacacaaatgtcaacacaatcacaagacgtatcttatggtacttattatacaattgattctaatggggattatcatcacacacctgatggtaactggaatcaagcaatgtttgataataaagaatatagctatacattcgtagatgcacaaggacatacgcattatttttataactgttatccaaaaaatgcaaatgccaatggaagcggtcaaacatatgtgaatccagcaacagcaggagataacaatgactacacagcgagtcaaagccaacaacacattaatcaatatggttatcaatcaaatgtaggcccagacgcgagctattattcacatagtaacaacaaccaagcgtataacagtcataatggtaatggaaaggttaattaccctaatggcacatctaatcaaaatggcggttcagcaagtaaagcgacagctagtggtcatgcgaaagacgcaagctggttaacaagtcgtaaacaactacaaccatatggacaatatcacggtggtggtgcgcattacggtgtcgactatgcaatgcctgaaaattcaccagtttactcattaactgatggtacagtagtacaagcaggttggagtaactatggtggtggtaatcaagtaacgattaaagaagcgaacagtaataactaccaatggtatatgcataataatcgtttaactgtttcagctggtgataaagtcaaagctggtgaccaaattgcatattcaggtagtacgggtaattcaacagcacctcacgtacacttccaacgtatgtctggtggcatcggtaatcaatatgcagtagacccaacgtcatacttacaaagtaga

SEQ ID NO: 4273 - DNA, 801 bp, Staphylococcus aureus
atgagggaaaaaaatcttaatactgtatgtgaagaagctaaatgtcctaatatacatgaatgttggggtgcacgtcgtacagcgacatttatgattttaggtgccgtatgtacaagagcttgtcgtttttgtgcggttaagacaggtttacctaatgaacttgatttaaatgagcctgaacgtgtagctgaatcagttgaattaatgaacttgaaacacgttgttatcactgctgttgcgcgtgatgatttaagagatgctggttcaaatgtttatgctgagacagtacgtaaagttagagaaagaaatccatttacaacgattgaaattttaccatcagatatgggcggggactatgatgcgttagaaacattaatggcttcaagacctgacattttaaaccataatattgaaactgttcgtcgattaacaccgagagttcgtgcgcgtgcgacttacgacagaacattagagtttttacgtcgttcaaaagaattacaaccggatatcccaactaaatcaagtattatggttggattaggtgaaactatagaagaaatttatgaaacgatggatgatttacgtgcgaatgatgtagatattttaacgattggtcaatatttacaaccttcacgtaaacatttaaaggttcaaaaatattacacgcctttagagtttggtaaattaagaaaagtggcaatggataaagggtttaaacattgccaagctggacctttagtgcgtagttcttatcatgccgatgagcaagtaaatgaagctgctaaagaaaagcaacgccaa

SEQ ID NO: 4274 - DNA, 1263 bp, Staphylococcus aureus
atggaaaagatgcatatcactaatcaggaacatgacgcatttgttaaatctcacccaaatggagatttattacaattaacgaaatgggcagaaacaaagaaattaactggatggtacgcgcgaagaatcgctgtaggtcgtgacggtgaaattcagggtgttgcgcagttactttttaaaaaagtacctaaattaccttatacgctatgttatatttcacgtggttttgttgttgattatagtaataaagaggcgttaaatgcattgttagacagtgcaaaagaaattgctaaagctgagaaagcgtatgcaattaaaatcgatcctgatgttgaagtcgataaaggtacagatgctttgcaaaatttgaaagcgcttggttttaaacataaaggatttaaagaaggtttatcaaaagactacatccaaccacgtatgactatgattacaccaattgataaaaatgatgatgagttattaaatagttttgaacgccgaaatcgctcaaaagtgagattggcattaaaacgaggtacgactgtggaacgttctgatagagaaggtttaaaaacatttgctgaattaatgaaaatcactggggaacgcgatggcttcttaacgcgtgatattagttactttgaaaatatttatgatgcgttgcatgaagatggagatgctgaactatttttagtaaagttggatccaaaagaaaatatagcgaaagtaaatcaagaattgaatgaacttcatgccgaaattgctaaatggcagcagaagatggaaacatctgaaaagcaagctaaaaaagcgcaaaatatgattaatgatgcacaaaataaaattgctaaaaatgaagatttaaaacgagacctagaagctttagaaaaggaacatcctgaaggtatttatctttctggtgcactattaatgtttgctggctcaaaatcatattacttatatggtgcgtcttctaatgaatttagagattttttaccaaatcatcatatgcagtatacgatgatgaagtatgcacgtgaacatggtgcaacaacttacgatttcggtggtacagataatgatccagataaagactcagaacattatggcttatgggcatttaaaaaagtgtggggaacatacttaagtgaaaagattggtgaatttgattatgtattgaatcagccattgtaccaattaattgagcaagttaaaccgcgtttaacaaaagctaaaattaaaatatctcgtaaattaaaacgaaaa

SEQ ID NO: 4275 - DNA, 2403 bp, Staphylococcus aureus
atggttgttttagttgtcttgggcggtgtatacgcgagtgctaaattgaaattagaattactaccaaatgtacaaaatccagttatttcagttacaacaacaatgccgggtgcaacgccacaaagtacccaagatgaaataagtagtaaaattgacaatcaagtaagatcgttggcatatgtgaaaaatgttaaaacgcaatccatacaaaatgcttcaattgtaacagttgaatatgaaaataatacagatatggataaagcagaagaacagcttaaaaaagaaatcgataaaattaaatttaaagatgaagttggtcaaccagaattaagacgtaattcgatggatgcttttccggttttagcatattcattttcaaataaagagaatgacttgaaaaaagtaacgaaagtactgaatgaacaattaataccaaaattacaaacggtagatggtgtgcaaaatgcgcaattaaatgggcagacgaaccgtgaaatcacccttaaatttaagcaaaatgaacttgaaaaatatggattgactgctgatgatgtagaaaactatctaaaaacggcaacaagaacaacaccacttggattgttccaatttggtgataaagataaatcaattgttgttgatggtcaatatcaatctgttgatgcttttaaaaacataaatattccattaacgttggcaggaggacaagggcaatctcaatcccaaagtgacaataaacaaaattcagccatgtcagatgttaatcaggcatcaccgcagcaaaattcaaaagcgtcagcatcaaataatataagtggtatgccgacagcgaaactaggagatttagctgatattacagttggtgatgtgcgtacttctatttcaaaaacgaatggcaaggatgcggttaatttacaaataactaaagctcaagatgccaatacagttcaagtagccaaagatgtacaacgtaaaattgatacattcgttgatgaaaataaagattttaatgtcacaaaaacaatggatactgcaaagcctgttgagaaatcactttatacgatggttgaaaaagcatcattaggtacaatcgtggcaattatagttattttgctgtttttaagaaacattcgtacgacggcaatttctattatatccattccgttatcacttcttatggcgcttattgctctgaaattgagtgatgtttcattgaatatactaacgttaggtgcattaacagtagcgattggacgtgtgatagacgattcgattgtagttgttgaaaatatttatcgacgcttaacagattcagaagaacaactaaaaggtgaaaatttaattatcagtgcgacaactgaagtatttaaaccaataatgtcatcgacactagttactattatcgtcttcttaccacttgtgtttgtatcaggttcagtaggcgaaatgtttagaccttttgcattggctattgcatttagtttattagcatcgttattagtgtcaattacactcgttccagcgttggcagctacactatttaaaaaaggcgttaaacgtcgtaataaacaacatcaagaaggattaggtgttgttagtacaacttataaaaaagtattgcattggtcactaaatcataagtggattgtaattatattaagtacattaattttggttgcaactattgtatttggaggaccgagactaggcactagctttatttcagcaggtgacgataaatttttagctattacttatacaccgaagcctggtgaaacggagcaagcagtgttgaatcatgcgcaagatgttgaaaaatatttaaaacagaaaaagcatgtaaaaacaattcaatactcagttggcggtagtagtccagtagatccaacgggtagtacaaatagtatggcaatcatggttgaatatgataatgacacgcctaattttgatgtagaagcggataaggttattaaacatgcagatggctttaaacatcctggagagtggaaaaatcaagatttaggaacaggtgcaggtaataaatctgtagaagttactgtaaaaggtccatcaatggatgccataaaatcaactgtaaaagatattgaacagaaaatgaaacaggttaaaggactagccaatgtcaaatctgatttatcgcaaacatatgatcagtatgaaattaaagttgatcaaaataaagcggcagaaaatggtatttctgcaagtcaacttgtaatgcacttgaatgaaaacttaccagaaaaaacagttacgactgttaaagaaaatggtaaaactgttggtgttaaagtcaaacaaaataagcaaacagactggtcagaagataagttgaataatataactttgaaaaagccgactggtggtacgattaaattgggagat

SEQ ID NO: 4276 - DNA, 1956 bp, Staphylococcus aureus
atgctaataaaaagattatggaaatattttgacaaggaaaggagaagtcgaaatgacatctttttgacatcactcataaaaatcaatcgacttaacttagacttttataaaggtgtaagacagggactgttaatgattattcctgcaataatcggttacttatgtggtaatttccaatttggattattagttgcaactggaacactagcccatatttatgtttttaaaggtccgtcgcgatctaagctgcgaactgtaataatttgtaatttagcgtttgcaatatgtatgatgcttggtacgctaacagccaaaacgccactcgtttttggaatgacattattaattgttacggttataccattttatatatttactgccttaaaaatagctggaccgtcatcgacattcttcattgtgacattcagtctacccattaacttacctatagctcccgaagaagcattatatagaggctttgcgattttagtaggcggtatacttgccactatgatggtgttaatcacaatcgtattttctaaaaacaaagctgaagaacaagcaattcaaaatgattttaaactcatatctaagttgttacacacttataatgataaatctgcttttttaaaagtagcaaaaacagcggtggatagttttaaagcatctgataaattattaatcacttctacttcaagtaacgataaattaagtagacgtttccaaaaattattattattacacacatctgcccaagggatttattctgaactgttagagttgaacgctaaacaaattcgaccattgccagatgagttaattgaaatgatggatcatatcattgcacaactagataatagtgatgaaaatgtaagatattggcgaaaagaagtgacagtaacagaggaatttcaaaatttattcaaccatatattgaaaattgatgaaatggtgcatgcaaatgaagcgcgtattgcgtatgaagcagacatgcgaaaacctttatatagtaaacgcatttatcaaaatttaacattagactctattgtttttagaaatacattgagatatacagcgattatgatgatagcgatatttattgcgttaatgtttaattttgaaaaagcatactggataccgttatctgcacatacaatattactaggaacatcaactatacatgcaatcgagagaggtatggcacgaggtttaggtactattttaggtgtgttagtactttctgttatattgttattttcaataccaacacctgttgcagtaattttaatgggcattgcagcattatttactgaagcattggtgggagcaaattatgcgattgcagtagtttttattacaatacaagttattttaatgaacggcttagcatcacagaatttaacaattaacattgcgtttccaagagttattgacgttgcaatgggtattgtgattgcaatcataggtttatttgtccttggacaacgtaccgcatccgcattactcccaaatgtgatggctgaagttgttcgtaaagaagcaacgctcttccattatttattttctgaaaaccaatataaagatgatgtgtatcagaaaaacacggctatgaacctatctgtgaaattaaataacatgacgcaagtttataatgcagctaatggtgaattatttagtgataagacattgattcaaaattattatcctagcttattcgcattagaagaaattagctttatgttaaatagagccatggctaatgaagatagacttacaataaatgaacaattaatgggcgagtatttagcaacatttgaaaacatcgctaagcatttagaattaaatacagaattagaaataaagatattaccagatttaccacagtataattatattcaatcagcaatgatgaatattcaacacaatggttttcgtgagagagacaagaacgtttaa

SEQ ID NO: 4277 - DNA, 873 bp, Staphylococcus aureus
ttgcttctattatttggcacactaattttacttagtggttgttcaaatatagaaattttcaacgcaaaagggccagtagcaagtagtcagaagttcttgattctttattcaatcgtcttcatgcttgttatttgtttcgttgtacttggcatgttcgccatttttatttacaagtatagttataataagaatgccgaatctggtaagatgcaccataatgccatcattgaaacaatatggtttgtaatacctatcataatcgttgctgctttagctattcctacagttaaaactttatacgattacgaaaaaccaccgaagagtgagaaagatccaatggtagtatatgcagtaagtgcaggatacaaatggttctttgcttatccagacgaacatatagagactgttaatacattaacaatccctaaagatcgtcctgttgtatttaagcttcaagctatggatacaatgacaagtttctggattccacaattaggtggtcaaaaatatgccatgactggcatgacaatgaattggacgttagaagcatctcaaactggtacgttcagaggtcgtaactctaacttcaatggtgaaggattctcacgtcaaacatttaaagtaaatgccgttagtcaaaaagactacgacaaatgggtgaaagaagttaaaggtaagaaaacgttagatcaagatacatttgataaacaattattaccaagcacacctaataaagctttagaatttaatggtacacatatggcgtttgttgatccagcagccgatccagaatacatcttctatgcatataaacgtttcaatttcgaattgaaagatccaaacttcactagtgaagaaaatatgtttaaagat

SEQ ID NO: 4278 - DNA, 1947 bp, Staphylococcus aureus
atgaattttccatgggatcaattactagttaaaggtaactggatgattacaatggcacaaattggtgccccattcttagttattggtttaatcgcagtaattacttactttaaattatggaaatatctttacaaagaatggttcacatctgtagaccataagaaaatcggtgttatgtatttaatctgtgccgtattaatgttcgtccgtggtggtattgatgcgttacttattcgtgcgcaattaacagtacctgataacaaatttttagaatctaaccactataacgaaatttttagtacacatggtgtaatcatgattatcttcatggcaatgccatttatctttggtttatggaatatcgttgttccattacaaattggagcacgtgatgttgcattcccagtattaaacaacgtaagtttctggctattctttgcaggtatgattttattcaacctgtcatttattattggtggttcaccagcagctggttggacaaactatgcgccactagcaggtgaattcagtcctggtccgggtgttaactattacttaatagctatacaaatttcagggcttggtaccttagctacaggtatcaacttctttgtaacaattttaagatgtaaaacaccaactatgaagtttatgcaaatgccaatgtttacagtaacaacatttattactacattaattgttattcttgctttccctcctttaacagtagcgttagcattaatgacaactgatagaatatttgacacagcattcttcacagttgcacatggcggtatgccaatgctttgggctaacttcttctgggtatgggggcaccctgaagtttatatcgttatccttccagcatttggtatttactcagaaattatcccgacattcgctcgtaagcgtttattcggacatcaaagtatggtatgggcaactgccggtatcgcgttccttagtttcttagtttgggttcaccatttcttcacaatgggtaatggtgcattaatcaactcattcttctcaatttcaacaatgctgattggtattccaactggtgtgaaattgtttaactggttattaacattatataaaggacgtattacatttgagtcaccaatgttattctcattagcatttatccctaacttccttttaggtggtgttacgggtgtaatgttagcaatggcatctgctgactatcaatatcacaatacgtacttcttagtagctcacttccactatacattggttactggtgttgtatttgcctgcttagctggtttaatcttctggtatccaaagatgatgggttacaaattaaacgaaacattaaacaaatggtgcttctggttcttcatgatcggatttaacgtttgtttcttaccacaattcattcttggattagatggtatgccacgtcgtttatacacttatatgccatcagatggttggttcttattaaacttaatttcaactatcggtgcattattaatggcaatcggattcttattccttgttgttagtatcgtatacagtcacttcaaatctccacgtgaagcaactggagataactgggatggccttggtcgtactctagagtggactactgcatcggcaattccacctaaatacaactttgccattacaccagattggaatgactacgacacatttgttgatatgaaagaacatggtcgtcattacttagacaaccataattacaaagacattcatatgccaaacaatactcctgttggattctggattggtatctttatgactatcggcggtttcttcttaattttcgaaactgtaattccagcattaatttgtttattcggtatttttggtactatgatttatcgcagtttccaaatcgatcacggatatcatatccctgctgctgaagttgctgaaactgaagctagattaagagaa

SEQ ID NO: 4279 - DNA, 2115 bp, Staphylococcus aureus
atgagtaaacaaagaatttacgaatatgcgaaagaattaaatctaaagagtaaagagattatagatgagttaaaaagcatgaatattgaggtttcaaatcatatgcaagctttggaagatgaccaaattaaagcattagataaaaagttcaaaaaagaacaaaagaacgacaataaacaaagcactcaaaataatcaccaaaaatcaaacaatcaaaaccaaaataaagggcaacaaaaagataacaaaaagaatcaacaacaaaataataaaggcaacaaaggcaataaaaagaataatagaaataataagaaaaataacaagaataataaaccacaaaatcaaccagctgctctaaaagaaataccatcaaaagtgacatatcaagaaggtattacagtaggcgaatttgcggataaattaaatgttgaatcatcagaaattatcaaaaaattattcttacttggtattgttgctaatatcaatcaatcattaaatcaagaaacaatcgaattaattgccgatgattatggcgttgaggttgaagaagaagttgtgattaatgaagaagatttatcaatctacttcgaagacgaaaaagatgatccagaagcaattgagagaccagcagttgtaacaattatgggacatgttgaccatggtaaaactactttattagattcaattcgtcatacaaaagttacagcaggtgaagcaggcggaatcactcaacatattggtgcatatcaaattgaaaacgatggcaaaaaaatcactttcttagatacaccgggacatgctgcatttacaacgatgcgtgcgcgtggtgcacaagtaacagatattacaattttagtagtagcagctgacgatggtgttatgccacaaacaattgaagcaattaaccatgctaaagaagcagaagtaccaattattgttgcagtaaataaaattgataaaccaacttcaaatcctgatcgagttatgcaagaattaactgaatatggtttaattcctgaagattggggcggcgaaacaattttcgttccactttctgcattaagtggtgatggtatcgacgatttattagaaatgataggattagttgcagaagttcaagaacttaaagcaaatcctaaaaaccgtgctgttggtacagttatcgaagctgaattagataaatcacgaggtccttctgcatcattattagtacaaaacggtacattaaatgttggtgatgcgattgtagttggtaatacttacggccgtatccgtgcaatggttaatgacttaggtcaaagaatcaaaacggctggcccatcaacgcctgttgaaattacaggtattaatgatgtgccacaagctggggatcgctttgttgtatttagtgatgaaaaacaagctcgtcgtattggtgaatcaagacacgaagctagcattgtacaacaacgtcaagaaagtaaaaatgtttcattagataacctgtttgaacaaatgaaacaaggtgaaatgaaagacttaaacgttattattaaaggtgatgttcaaggttctgttgaagctttagctgcatcattaatgaaaattgatgttgaaggcgtaaatgttcgtatcattcatacagcggttggtgcgattaacgagtcagacgtgacacttgctaatgcctcaaatggtattatcattggtttcaatgttcgtccagacagtggtgcaaaacgtgctgcagaagctgaaaatgttgatatgcgtttacacagagttatttataatgttatcgaagaaattgaatcagcgatgaaaggtttacttgatccagaatttgaagaacaagttatcggacaagctgaagttcgtcaaacattcaaagtttctaaagttggtactattgctggatgttatgttactgaaggtaaaattacgcgaaatgctggtgtacgtattattcgtgatggtattgttcaatatgaaggcgaattagatacacttaaacgtttcaaagatgatgctaaggaagttgcaaaaggttatgaatgtggtattacaattgaaaactacaatgaccttaaagaaggcgatgttatcgaagcatttgaaatggttgaaattaagcgt

SEQ ID NO: 4280 - DNA, 1395 bp, Staphylococcus aureus
atggacaatcaattgattaattcaatcatagagaaatatcaatttagtaaaaaacaaattgaagcagtgttaacactgcttgaagaaaaaaatacagtaccatttattgcgaggtatcgaaaagagcaaactggtggactagatgaagttcaaataaagcaaattgatgacgaataccaatatatggtcaatttacaaaaacgtaaagaagaagttataaaaaatatagaacagcaaggattacttactgaggaattaaagaaagatattttaaaacagaacaaattacaacgtgttgaagacctatatagaccttttaaacaaaagaaaaagactagggcaactgaggcgaaacgtaaaggattagaaccattagcgatatggatgaaggcacgtaaacatgaagtctcaattgaagaaaaagcacaacaatttataaatgaagaagtgcaatcggttgaagatgctatcaaaggtgcgcaagatatgattgcggaacaaatttcagataatcctaaatatagaacaaaaattttaaaagatatgtatcatcaaggtgtgttaactacatctaaaaagaaaaatgctgaagatgaaaaaggtatttttgaaatgtattatgcatacagtgagccaattaaacgcattgctaatcatagagttttagctgtgaatcgtggtgaaaaagagaaagtattatctgtaaagtttgaattcgatacgacatcagtagaggacttcattgcacgtcaagaaatcaatcataataatgtaaatcgcagttatattttagaggcgattaaagatagcttgaaacgcttaattgtcccttcgatagagcgtgaaatccatgctgatttaactgaaaaagctgaaaatcatgcaatagatgtttttagtgaaaacttaagaaatctattactgcaacctccaatgaaaggtaaacaaatattaggcgtagatcctgcatttagaacaggttgtaaattagcagtcattaacccattcggtacttttatagcaaaaggtgtgatttatccgcatccaccagtttctaaaaaagaagcagcagagaaggattttgtacaaatggttaaagcgtatgatgtgcaattaattgcaattggcaatggtacagcaagtcgtgaaacagaacaatttgttgcagatttaattaaaaagcatcagttgccagtacaattcatcattgtcaatgaagcgggcgcttcagtatactcagcatcagaaattgctagagatgaatttcctgattttcaagtggaagaaagaagtgccgtatcaattggacgacgcgttcaagatccattaagtgaattagttaaaatcgatcctaaatctattggtgttggacaataccagcatgatgttaatcaa

SEQ ID NO: 4281 - DNA, 1167 bp, Staphylococcus aureus
tttattcattgttcggatttacatttagatagtcctttcaaatctaagagtcatataagccctaaaatttttgaggatgttcaaaaaagtgcttatgaaagttttaaaaatattgtagatattgcattacaacaagatgttgattttgtaattatcgcgggtgatttatttgatagtgaaaacagaacattacgtgctgaaattttcttaaaacagcaatttgaacgtttacaaaatgaacaaatctttgtttatgtttgtcatggtaatcacgacccattatcatcaaagatttcatcaaactggccagataatgtttctgtattttcaaataaagttgagacgtatgaagcaattactaaatctggtgaaacaatttatattcacggatttagttatgaaaatagagcaagttatgagaacaagattgatgaatatccatcaagtcaaggacaaaaaggcatacatattggtgtcttgcatggtacgtacagtaaatcttctgttaacgaaagatataccgagttcattttagaagatttaaacagtaaattgtatcattattgggctttaggtcatatacatgaacgtcaacaattaagtgatatgcctgtaattaactattcaggtaatattcaaggtagacattttaatgagcaaggtgaaaaaggttgcttattaatcgagggtgaccacttaaaattaaaaactaaattttatcctacacagtatattagatttgaagaagcaactattgaaacggataagacatctaagcaaggtttatacgaggtcattcaaaactttaaagaacaagtgagagaagaaggaaaagccttttatcgtttaacgcttgttattaatagtgagacattaatttcacctcaagatttattacaagttgaagaaatgattacagattatgaagaaaacgaaaatcaatttgtatatattgatgagttaaaaatacaatatgcacaaaatgatgagtcacctttagttaatgaattttcagcggaattattagtcgatcaaactgtttttgataaagcgatgtcagacttatatttaaatccaagggcatctaagttcttagacgattatggaacattcgaccatacagcattagttaatcgtgctgaagaaatattaaaagctgaaatgaga

SEQ ID NO: 4282 - DNA, 1104 bp, Staphylococcus aureus
atggcgaatattaaagcattagatcaacacatcagtgatttaaatcaacaacgccagcaattggttcaagaattagatacattctacaatcatgctgaagctgttacaaaatcacaatttgtttatttcaacaaattatctttattccacgatgtgcaacaatggttgaaatcagctgaagacacgaatgaaaaatggcgtattaatgctgaaaataccaaacttgttacaaatgaattaaatcatttaaatgctcaattagaagaaaataataaaaaaattacagcactattcgattttatcaatgttggtactgaagaagatttttaccaacatcatgaagattaccaaacttatactagtaatttgagtcgttttaatgatttaactaaatatcttgagaaccaaaactattcttatgaattaagttctagtttaagtgaaaaaacaacagcacaacttgaagaagaagatcatttattggctactcaagttgacgaatataatgagcaatatcttgaaatgcaagcacaagtcagtgatttaagtgcacaaatcaatcacatggaaactgatacaacacttgctaatttaagacatgaatatcacagtcttaaaaatcaacttaatgatattgcaaaagattgggcaagtttaagttatttacaaagtttagttgatgaacacattaaacaaattaaagataaacgtttgcctcaagttattaatgaagcggtagaaatattgaagcatttaacagatggcagatatacgatgattaactataatgaagattcaattacggttaaacatgttaatggtcaattatatgatcctgttgaactaagtcaatctacaaaagaattactttatgtagctttacgtatcagtttaattaaggtactacgaccatattatccgttcccattaattgttgatgatgcatttgttcattttgataaaaaacgtactgaaaaaatgttgaattatttacgatcattatcagaacactatcaagtactatactttacatgtgtaaaagataatattgttccatcaaaagaagtgattacattaaacaaaatagaggaaggcgggaaacga

SEQ ID NO: 4283 - DNA, 936 bp, Staphylococcus aureus
agaaatatagagaatctaaatcccggagattcagttgatcactttttcttagtgcataaagctacacagggtgtaacagcacaaggtaaagattatatgacattacatttgcaagataaaagtggtgaaattgaagcgaaattttggacggctacaaaaaatgatatggcaacaatcaagcctgaagaaattgtacatgttaaaggtgacatcataaactatcgcggaaataaacagatgaaagtcaaccaaattagactagcgacaactgaagatcaattaaaaacagaacaatttgtagatggtgcacctttatcaccggcagaaatacaagaagagatttctcattatttgctagatattgaaaatgctaatttacaacgtatcacacgtcatttattgaaaaaatatcaagaacgattttacacatatccagctgctagttctcatcatcataactttgcgagtggcttaagctatcatgtattaacgatgttacgtattgcaaaatcaatttgtgacatttatccattgttaaacaaaagtttgttatatagtggtattattttgcatgatattggtaaagttagagaattaagtggtcctgttgcgacgtcgtatacagtcgaaggtaacttattaggacacatctcgattgcgagtgatgaagtagttgaagcagctcgtgaattgaacattgaaggagaagaaatcatgttgttaagacatatgattttatctcatcatggtaagttagagtatggttcgccaaaactgccatacttaaaagaagcagaaattttatgctatattgataatatcgatgctagaatgaatatgtttgaaaaggcttataaaaaaactgacaagggtcagtttacagataaaatatttggtcttgaaaatcgtagattctacaatcctgaatcactcgat

SEQ ID NO: 4284 - DNA, 693 bp, Staphylococcus aureus
gcattagtattaggtggttctggttcaattggttctgagatagtcaaacaattattaactgatggatttgaagtttatgtgcaatattatcgtactgatataaatgaattaactagcaaatttaatgatgataaagttcattttatacaagcggatttatctcaaacaattgatattgacaaaacatttggtgacattaaatcattagactgtttaatatatgcaagtggtcagtctttatatggtgttttacaagatatgaaagaccatgatattgatgcatgttatcagttgaatgtcttgcaattaattcgattatgtagatatttcgttgatgttttacgtcaaagtgacaatggaagaattattgtaatttcatcaatttggggtgagacaggagctagtatggaaactatttattcgacgatgaaaagtgcacaattaggtttcgttaaggcgcttagtcaagagcttgcactaacatcagtgacagtaaatgctatcacacctggatttgtagccggtaatatggcaagtgagtggcaagaagatgaacttcaagaaatgataactgaattaccacaacagcgattggttttaccgagtgaggttgctcatacatgcgcctatttatatcacccaaatgctagaagtgttactggaactatacagaaagttaatggtgcttggtat

SEQ ID NO: 4285 - DNA, 147 bp, Staphylococcus aureus
gaagttatgacgttaccatcaatcaaagttgttgaacatccagatttatttgttgaaacaagtacttgtacaatggaagattttgactatattatcgaattgagagaaaatgaaaatcaagaaatacattacgaagaaatgaagaaa

SEQ ID NO: 4286 - DNA, 357 bp, Staphylococcus aureus
atgatacatggaattggtgtagatttaatcgaaatcgatcgaataaaagtgttatatagtaagcaaccaaaattggttgagcggattttaactaaaaatgaacagcacaaattcaacaatttcacacatgagcaacgtaaaattgaatttttagctggcaggtttgctacaaaagaagcgttcagtaaagcattaggcacaggcttaggaaaacatgtagcttttaacgatatagactgttacaacgacgaacttggcaaaccaaagattgattacgaagggttcatcgtacatgttagtatctcacacactgagcaatatgcgatgagccaagttgttttagaaaagtcagcattt

SEQ ID NO: 4287 - DNA, 1146 bp, Staphylococcus aureus
atgtcagataaatattatagatctgcgtatatgaatgtagatttaaacgctgttgcatcaaatttcaaagtattcagtacattacatccaaataaaacagtgatggctgtcgttaaagccaatgcctatggactaggtagtgttaaagtagcacgtcatttaatggaaaatggtgccacattttttgctgtagcaacgttagatgaagcgatagaacttagaatgcatgggattactgctaaaattttagtcttaggtgtgttaccagctaaagatattgataaagcgatacaacaccgagttgccttaacggttccgtctaaacagtggttgaaagaagcaattaaaaacatttctggtgagcaagagaaaaagttatggttgcatattaaattagatacaggaatgggacgtttaggtattaaagatactaaaacgtatcaagaagtgattgaaatcattcaacgatatgagcaacttgtatttgaaggcgtctttacacactttgcctgtgctgacgaaccaggagatatgacaactgaacaatatcaacgttttaaagatatggtcaatgaagcaattaaacctgaatatatacattgtcagaactcagcaggttctctattaatggattgccaattctgtaatgcaataagaccaggaatttccctttatggatattatccatcagagtatgtacagcaaaaagttaaagtacaccttaaaccaagtgtgcaattaattgctaatgtagttcaaacaaagacgctacaagcgggtgagtctgtaagttatggtgcaacttatacagctactgatccaacaacaatagcattgttacctattggatatgcagatggctatttacgcattatgcaaggtagctttgtaaatgtaaatggtcatcaatgcgaagttattggtcgcgtatgtatggatcagacaattgtaaaagtgccagatcaagttaaagctggagattcggtgattttaatagataatcatagagaaagtccacagtcggtagaggtggcagctgaaaagcaacatactattaattatgaagtgctatgtaacttgtcgagacgtttgccacgaatctatcatgatggtgatcaacgttttgtaacaaatgaattgttaaaa

SEQ ID NO: 4288 - DNA, 1260 bp, Staphylococcus aureus
atgattaaaatacctagagggacgcaggatattttacctgaagattcaaagaaatggcgttacattgaaaatcaattagatgaattaatgacattttataattataaagaaataagaacaccaatttttgaaagtacagatctttttgcaagaggtgttggtgattcaaccgatgtcgtacaaaaagaaatgtatacatttaaagataaaggcgatagaagtattacattaagacctgagggaacagctgcagttgtgcgttcatatattgaacataaaatgcaaggtaatccaaaccaaccaattaaactttattacaatggaccgatgtttagatatgaacgtaagcaaaaagggcgctatcgtcaatttaatcaatttggtgtagaagctattggtgctgaaaatcctagcgtagatgcggaagtattagctatggttatgcatatttatcaatcatttggattaaaacatttaaagcttgttattaatagtgtaggggatatggcgtctcgaaaagaatataacgaagcgttagtgaaacactttgaaccagtaattcatgaattttgttcagattgtcaatcacgtttgcatacaaatccgatgcgaattttggattgtaaagtagaccgtgataaagaagcgattaagactgcacctagaatcactgatttcttaaatgaggaatctaaggcatattatgaacaagtaaaagcttatttagatgatttaggtattccatatattgaagatcctaacttagttcgtggattggattattatacacatacagcatttgaattaatgatggataaccctaactatgatggtgccattacaactctttgtggtggtggccgttataatggtttattagaattgctagatggtccaagcgaaacaggtattggttttgcgctaagtatagaacgattattgcttgcacttgaagaagaaggtatcgaattagatattgaagaaaacttagatttattcattgttacaatgggtgatcaagcagatcgatatgctgtaaagttattaaatcatttgagacataatggtattaaagcagataaagactacttacagcgtaaaattaaaggacaaatgaaacaagcagaccgtttaggtgccaagtttacaatcgttattggtgatcaagaattagaaaataataaaatcgatgttaaaaatatgacaactggtgaatctgaaacaattgaattagacgcattagtcgaatattttaagaag

SEQ ID NO: 4289 - DNA, 1770 bp, Staphylococcus aureus
atgagtaagagaacaacttattgtggattagttactgaagcatttttaggacaagaaattacattaaaaggatgggttaacaatcgtcgtgacctaggtggattgattttcgttgatttaagagatagagaaggaattgtacaagtcgtgtttaatcctgcattttcagaagaggcattgaaaattgctgaaacagtacgttctgaatatgttgtagaagttcaaggtacagttacgaagcgtgaccctgaaacagttaatcctaaaattaaaactggccaagttgaagtacaagttacaaatattaaagtaattaataaatctgagacaccaccattttctataaatgaagaaaatgttaacgttgatgaaaatattcgattaaaataccgttatttagatttacgtcgtcaagagttagcgcaaacatttaaaatgagacatcaaattacacgttctattcgtcaatatttggatgaggaagggttctttgacatcgaaacaccagtactaacgaagtcaacacctgagggtgcacgtgactatttagtaccatctcgtgttcatgatggtgaattttatgcattaccacaatcgccacaattatttaagcaattattgatgattagcggatttgacaaatactaccaaatcgtaaaatgcttccgtgacgaagatttacgtgcagatcgtcaacctgaattcacacaagtcgatattgaaatgagttttgtagatcaagaagatgtgatgcaaatgggtgaagaaatgcttaaaaaagttgttaaagaagttaaaggcgttgaaattaatggcgcgttcccacgcatgacatataaagaagcgatgcgtcgctatggttctgataaaccagatacgcgttttgaaatggaattaattgacgtttctcaattaggacgtgatatggactttaaagtatttaaagatactgttgaaaatgatggtgaaattaaagcaattgtcgctaaaggtgcagctgaacaatatacacgtaaagatatggatgctttaacagaatttgtaaacatctatggtgctaaaggattagcgtgggttaaagttgtggaagatggtttgacaggtccaattggacgtttctttaaaacagaaaatgttgaaacattacttacattaactggtgctgaagctggtgacttagtaatgtttgttgcagacaaaccaaatgtcgttgcacaaagtttaggtgcattacgtgtcaaattagctaaagaattaggtttaatcgatgaaacaaaattaaacttcttatgggtgacagattggccattattagaatatgatgaagatgcgaaacgttacgttgcagcacatcatccatttacatctccaaaagaagctgatattgctaagcttggcactgcgccagaagaagctgaggcaaatgcttatgacatagtattaaatggttatgaattaggtggcggttcaatcagaattcatgatggtgagttacaagaaaaaatgttcgaagttcttggatttactaaagaacaagcacaggaacaattcggcttcttactagatgcatttaaatatggtgcgccacctcatggcggtattgcattaggattagaccgattagtcatgttattgactaatagaacaaacttgagagatacaattgcattccctaaaacagcatctgctacatgtttattaacgaatgcgcctggtgaagtttctgataaacaattagaagaactttctttgcgaattcgtcactaaatt

SEQ ID NO: 4290 - DNA, 1062 bp, Staphylococcus aureus
aagtcttcaattaaaccagaacattttcatttaatgtacttattagaacaacattctccatattttatagatgctgaattaactgaactacgtgatagtttccaaatacattatgacattaatgacaatcatacaccttttgataatattaaatcatttactaaaaatgaaaaattacgttacttactcaatatcaaaaatttagaagaagtaaatcgtacacgctacacatttgtgttggcaccagatgaattatttttcacaagagatggattaccaattgctaaaacaagagggttacaaaatgttgttgatccattaccggtgtcagaagctgaatttttaacaagatataaagcactggttatctgtgcattcaatgagaaacaatcatttgatgctttagttgaaggaaacttagaactacataaaggaacgccatttgaaactaaagttattgaagcggcaacgttagatttactaacggcatttttagatgaacagtatcagaaacaagaacaagattatagtcaaaattatgcatatgtacgcaaagtaggacataccgtttttaaatgggtctctatcggtatgacaacgttaagtgttttattaattgcatttttagcctttttatatttttcagtaatgaagcataatgagcgcattgaaaaaggataccaagcatttgtaaaggatgattatacgcaagtactaaatacgtatgatgatttagatggtaaaaaattagataaagaggcactttacatttatgccaaaagttatatccaaacaaataaacaaggtttagaaaaagataagaaagaaaatttacttaataacgtgacaccaaattcaaataaagactacttattatattggatggaattaggacaaggacatcttgatgaagcgattaatattgccacttatttagatgataacgatattacaaagttagcgttgattaataagttaaatgagattaaaaataacggagatttatcgaatgataaacgttctgaagaaacgaaaaagtataacgataaattgcaagatatt

SEQ ID NO: 4291 - DNA, 798 bp, Staphylococcus aureus
atgaataaaccaataggtgtaatagactctggtgtcggaggtttgacagtagctaaagaaattatgcgtcagttgccaaatgagacgatttattacttaggtgatattgggcgatgtccatatgggccaagaccaggagaacaagtaaaacaatatacagttgaaatcgctcgtaaattaatggaatttgatataaaaatgctcgtgattgcttgtaatacagcaactgctgtagctttagaatatttacaaaagaccttatcaatcccagtgattggcgtaattgaaccaggtgctagaacagcaataatgaccactagaaatcaaaatgtattagtactaggaacggaaggcacaattaaatctgaagcatatcgtacgcatattaaacgtataaatccacatgtagaggtacatggcgttgcctgtccaggttttgtgccacttgtagaacaaatgagatatagtgatccaacaattacaagcattgtcattcatcaaacactgaaacgttggcgtaatagtgagtctgatactgtcattttaggatgtactcactatccattgctctataaacctatctatgattattttggtggtaaaaagactgtgatttcgtctggattagaaacggctcgtgaagttagtgcattgctaacatttagtaatgaacatgcaagttatactgaacatccagatcatcgattttttgcaacaggtgatcctactcacattactaacattatcaaagagtggttaaatttatctgtcaatgtggaacgtatatcagtgaatgac

SEQ ID NO: 4292 - DNA, 1242 bp, Staphylococcus aureus
gaggtaataaaaataagaggtgggcgcacactaaacggggaagttaatatcagtggtgcgaaaaacagtgctgtagctatcattcctgcaacattattagctcaaggacatgtaaaattagaaggtttaccacaaatctctgatgttaaaacgttagtgagtttattagaagatttaaatattaaagcaactctaaatggtacggaattagaggttgatacaactgaaatacaaaatgctgcattaccaaataataaagttgaatcattacgtgcttcatactatatgatgggtgccatgttaggtagatttaaaaaatgtgtcattggtttgcctgggggatgtccacttgggccacgtccaattgatcaacatattaaaggatttaaagctttaggtgcagaaattgatgaatcaagtacgacatcaatgaaaattgaagctaaagagttaaaaggtgcacatatttttctagatatggttagcgtaggtgcaacaattaacattatgctagctgcagtttatgcaacaggacaaactgtaattgaaaatgctgctaaagaaccggaagtagttgatgttgctaacttcttaacaagtatgggagctaatattaagggagcgggtacatcaacgattaaaatcaatggtgtcaaagaattacatggttctgagtatcaagttatacctgatagaattgaagcaggcacatatatgtgtatcgctgcagcatgtggagaaaatgttatattaaataatattgttccgaaacatgtagaaacattaactgctaaatttagtgaattaggtgtaaatgttgatgtaagagacgaaagaattcgcatcaataataatgcgccatatcaatttgttgatattaaaacactagtatatccaggttttgctactgatttgcaacagcctattacaccattattatttatggcaaatggtccttcgtttgtaactgatacgatttatccggagcgttttaaacatgttgaagaattaaagcgcatgggtgcaaatattgaagttgacgaaggcacagcaacgataaaaccatcaacattacatggtgctgaagtttatgctagcgatttaagagcaggagcttgtttaattattgctggtttaattgctgagggtgtaactacaatttacaacgttaaacatatttatagaggttatacagatattgtagaacatttaaaagctttaggtgcagatatttggacggaa

SEQ ID NO: 4293 - DNA, 1221 bp, Staphylococcus aureus
aagaactatactaccaaggaactcactcaaaaagctaaaactcttaagttgacgaactatagtaaattaaataaaaaagaacttgttctagctattatggaagcacaaatggaaaaagatggtaactattatatggaaggtatcttagatgatatacaaccagatggttatggttttttaagaacagtgaactattctaaaggggaaaaagatatttatatatctgctagccaaattcgtcgttttgaaattaaacgtggggataaagtaactgggaaagttagaaaacctaaagataacgaaaaatattatggcttattacaagttgactttgttaatgaccataacgcagaagaagtgaagaaacgtccgcatttccaagctttgacaccactttatccagatgagcgtattaaattagagacagaaacacaaaattattcaacgcgcatcatggatttagtaacaccgattggtttaggtcaacgtggtttaatagtggcgccacctaaagcaggtaaaacatcgttattaaaagagatagcgaatgcaatcagtacgaacaaaccagatgcaaagctatttattttgttagttggcgagcgtcctgaagaggtaacagatttagaacgctcagtagaagctgctgaagtcgttcattcaacgtttgacgaaccaccagaacaccatgttaaagtagctgaattattacttgaacgtgcaaagcgtttagtagaaattggggaagatgtcattattttaatggattctataacgagattagcacgcgcttataacttagttattccaccaagtggtcgtacattatcaggtggtttagatcctgcatctttacacaaaccaaaagcattcttcggtgcagcgagaaatattgaagcgggtggaagtttaacaatacttgcaactgcattagttgatacgggttcacgtatggacgatatgatttacgaagagtttaaaggaacaggtaacatggagttacatttagatcgtaaattgtctgaacgtcgtatcttccctgcaattgatattggcagaagttcaacgcgtaaagaagaattgttgataagtaaatctgaattagacacattatggcaattaagaaatctattcactgactcaacagactttactgaaagatttattcgcaaacttaaaaagtctaagaataatgaagatttcttcaagcagctacaaaag

SEQ ID NO: 4294 - DNA, 2400 bp, Staphylococcus aureus
gtgagtgaaataattcaagatttatcacttgaagatgttttaggtgatcgctttggaagatatagtaaatatattattcaagagcgtgcattgccagatgttcgtgatggtttaaaacccgtacaacgtcgtattttatatgcaatgtattcaagtggtaatacacacgataaaaatttccgtaaaagtgcgaaaacagtcggtgatgttattggtcaatatcatccacatggagactcctcagtgtacgaagcaatggtccgtttaagtcaagactggaagttacgacatgtcttaatagaaatgcatggtaataatggtagtatcgataatgatccgccagcggcaatgcgttacactgaagctaagttaagcttactagctgaagagttattacgtgatattaataaagagacagtttctttcattccaaactatgatgatacgacactcgaaccaatggtattgccatcaagatttcctaacttactagtgaatggttctacaggtatatctgcaggttacgcgacagatataccaccacataatttagctgaagtgattcaagcaacacttaaatatattgataatccagatattacagtcaatcaattaatgaaatatattaaaggtcctgattttccaactggtggtattattcaaggtattgatggtattaaaaaagcttatgaatcaggtaaaggtagaattatagttcgttctaaagttgaagaagaaactttacgcaatggacgtaaacagttaattattactgaaattccatatgaagtgaacaaaagtagcttagtaaaacgtatcgatgaattacgtgctgacaaaaaagtcgatggtatcgttgaagtacgtgatgaaactgatagaactggtttacgaatagcaattgaattgaaaaaagatgtgaacagtgaatcaatcaaaaattatctttataaaaactctgatttacagatttcatataatttcaacatggtcgctattagtgatggtcgtccaaaattgatgggtattcgtcaaattatagatagttatttgaatcatcaaattgaggttgttgcaaatagaacgaagtttgaattagataatgctgaaaaacgtatgcatatcgttgaaggtttgattaaagcgttgtcaattttagataaagtaatcgaattgattcgtagctctaaaaacaagcgtgacgctaaagaaaaccttatcgaagtatacgagttcacagaagaacaggctgaagcaattgtaatgttacagttatatcgtttaacaaacactgacatagttgcgcttgaaggtgaacataaagaacttgaagcattaatcaaacaattacgtcatattcttgataaccatgatgcattattgaatgtcataaaagaagaattgaatgaaattaaaaagaaattcaaatctgaacgactgtctttaattgaagcagaaattgaagaaattaaaattgacaaagaagttatggtgcctagtgaagaagttattttaagtatgacacgtcatggatatattaaacgtacttctattcgtagctttaatgctagcggtgttgaagatattggtttaaaagatggtgacagtttacttaaacatcaagaagtaaatacgcaagataccgtactagtatttacaaataaaggtcgttatctatttataccggttcataaattagcagatattcgttggaaagaattggggcaacatgtatcacaaatagttcctatcgaagaagatgaagtggttattaatgtctttaatgaaaaggactttaatacagatgcattttatgtttttgcgactcaaaatggcatgattaagaaaagtacagtgcctctatttaaaacaacgcgttttaataaacctttaattgctactaaagttaaagaaaatgatgatttgattagtgttatgcgctttgaaaaagatcaattaattaccatcattactaataaaggtatgtcattaacgtataatacaagtgaactatcagataccggattaagggcagctggtgttaaatcaataaatcttaaagctgaagatttcgttgttatgactgaaggtgtttctgaaaatgatactatattgatggccacacaacgcggctcgttaaaacgtattagttttaaaatcttacaagttgctaaaagagcacaacgtggaataactttattaaaagaattaaagaaaaatccacatcgtatagtagctgcacatgtagtgacaggtgaacatagtcaatatacattatattcaaaatcaaacgaagaacatggtttaattaatgatattcataaatctgagcaatatacaaatggctcattcattgtagatacagatgattttggtgaagtaatagacatgtatattagc

SEQ ID NO: 4295 - DNA, 1989 bp, Staphylococcus aureus
atgaataaacaaaataattattcagatgattcaatacaggttttagaggggttagaagcagttcgtaaaagacctggtatgtatattggatcaactgataaacggggattacatcatctagtatatgaaattgtcgataactccgtcgatgaagtattgaatggttacggtaacgaaatagatgtaacaattaataaagatggtagtatttctatagaagataatggacgtggtatgccaacaggtatacataaatcaggtaaaccgacagtcgaagttatctttactgttttacatgcaggaggtaaatttggacaaggcggctataaaacttcaggtggtcttcacggagttggtgcttcagttgtaaatgcattgagtgaatggcttgaagttgaaatccatcgagatggtaatatatatcatcaaagttttaaaaacggtggttcgccatcttctggtttagtaaaaaaaggtaaaactaagaaaacaggtaccaaagtaacatttaaacctgatgacacaatttttaaagcatctacatcatttaattttgatgttttaagtgaacgactacaagagtctgcgttcttattgaaaaatttaaaaataacgcttaatgatttacgcagtggtaaagagcgtcaagagcattaccattatgaagaaggaatcaaagaatttgttagttatgtcaatgaaggaaaagaagttttgcatgacgtggctacattttcaggtgaagcaaatggtatagaggtagatgtagctttccaatataatgatcaatattcagaaagtattttaagtttcgtaaataatgtacgtactaaagatggtggtacacatgaagttggttttaaaacagcaatgacacgtgtatttaatgattatgcacgtcgtattaatgaacttaaaacaaaagataaaaacttagacggtaatgatattcgtgaaggtttaacagctgttgtgtctgtacgtattccagaagaattactacaatttgaaggacaaacgaaatctaaattgggtacttctgaagcaagaagtgctgttgattcagttgttgcagacaaattgccattctatttagaagaaaaaggacaattgtctaaatcacttgtgaaaaaagcgattaaagcacaacaagcaagggaagctgcacgtaaagctcgtgaagatgctcgttcaggtaagaaaaacaagcgtaaagacactttgctatctggtaaattaacacctgcacaaagtaaaaacactgataaaaatgaattgtatttagtcgaaggtgattctgcgggaggttcagcaaaacttggacgagaccgcaaattccaagcgatattaccattacgtggtaaggtaattaatacagagaaagcacgtctagaagatatttttaaaaatgaagaaattaatacaattatccacacaatcggggcaggcgttggtactgactttaaaattgaagatagtaattataatcgtgtaattattatgactgatgctgatactgatggtgcgcatattcaagtgctattgttaacattcttcttcaaatatatgaaacctctcgttcaagcaggtcgtgtatttattgctttacctccactttataaattggaaaaaggtaaaggcaaaacaaagagagttgaatacgcttggacagacgaagagcttaataaattacaaaaagaacttggtaaaggcttcacgttacaacgttacaaaggtttgggtgaaatgaaccctgaacaattatgggaaacgacgatgaacccagaaacacgaactttaattcgtgtacaagttgaagatgaagtgcgttcatctaaacgtgtaacaacattaatgggtgacaaagtacaacctagacgtgaatggattgaaaagcatgttgagtttggtatgcaagaggaccaaagtattttagataattctgaagtacaagtgcttgaaaatgatcaatttgatgaggaggaaatc

SEQ ID NO: 4296 - DNA, 720 bp, Staphylococcus aureus
atgaacaaaaacgtagtcatcaagagtttagcagctttaacaattttaacatctgtaacaggtattggagcaacattggttgaggaagttcaacaaactgccaaagcagaaaataatgtcacaaaaattaaagatactaatatttttccatatacaggtgtagttgcttttaatagtgcaactgggtttgtagttggaaagaatactattttaacaaataaacatgtgtcgaaaaattacaaagtgggcgatcgtattactgcacatccaaatagcgataaaagtaatggtggtatttattcgattaaaaagattattaattatccaggtaaagaagatgtatcagtcattcaagttgaagagcgtgcaatagaacgtggtccaaaaggatttaattttaatgataatgtaacgccgttcaaatatgcagcaggggctaaagctggtgaccgaattaaagtgatcggttatccacacccatacaaaaataaatatgttttacatgagtcaactggtcctgtgatgtcagtagaaggtagcagcattgtatattcagcgcatactgaaagtggaaactctggatcacctgtattaaacagcaacaacgaattaataggtattcattttgcttctgatgtaaaaaatgatgacaacagaaatgcatatggcgtctactttacaccagaaattaaaaagttcattgcagaaaacatagataaa

SEQ ID NO: 4297 - DNA, 717 bp, Staphylococcus aureus
atgaataaaaatataatcatcaaaagtattgcggcattgacgattttaacatcagtgactggcgtcggcacaacaatggttgaggatattcaacaaacagccaaagcagaaaatagtgtgaaattaattaccaacacgaatgttgcaccatacagtggtgttacatggatgggcgctggaacaggatttgttgttggaaatcatacaatcattaccaataaacatgttacttatcacatgaaagtcggtgatgaaatcaaagcacatcctaatggtttttataataacggtggtggactttataaagttactaagattgtagattatcctggtaaagaagatattgcggttgtacaagttgaagaaaaatcaacgcaaccaaaaggtagaaaattcaaagatttcactagcaaatttaaaatagcatcagaggctaaagaaaatgaatctatatcaatcattggttatccaaatcctaatggaaataaactacaaatgtatgaatcaactggtaaagtactatcagtgaatggaaatatagtgacatctgatgcggttgtccaacctggcagctctggttcacctatattaaatagtaagcgagaagcaattggtgttatgtatgctagtgataaaccaacaggtgaaagtacaaggtcatttgctgtttatttctctcctgaaattaagaaattcattgcagataatttagataaa

SEQ ID NO: 4298 - DNA, 267 bp, Staphylococcus aureus
catcattctgaacaaataaaaacgaatcttaaatcacgtttaaatcgaattgaaggacaagtgagagcgattaatcgcatgattgaagaagatgtctattgtgatgatgtccttacgcaaataagagcgacacgttcggcattaaacagtgttgcgataaagttattagaacaacatatgaaaagttgtattatgaataaagttaatcaaggtgctcaggaagaggcaatggaagagttattagtgacttttcaaaaattgattaaa

SEQ ID NO: 4299 - DNA, 1035 bp, Staphylococcus aureus
gtttttggagggaaaagtgcagaacacgaagtatcgattctgacagcacaaaatgtattaaatgcaatagataaagacaaatatcatgttgatatcatttatattaccaatgatggtgattggagaaagcaaaataatattacaactgaaattaaatctactgatgagcttcatttagaaaatggtgaggcgcttgagatttcacagctattgaaagaaagtagttcaggacaaccatacgatgcagtattcccattattacatggtcctaatggtgaagatggcacgattcaaggactttttgaagttttggatgtaccatatgtaggaaatggtgtattgtcagctgcaagttctatggacaaacttgtaatgaaacaattatttgaacatcgagggttaccacagttaccttatattagtttcttacgttctgaatatgaaaaatatgaacataacattttaaaattagtaaatgataaattaaattacccagtctttgtaaaacctgctaacttagggtcaagtgtaggtattagtaaatgtaataatgaagcggaacttaaagaaggtattaaagaagcattccaatttgaccgtaagcttgttattgaacaaggcgttaacgcacgtgaaattgaagtagcagttttaggaaatgactatcctgaagcgacatggccaggtgaagtcgtaaaagatgtcgcgttttacgattacaaatcaaaatataaagatggtaaggttcaattacaaattccagctgacttagacgaagatgttcaattaacgcttagaaatatggcattagaggcattcaaagcgacagattgttctggtttagtccgtgctgatttctttgtaacagaagacaaccaaatatatattaatgaaacaaatgcaatgcctggatttacggctttcagtatgtatccaaaattatgggaaaatatgggcttatcttatccagaattgattacaaaacttatcgagcttgctaaagaacgtcaccaggataaacagaaaaataaatac

SEQ ID NO: 4300 - DNA, 1353 bp, Staphylococcus aureus
atgattaatgttacattaaagcaaattcaatcatggattccttgtgaaattgaagatcaatttttaaatcaagagataaatggagtcacaattgattcacgagcaatttctaaaaatatgttatttataccatttaaaggtgaaaatgttgacggtcatcgctttgtctctaaagcattacaagatggtgctggagctgctttttatcaaagagggacacctatagatgaaaatgtaagcgggcctattatatgggttgaagacacattaacggcattacaacaattggcacaagcttacttgagacatgtaaaccctaaagtaattgccgtcacagggtctaatggtaaaacaacgactaaagatatgattgaaagtgtattgcataccgaatttaaagttaagaaaacgcaaggtaattacaataatgaaattggtttacctttaactattttggaattagataatgatactgaaatatcaatattggagatggggatgtcaggtttccatgaaattgaatttctgtcaaacctcgctcaaccagatattgcagttataactaatattggtgagtcacatatgcaagatttaggttcgcgcgaggggattgctaaagctaaatctgaaattacaataggtctaaaagataatggtacgtttatatatgatggcgatgaaccattattgaaaccgcatgttaaagaagttgaaaatgcaaaatgtattagtattggtgttgctactgataatgcattagtttgttctgttgatgatagagatactacaggtatgtcatttacgattaataataaagaacattatgatctgccaatattaggaaagcataatatgaaaaatgcgacgattgccattgcggttggtcatgaattaggtttgacatataacacaatctatcaaaatttaaaaaatgttagcttaactggtatgcgtatggagcaacacacattagaaaatgatattactgtgataaatgatgcctataatgcaagtcctacaagtatgagagcagctattgatacactgagtactttgacagggcgtcgcattctaattttaggagatgttttagaattaggtgaaaatagcaaagaaatgcatatcggtgtaggtaattatttagaagaaaagcatataggtgtgttgtatacgtttggtaatgaagcaaagtatatttatgattcgggccagcaacatgtcgaaaaagcacaacacttcaattctaaagacgatatgatagaagttttaacaaatgatttaaaagcgcatgatcgtgtattagttaaaggatcacgtggtatgaagttagaagaagtcgtaaatgctttaatt

SEQ ID NO: 4301 - DNA, 2697 bp, Staphylococcus aureus
ttcggtgcgaatttaggtctaatgttagatctatatgatgactttttacaagatccatcatctgtaccagaagatttacaagtcttattcagcacaattaagaatgatgactcaattgtaccagctttaaaaagtacaagtagtcaaaatagcgacggcacaattaagcgtgtcatgcgtttaattgataatattcgccaatacgggcatcttaaagccgatatttatcctgtaaatcctccgaaaaggaaacatgtacctaaattagagattgaagactttgatttagatcaacagactttggaaggtatatcagcaggaattgtttcagatcactttgccgacatttatgataatgcttatgaagcaattttaagaatggaaaaacgttacaaaggaccgattgcatttgagtatacgcatattaataacaataccgaacgtggttggttaaaaagaagaattgaaacgccatataaagtaacgttaaataataacgaaaaaagggcactatttaaacaattagcgtatgttgaagggtttgaaaaatatcttcataaaaacttcgttggtgcaaagcgtttttcaattgaaggggtagacgcacttgtaccgatgttacaacgtactattacgattgctgcgaaagaaggtattaaaaatatacaaataggcatggctcaccgtggacgtttaaacgttttaacgcatgtcttagaaaaaccgtacgaaatgatgatttcagaatttatgcatacagatccaatgaaattcttacctgaagatggtagtttgcagttaactgctggatggactggtgatgtgaaatatcaccttggtggtattaaaactactgattcatacggtacaatgcagcgtattgcactggctaacaatccaagtcacttggaaattgttgcacctgttgttgaagggcgtacgagagcagcacaagatgatacacagcgtgctggggctccgacgactgatcatcataaagcaatgccaattattatacacggcgatgctgcttatcctggtcaaggaattaacttcgaaacaatgaatttaggaaacttgaaaggctattctacgggtggctcattgcatattattactaacaatagaattggatttactacagaaccaattgatgcacgttcaacaacttattctacagatgtggctaaaggttatgatgtgccaatattccatgtcaatgctgatgacgttgaagctactattgaagcaattgatattgcaatggaatttagaaaagagtttcataaagacgtcgttattgatttagtaggttatcgtcgtttcggacataacgaaatggatgaaccatcaattactaatccagttccttatcagaatattcgcaaacatgactctgttgaatatgtgtttggtaaaaagcttgttaatgaaggtgtcatttcagaagatgaaatgcattcatttatagaacaagtccaaaaggaactaagagaagctcatgataaaattaataaagctgataaaatggataatccagatatggaaaaacctgcagaacttgcattaccgttacaagcagacgaacaatcatttacgtttgatcacttgaaagaaataaatgatgcattgttaacatatccggatggctttaacattttgaaaaagttaaacaaagttcttgagaaacgtcatgagccgtttaataaagaagatggtttagttgattgggcacaagcagaacaacttgcatttgcgacaattttacaagatggtacaccgattcgcttaactggtcaagatagtgaacgtggtacattcagtcataggcatgccgtgttacatgatgagcaaacaggtgaaacatatacacctttacatcatgttcctgatcaaaaagcgacatttgatatacacaattctccgctttcagaagcagcagtagttggttttgaatacggttataatgtggaaaacaaaaaaagcttcaatatttgggaagcacaatatggtgattttgcaaatatgtcacaaatgatttttgacaacttcttattcagttctcgctcaaaatggggagaacgttcaggattaacattattcttacctcatgcatatgagggtcaaggacctgaacattcatcagcaagattagagaggtttttacaattagctgctgaaaataattgcacagttgtcaacttatctagttcaagtaattatttccacttattgcgtgcacaagcggctagtttagattctgaacaaatgcgaccattggttgttatgtcgccaaaaagcttgctgagaaataaaacagttgcaaaaccaattgatgaatttacttctggtggatttgagccaattttgacagaatcatatcaagcggataaggttacaaaagttattttagcaactggtaaaatgttcattgatttaaaagaagcattagctaaaaatccagacgaatcagttttactcgttgcgattgaaagattgtatccattcccagaggaagagattgaagcattactagcacaattgccaaaccttgaagaagtgtcatgggtacaagaagaacctaaaaatcaaggtgcctggttatatgtttatccatatgttaaagtactagttgcagataaatatgatttaagttatcatggcagaattcaaagggctgctccagctgaaggtgat

SEQ ID NO: 4302 - DNA, 720 bp, Staphylococcus aureus
gtgaaaatattactaattggctatggcgcaatgaatcaacgcgttgctagattagcagaagaaaaaggacatgaaatcgttggggtcattgaaaatacaccgaaagcaacaacgccatatcaacaatatcaacatattgcagatgttaaagatgccgatgttgcaatagatttttcaaatccaaatctgcttttccctttattagatgaagagtttcatttgccattagttgtggcaacaactggcgagaaagaaaaactacttaataagttagatgaattgagtcaaaatatgcctgtatttttcagcgcgaacatgagttatggcgttcatgcactgactaaaattttagcagctgctgttcccctacttgatgatttcgacatcgaattgactgaggcacatcataataaaaaagtagatgcaccaagtggtacgttagaaaaattatatgacgtgattgtatctttgaaagaaaatgtaactcctgtttatgatagacatgaattaaatgaaaaacgccagccacaagatattggtattcattctattcgtggaggtacgattgtcggtgaacatgaagttctatttgccggcactgatgaaacgattcaaatcacgcatcgtgcacaatcaaaagatatttttgcgaatggtgcaatacaagcagcagaacgcttagttaataaaccaaacggcttttatacgtttgacaaccta

SEQ ID NO: 4303 - DNA, 3639 bp, Staphylococcus aureus
atgacaattccagagaaaccacaaggcgtgatttggactgacgcgcaatggcaaagtatctacgcaactggacaagatgtacttgttgcagccgcggcaggttcaggtaaaacagctgtactagttgagcgtattatccaaaagattttacgtgatggcattgatgtcgatcgacttttagttgtaacttttacaaacttaagtgcacgtgaaatgaagcatcgtgtagaccaacgtattcaagaggcttcgattgctgatcctgcaaatgcacacttgaaaaaccaacgcatcaaaattcatcaagcacaaatatctacacttcatagtttttgcttgaaattaattcaacagcattatgatgtattaaatattgacccgaactttagaacaagcagtgaagctgaaaatattttattattagaacaaacgatagatgaagtcatagagcaacattacgatatccttgatcctgcttttattgaattaacagagcaattgtcttcagatagaagtgatgatcagtttcgaatgattattaaacaattgtatttctttagcgttgcaaatccaaatcctacaaattggttggatcaattggtgacaccatacgaagaagaagcacaacaagcgcaacttattcaactactaacagacttatctaaagtatttatcacagctgcctatgatgctttaaataaggcgtatgatttgtttagtatgatggatggcgtcgataaacatttagctgttatagaagatgaacgacgtttaatggggcgtgttttagaaggtggctttattgatataccttatttaactggtcacgaatttggcgcgcgtttgcctaatgtaacagcgaaaattaaagaagcaaatgaaatgatggttgatgccttagaagatgctaaacttcagtataaaaaatataaatcattaattgataaagtgaaaagtgattacttttcaagagaagctgatgatttgaaagctgatatgcaacaattggcgccacgagtaaagtaccttgcgcgtattgtgaaagatgttatgtcagaattcaatcgaaaaaagcgtagcaaaaatattttggatttttctgattatgaacattttgcattacaaattttaactaatgaggatggttcgccttcagaaattgccgaatcataccgtcaacacttccaagaaatattggtcgatgagtatcaagatacgaaccgagttcaagagaaaatactatcttgcatcaaaacgggtgatgaacataatggtaatttatttatggttggagatgttaagcaatccatttataaatttagacaagctgatccaagtttatttattgaaaagtatcaacggtttactatagatggagatggcactggacgtcgaattgatttgtcacaaaacttccgttcacgtaaagaagtactgtcaacgacaaattatatattcaaacatatgatggatgaacaagtcggtgaagtaaattatgatgaatcagcacaattgtattatggtgcaccatatgatgaatcggaccatccagtaaacttaaaagtgcttgttgaagcggatcaagaacatagtgatttaactggtagtgaacaagaagcgcattttatagtagaacaagttaaagatatcttagaacatcaaaaagtttatgatatgaaaacaggaagctatagaagtgcgacatacaaggatatcgttattctagaacgcagctttggacaagctcgcaatttacaacaagcctttaaaaatgaagatattccattccatgttaatagtcgtgaaggatactttgaacaaacagaagtccgtttagtattatcatttttaagagcgatagataatccattacaagatatttatttagttgggttaatgcgttccgttatttatcagttcaaagaagacgaattagctcaaattagaatattgagtccaaatgatgactacttctatcaatcgattgtaaattacattaatgacgaagcagcagatgctattttagttgataaattaaaaatgtttttatcagatattcaaagttaccaacaatatagtaaagatcatccggtgtatcagttaattgataaattttataatgatcattatgttattcaatactttagtggacttattggtggacgtggacgacgtgcaaatctttatggtttatttaataaagctatcgagtttgagaattcaagttttagaggtttatatcaatttattcgttttatcgatgaattgattgaaagaggcaaagattttggtgaggaaaatgtagttggtccaaacgataatgtcgttagaatgatgacaattcatagtagtaaaggtctagagtttccgtttgttatttattctggattgtcaaaagattttaataaacgtgatttgaaacaaccagttattttaaatcagcaatttggtctcggaatggattattttgatgtggataaagaaatggcatttccatctttagcttcggttgcatatagagctgttgccgaaaaagaacttgtgtcagaagaaatgcgattagtctatgtagcattaacaagagcgaaagaacaactttatttaattggtagagtgaaaaatgataaatcattactagaactagagcaattgtctatttctggtgagcacattgctgtcaatgaacgattaacttcaccaaatccgttccatcttatttatagtattttatctaaacatcaatctgcgtcaattccagatgatttaaaatttgaaaaagatatagcacaagttgaagatagtagtcgtccgaatgtaaatatttcaattatatactttgaagatgtgtctacagaaaccattttagataatgatgaatatcgttcggttaatcaattagaaactatgcaaaatggtaatgaagatgttaaagcacaaattaaacaccaacttgattatcaatatccatatgtaaatgatactaaaaagccctcaaaacaatctgtttctgaattgaaaagacaatatgaaactgaagaaagtggcacaagttacgaacgagtaaggcaatatcgtatcggtttttcaacttatgaacgacctaaatttctaagtgaacaaggtaaacgaaaagcgaatgaaattggtacgttaatgcatacagtgatgcaacatttaccattcaaaaaagaacgcatatctgaagttgagttacatcagtatatcgatggattaatcgataaacatattatcgaagcagatacgaaaaaagatattcgtatggatgaaataatgacatttatcaatagtgagttatattcgattattgctgaagcagagcaagtttatcgtgaattaccgtttgtagttaaccaagcattagttgaccaattgccacaaggagacgaagacgtctcaattattcaaggtatgattgacttaatctttgttaaagatggtgtgcattattttgtagactataaaaccgatgcatttaatcgtcgccgtgggatgacagatgaagaaattggtacacaattaaaaaataaatataagatacagatgaaatattatcaaaatacgcttcaaacgattcttaataaagaagttaaaggttatttatacttcttcaaatttggt

SEQ ID NO: 4304 - DNA, 927 bp, Staphylococcus aureus
atggctaaaacatatattttcggacataagaatccagacactgatgcaatttcatctgcgattattatggcagaatttgaacaacttagaggtaattcaggagccaaagcataccgtttaggtgatgtgagtgcagaaactcaattcgcgttagatacatttaatgtacctgctccggaattattaacggatgatttagatggtcaagatgttatcttagttgatcataacgaattccaacaaagttctgatacgattgcctctgctacaattaagcatgtaattgatcatcacagaattgcaaatttcgaaactgctggtcctttatgttatcgtgctgaaccagttggttgtacagctacaattttatacaaaatgtttagagaacgtggctttgaaattaaacctgaaattgctggtttaatgttatcagcaattatttcagatagcttacttttcaaatcaccaacatgtacacaacaagatgttaaagcagctgaagaattaaaagatattgctaaagttgatattcaaaagtacggcttagatatgttaaaagcaggtgcttcaacaactgataaatcagttgaattcttattaaacatggatgctaaatcatttactatgggtgactatgtgactcgtattgcacaagttaatgctgttgaccttgacgaagtgttaaatcgtaaagaagatttagaaaaagaaatgttagctgtaagtgcacaagaaaaatatgacttatttgtacttgttgttactgatatcattaatagtgattctaaaattttagttgttggtgctgaaaaagataaagttggcgaagcattcaatgttcaattagaagatgacatggccttcttatctggtgttgtttctcgaaaaaaacaaatcgtacctcaaatcactgaagcattaacaaaa

SEQ ID NO: 4305 - DNA, 306 bp, Staphylococcus aureus
atgtttgctattattgaaacaggtggaaaacaaatcaaagtagaagaaggtcaagaaatcttcgttgaaaaattagacgtaaacgaaggagatacttttacatttgataaagtattatttgtaggtggagattcagttaaagttggagcgccaacagttgaaggtgcaacagttactgctactgttaataaacaaggtcgcggtaaaaaaatcactgtattcacatacaaacgtcgtaaaaattcaaaacgtaaaaaaggccatcgtcaaccatacactaaattaacaatcgataaaatcaacgcg

SEQ ID NO: 4306 - DNA, 309 bp, Staphylococcus aureus
atgattactgttgatattacagttaatgatgaaggcaaagtaacagacgttattatggatggccatgctgaccatggtgaatatggtcatgatatcgtttgtgctggagcttcagctgtattgtttggtagtgttaatgcgattataggattgacatctgagagaccagatatcaattatgacgacaatggtggtcattttcatataagaagcgttgatacaaataacgatgaagcgcaactaattcttcaaacaatgcttgtgtctttacaaactattgaagaagaatataatgagaatattagatta

SEQ ID NO: 4307 - DNA, 282 bp, Staphylococcus aureus
atgttaaaattaaacttacaattcttcgcatctaaaaaaggggtaagttctacaaaaaacggacgtgactctgaatcaaaacgcttaggtgctaaacgtgctgacggtcaattcgtaacaggtggttcaattttatatcgccaacgtggtactaaaatttaccctggtgaaaatgtaggtcgtggtggcgatgatacattattcgctaaaatcgacggcgttgttaaattcgaacgtaaaggtcgcgacaaaaaacaagtttctgtatatgcagtagctgaa

SEQ ID NO: 4308 - DNA, 1290 bp, Staphylococcus aureus
atgtttgtcgatcaagtcaaaatatctcttaaagccggtgatggtggtaatggtattaccgcatacagaagagaaaaatatgtaccatttggtggaccagctggcggtgacggtggtaaaggtgcttcagtcgtatttgaagtggatgaaggtttaagaacgttattagattttaggtatcaacgtcattttaaagcaagcaaaggtgaaaatggccaaagtagtaatatgcatggtaaaaatgcggaagatttagtattaaaagttccacctggcacaattattaaaaatgttgaaacagatgaagtgttagcagatcttgttgaagatggtcaaagagctgtagtagcaaagggcggtcgaggtggacgaggtaattcacgttttgcaacgcctagaaaccctgcacctgacttcagtgaaaaaggtgaaccaggtgaggaattagatgtatctttagaattgaaattattggctgatgtaggattagtaggcttccctagtgtgggtaaatcgactttattatctatcgtttcaaaagctaagcctaaaattggggcatatcattttacaacgattaaaccaaatctaggtgttgtttcaacacctgatcaacgaagttttgttatggcagatttaccaggtttaattgaaggtgcatctgatggcgttggattaggacatcaatttttaagacatgtagagagaacaaaagttattgttcacatgattgatatgagtggttctgaaggtagagaacctattgaagattataaagtcattaatcaagaattagccgcgtacgagcaacgtttagaagatagacctcaaatcgtagtagctaacaagatggatttacctgaatcacaagataatttaatcttatttaaagaagaaattggcgaagatgtgccagttattccagtttcaacaataacgcgtgataatattgatcaattattatatgcaatagcagataaattagaagaatataaagatgttgacttcacagttgaagaagaggagtcggttggcattaaccgagtattatataaacatacaccgtcacaagataaatttacaatttcaagagatgatgatggtgcttatgtggtaagtggtaatgctattgaaagaatgtttaaaatgactgactttaacagtgatccagcagtacgtcgatttgctcgtcaaatgcgttcgatgggtattgatgatgcgcttagagaacgtggttgtaaaaatggtgatatcgttagaattcttggcggagaatttgaattcgttgaa

SEQ ID NO: 4309 - DNA, 417 bp, Staphylococcus aureus
ttttatttaattagagaagatgtcttgcctgaatccgtggttaaaacattgaagattaaagatgccttaaaaagtgatccgacattgtccatttatgatgccgttaaacagtttgatctatctagaagtgctttttataaatatagagaaacgatatttccagtagacgataaaatgcttgaccatcgagaatttacattaattttatatgtaactgatattgtgggtatgttggcacgtgtactagatgttatatcaaagttagaactatctgtattaacgattcatcaaagtattccaatggaagaaaaagcaacaataacattatcactgaatgctaaatctaaagaaacttcagtagaagatgttattggcgctttgagaaatttagattatgtatcaaaagtagaattaatt

SEQ ID NO: 4310 - DNA, 1230 bp, Staphylococcus aureus
aaaagagtagttattacaggtatgggagccctttctccaatcggtaatgatgtcaaaacaacatgggagaatgctctaaaaggcgtaaatggtatcgataaaattacacgtatcgatactgaaccttatagcgttcacttagcaggagaacttaaaaactttaatattgaagatcatatcgacaaaaaagaagcgcgtcgtatggatagatttactcaatatgcaattgtagcagctagagaggctgttaaagatgcgcaattagatatcaatgaaaatactgcagatcgaatcggtgtatggattggttctggtatcggtggtatggaaacatttgaaattgcacataaacaattaatggataaaggcccaagacgtgtgagtccatttttcgtaccaatgttaattcctgatatggcaactggacaagtatcaattgacttaggtgcaaaaggaccaaatggtgcaacagttacagcatgcgcaactggtacaaactcaatcggagaagcatttaaaattgtgcaacgcggtgatgcagatgcaatgattactggtggtacggaagctccaattactcatatggcaattgcaggtttcagtgcaagtcgagcgctttctacaaatgatgacattgaaacagcatgtcgtccattccaagaaggtagagacggttttgttatgggtgaaggtgctggtattttagtaatcgaatctttagaatcagcacaagctcgaggtgccaatatctatgctgagatagttggctatggtactacaggtgatgcttatcatattacagcgccagctccagaaggtgaaggcggttctagagcaatgcaagcagctatggatgatgctggtattgaacctaaagatgtacaatacttaaatgcccatggtacaagtactcctgttggtgacttaaatgaagttaaagctattaaaaatacatttggtgaagcagctaaacacttaaaagttagctcaacaaaatcaatgactggtcacttacttggtgcaacaggtggaattgaagcaatcttctcagcgctttcaattaaagactctaaagttgcaccgacaattcatgcggtaacaccagacccagaatgtgatttggatattgttccaaatgaagcgcaagaccttgatattacttatgcaatgagtaatagcttaggattcggtggacataacgcagtattagtattcaagaaatttgaagca

SEQ ID NO: 4311 - DNA, 1176 bp, Staphylococcus aureus
aaatcattatttgaacaggcaaggcctatattagaacaaattcaagacaatggttttgaagcatattatgtaggtggctctgtaagagattatgtcatgggaagaaatattcatgatatagatatcacaacaagtgcaacgccagatgaaatagaatctatctttagtcatacgatacctgtaggtaaagaacatggcaccataaatgtagtttttaatgatgaaaattatgaagtgacaacattccgggctgaagaagattatgtcgatcaccgtagaccaagtggtgttacatttgttcgtgatttatacgaagatttgcaacgaagagatttcacgatgaatgcgatagcaatggatacatcatacaaattgtatgattattttgatggtcaacaagatattaataatcgaataataagaactgtaggtatagctgaggaacgattccaagaagatgctttacgtatgattcgatgtttaagattccagtcacaattatcatttgaaattgcaacggaaacatttgaagcgatgcgtacacaaatggcagatattaaatttttatcaattgagcgtatagtgattgaactaactaaattaatgcgaggtattaatgttgaaaagagttttaatcatttaaaatcgctgaaagcatataattatatgccatatttcgaacatcttgatatgaatcaaattaatgtgactgaaccaattgatttagaattgttgattgctatagtatcagttaaatttgatattaattactcattgaagcctttaaaactaagtaaccgacaagtaaaagatatcaatcaatatattcaaattatgaatgcattaccaagtattattacaaaagaacaattaaaaatgtttgtttatgattatgatacgaatctcattaaaaatgtaatggttgcagtagacgtgttaaaggcaaatgatattcaaggacatgaaccattaatcgttaaccttcaaacgattgatgaaacattacatcacttaactatgcataatagaaaagacatgatggttaatggcggtgtacttatggcacatttaaatgccaaaagtggtccgtggttaaaagatgtgctaagacaaattgagatagcgattgtaacaggtaaagtaagcaacgaagaaactgaaattttgaaatgggtg

SEQ ID NO: 4312 - DNA, 2130 bp, Staphylococcus aureus
aaatctttaatattagctgaaaaaccatcagtcgcaagagatattgctgatgctttacaaataaatcaaaagcgtaatggttactttgaaaataaccaatatattgtcacgtgggcgttaggtcatctagtgacaaatgcgacacctgaacaatacgataaaaatttaaaggaatggcgattagaagaccttccaattatacctaaatatatgaaaacggttgttattggtaaaacaagcaaacaatttaaaacagtaaaagcgttaattttagataataaagtgaaagatattattattgcaacagatgctggacgagaaggtgaactagttgcaagattgattttggataaagttggtaacaaaaagccactccgtcgattatggattagctcagttactaaaaaagctattcaacaaggttttaaaaatttaaaagacggtcgtcaatataacgatttgtattatgcagcgttagcgagaagtgaggtggattggattgttgggattaatgcaacgcgtgcactaacaacaaagtatgatgcacagctatccctgggacgtgttcagacaccaacgattcaattagtaaatacacgacaacaagagattaatcagttcaaaccacaacaatactatacattatcgttaacggtaaaagggtttgattttcagctagaatcaaatcagcgatataccaataaagaaactttagaacagatagttaataatttgaaaaatgtcgatggtaagattaaatctgttgctactaaacataagaagtcgtatccgcaatcactgtacaatttaacagatttacaacaagatatgtatagacgttataaaattggacctaaagaaacattgaatacacttcaaagtttatatgagagacataaagtcgtaacctatccaagaacagattcaaactatttaacaaccgatatggtagatactatgaaagaacgtattcaggcgacgatggcaacaacatataaagaccaagcacgcccattaatctctaaaacattttcatcaaaaatgtcgatatttaataatcaaaaagtatctgatcaccatgcaattattcctacagaagtgagacctgtcatgtcagacttaagtaatagagaattaaagttatacgatatgattgtcgagcgttttttagaaactttaatgcctccgcacgagtatgacgcgataactgtaactttagaggttgcagggcacacatttgttttgaaagagaatgtaacaactgtattaggctttaaatctattagacaaggtgaatctattacagagatgcaacagcctttttcagaaggcgatgaagtgaagatttcaaaaacaaacattagagaacatgaaacaacacctccagaatattttaatgaaggttcgttattaaaagcgatggagaaccctcagaactttattcaattgaaggataaaaaatatgcgcaaactttaaaacaaacaggtggtatcggcacagttgcaacaagggccgacattatcgataaattatttaatatgaatgccattgaatcaagagacggtaaaattaaagtaacgtcaaaaggtaaacaaatattagaattagcaccagaagaattaacgtcgccacttttaactgcacaatgggaagaaaaattacttttaattgaacgtggtaaatatcaggcgaaaaccttcattaatgaaatgaaagattttacgaaagatgttgtaaatgggattaaaaatagtgatcgtaaatataaacacgataatttaacaaccactgaatgcccaacatgtggtaaattcatgattaaagttaaaactaaaaatggtcagatgcttgtgtgccaagatccatcttgtaagacgaaaaagaatgtacagcgcaaaacaaatgcaagatgtccaaactgtaaaaagaaattaacgttgtttggtaaagggaaagaagcggtatatcgttgtgtttgtggacattctgaaacgcaagcacatatggatcagcgtatgaagtctaaatcctctggtaaagtatctcgtaaagaaatgaaaaagtatatgaataaaaatgaaggtttagacaataatccgtttaaagatgcattaaagaacttgaattta

SEQ ID NO: 4313 - DNA, 771 bp, Staphylococcus aureus
atgattgatattcataaccatatattagttgatatagatgatggtcctaaaacaattgaaaagagtattgcactattaaagcaagctaaggatgaaggtgtaacaagtattgtagcgacacctcatcatttgcatccgagatatgataatacatttcaacaagtgcttgtgaaattggcggagttaagaacgcacccagaagttcaagcattggatattaaattatttcccgggcaagaaattagaattacagattcgattctgcaaggcttagataatggtagtattcaaggtattaatcgttcgaaatatttgctaattgaatttccaacgggcgaagtaccacattatacaaaacaattgttttttgaaatacaatcgagaggctacataccaatcattgcacatcctgaaagaaatagaagtatcgccaaaaatccagaaatattatatgaacttgttgcaaatggggcattgagtcaattaacatcgagttctttagttggtggatttggaaaaaacattcaaaagttatcattacaatttatagaatgtaatttggctcattttgtagcttcagatgcacattcatgtgaccaaagaccatttttgatgcaagaattatttcacaatcataaattgaagaaatattcgaatgacattgaagcattacttcgaaatgccagttcagtaatcaatgataattttgtttatttagacagaccgactaagccaggaaaagtgaagtcgtttttgaaatggttttaacta

SEQ ID NO: 4314 - DNA, 174 bp, Staphylococcus aureus
atgattttgcgttacgcaacgaatttaaaacttgcgaaagagctataccaagccagtaaacctaaattgcaagaagataagggtatgattgaactgtttgaacatacttttggcttgcaaaaagaacttgtaaaatacgtaggcattgcagaagcaactactgctgctttatac

SEQ ID NO: 4315 - DNA, 2529 bp, Staphylococcus aureus
atgggatttttatcaaaaattcttgatggcaataataaagaaattaaacagttaggtaaacttgctgataaagtaatcgctttagaagaaaaaacggcaattttaactgatgaagaaattcgtaataaaacgaaacaattccaaacagaattagctgacattgataatgtcaaaaagcaaaatgattatttagataaaattttaccagaagcatatgcacttgttagagaaggctctaaacgtgtattcaatatgacaccatataaagttcaaattatgggtggtattgcaattcataaaggtgatatcgctgagatgagaacaggtgaaggtaaaacattaacagcgacaatgccaacatacttaaatgcattagctggtagaggtgttcacgttattacagtcaatgaatacttatcaagtgttcaaagtgaagaaatggctgagttatataacttcttaggtttgactgtcggattaaacttaaacagtaagacgacagaagaaaaacgtgaagcatacgcacaagacattacttacagtactaataatgagctaggttttgattacttacgtgataacatggtgaattattctgaagatagagtaatgcgtccattacattttgcaatcattgatgaggttgactcaattttaattgacgaggcacgtacgccattaattatttctggtgaagctgaaaagtcaacgtcactttatacacaagcaaatgtttttgcgaaaatgttaaaacaggacgaagattataaatacgatgaaaaaacgaaagccgtacatttaacagaacaaggtgcggataaagcagaacgtatgttcaaagttgaaaacttatatgatgtacaaaatgttgatgttattagtcatatcaacacagctttacgtgcgcacgttacattacaacgtgacgtagactatatggttgttgatggcgaagtattaattgtcgatcaatttacaggacgtacaatgccaggccgtcgtttctcggaaggtttacaccaagctattgaagcgaaagaaggcgttcaaattcaaaatgaatctaaaactatggcgtctattacattccaaaactatttcagaatgtacaataaacttgcgggtatgacaggtacagctaaaactgaagaagaagaatttagaaatatttataacatgacagtaactcaaattccgacaaataaacctgtgcaacgtaacgataagtctgatttaatttacattagccaaaaaggtaaatttgatgcagtagtagaagatgttgttgaaaaacacaaggcagggcaaccagtgctattaggtactgttgcagttgagacttctgaatatatttcaaatttacttaaaaaacgtggtatccgtcatgatgtgttaaatgcgaaaaatcatgaacgtgaagctgaaattgttgcaggcgctggacaaaaaggtgccgttactattgccactaacatggctggtcgtggtacagatatcaaattaggtgagggcgtagaggaattaggcggtttagcagtaataggtacagaacgacatgaatctcgtcgtattgatgaccagttacgtggtcgttctggacgtcaaggtgataaaggggatagtcgcttctatttatcattacaagatgaattaatgattcgttttggttctgaacgtttacagaaaatgatgagccgactaggtttagatgactctacaccaattgaatctaaaatggtatcaagagctgtagaatcagcacaaaaacgtgtagaaggtaataacttcgacgcgcgtaaacgtatcttagaatacgatgaagtattacgtaaacaacgtgaaattatctataatgaaagaaatagtattattgatgaagaagatagctctcaagttgtagatgcaatgctacgttcaacgttacaacgtagtatcaattactatattaatacagcagatgacgagcctgaatatcaaccattcatcgactacattaatgacattttcttacaagaaggtgacattacagaggatgatatcaaaggtaaagatgctgaagatattttcgaagtcgtttgggctaagattgaagcagcatatcaaagtcaaaaagatatcttagaagaacaaatgaatgagtttgagcgtatgattttacttcgttctattgatagccattggactgatcatatcgacacaatggatcaattacgtcaaggtattcacttacgttcttatgcacaacaaaatccattacgtgactatcaaaatgaaggtcatgaattatttgatatcatgatgcaaaatatcgaagaagatacttgtaaattcattttaaaatctgtagtacaagttgaagataatattgaacgtgaaaaaacaacagagtttggtgaagcgaagcacgtttcagctgaagatggtaaagaaaaagtgaaaccgaaaccaatcgttaaaggcgatcaagttggtcgtaacgatgattgtccatgtggtagtggtaaaaaattcaaaaattgccatggaaaa

SEQ ID NO: 4316 - DNA, 906 bp, Staphylococcus aureus
ttgtttcatacattagatgaaaaagctaaaacattaaataatgaaaatggccaaagttttattgaaaatcttggactagcaatggaacaagtatataccaatgaaagaggattgttagaacaatcgacgttacaagatcgacgtaaagcattccaatttgcatatttaagtttaatgcaggaagaaaagatacaagcaaatcatcaaattacaccagattcaattggcttgatactaggatttttagttgagcgttttatgaacaaccaagaagaattacatattgttgatattgcaagtggtgctggtcatttaagtgctactgtaaaagaagtgttacctgaaattgcggttatgcatcatttaattgaagttgatccagttttatcacgtgttagtgtacatttagcaaacttcttagaaattcctttcgatgtgtatcctcaagatgccattatgccactaccgttagaagaagcagatatcgttattggtgattttccagtaggctattatccaattgatgaaagaagtaaggagtttaagctaggtttcgaagaaggacatagttattcacattatttattaatagaacaagcaataaatgcattaaaagatgctggatatgcctttctagtggtaccaagtaatatttttacaggcgagcatgtaaaacagcttgaaaaatatattgcaacagagacagagatgcaagcatttttaaatttaccaccaactttatttaaaaatgaaaaagcgcgaaaatctatattaattttacaaaagaaaaaatcgggtgaaacaaagccagttgaagtattattggcaaatattcctgatttcaaaaatccttcacaatttcaaggatttatgacagagttaaatcagtggatggacacaaatcgt

SEQ ID NO: 4317 - DNA, 573 bp, Staphylococcus aureus
ttgaaaaaagaattattggaatggattatttcaattgcagtcgcttttgtcattttatttatagtaggtaaatttattgttacaccatatacaattaaaggtgaatcaatggatccaactttgaaagatggcgagcgagtagctgtaaacattattggatataaaacaggtggtttggaaaaaggtaatgtagttgtcttccatgcaaacaaaaatgatgactatgttaaacgtgtcatcggtgttcctggcgataaagtagaatataaaaatgatacattatatgtcaatggcaaaaaacaagatgaaccatatttaaactacaatttaaaacataaacaaggtgattacattactgggactttccaagttaaagatttaccgaatgcgaaccctaaatcaaatgtcattccaaaaggtaaatatttagttcttggggataatcgtgaagtaagtaaagatagccgtgcgtttggccttattgatgaagatcaaattgttggtaaagtttcatttagattctggccattcagcgaatttaaatataatttcaatcctgaaaatactaaaaat

SEQ ID NO: 4318 - DNA, 3381 bp, Staphylococcus aureus
ttaggtagagcgggaacaggtaagtctacgaaaatgttgaccgaaataaaacaaaaaatgaaagcagatccgcttggagatccaatcattttaattgcgccaactcaaagtacatttcaattagaacaagcctttgtcaatgatccggaattaaatggtagtttaagaacagaaatgttgcactttgaacgattaagtcatcgtattttccaagaagttggtagttatagcgaacaaaagttatctaaagctgcaacggaaatgatgatttataacattgttcaagaacaacaaaagtatttaaaactttatcaatcacaagcaaaatattatgggtttagtgaaaaattaacagaacaaattcaagattttaaaaaatatgcagtaacgcctgaacatttagaaagctttattgctgataaaaatatgcaaactcgaactaaaaataagttagaggatattgctttaatataccgagagttcgaacaacgcattcaaaacgagtttattacgggtgaggatgcattacaatattttattgattgtatgccgaaatcagagtggctaaaatgtgctgatatatatattgatggatttcacaacttttcaacgattgagtatttaataatcaaaggattaattaaatatgcgaagagtgtcacaattatattgacgacagatggtaaccacgatcaattcagtttatttagaaaaccatcggaagtgttacgacatattgaagaaatagcaaatgaactcaatatttctattgaacgtcaatatttcaagcaatcatatcgctttaataatcaagatttaaagcatcttgaacaagaatttgatgcacttcaaatcaatcgagtggcatgtcaaggtcatatcaatattttagaatctgcgactatgagagaggaaataaatgaaattgcacgacgtatcatcgttgatattcgtgataagcaattacgatatcaagatattgctattttatatcgtgacgagtcttatgcttatttatttgattccatattaccgctttataatattccttataacattgatacaaagcgttcgatgacacatcatccggtcatggaaatgattcgttcattgattgaagttattcaatctaattggcaagttaatccaatgctacgcttattgaagactgatgtgttaacgacatcatatctaaaaagtgcatacttagttgatttacttgaaaattttgtacttgaacgtggtatatacggtaaacgttggttagatgatgagctatttaatgtcgaacattttagcaaaatggggcgtaaagcgcataaactgaccgaagatgaacgtaacacatttgaacaagtcgttaagttaaagaaagatgtcattgataaaattttacattttgaaaagcaaatgtcacaagcagcaactgtaaaagactttgcaactgctttttatgaaagtatggaatattttgaactgccaaatcaattgatgacagagcgagatgaacttgatttaaatggtaatcatgaaaaggcggaagaaattgatcaaatatggaatggcttaattcaaatccttgatgacttagttctagtatttggagatgaaccaatgtcgatggaacgtttcttagaagtatttgatattggtttagaacaactagaatttgttatgattccgcaaacattggaccaagttagtattggtacgatggatttggctaaagttgacaataagcaacatgtttacttagttggaatgaatgatggaacgatgccacaaccagtaactgcgtcaagcttgattacagatgaagaaaagaaatactttgaacagcaggctaatgtcgagttaagtccaacatcagatattttacagatggatgaagcatttgtttgttatgttgctatgactagagctaagaggaatgttacattttcttatagtctaatgggatcaagtggtgatgataaggaaatcagcccatttttaaatcaaattcaatcattgttcaaccaattagaaattactaacattcctcaataccatgaagttaacccattgtcactaatgcaacatgctaagcaaaccaaaattacattatttgaagcattgcgtgcttggttagatgatgaaattgtggctgatagttggttagatgcttatcaagtaattagagatagtgatcttttaaatcaaggtttagattatttaatgtcagcattaacgtttgacaatgaaactgtaaaattaggtgaaacgttgtctaaagaattatatggtaaagaaattaatgccagtgtgtctcgctttgagggataccaacaatgcccgtttaaacattatgcgtcacatggtctgaaactaaatgagcgaacgaagtatgaacttcaaaactttgatttaggtgatattttccattccgttttaaaatatatatctgaacgtattaatggcgattttaaacaattagacctgaaaaaaataagacaattaacgaatgaagcattggaagaaattttacctaaagttcagtttaatttattaaattcttcagcttactatcgttatttatcaagacgcattggcgctattgtagaaacaacactaagcgcattaaaatatcaaggcacgtattcaaagtttatgccaaaacattttgagacaacttttagaaggaaaccaagaaccacccccgaattaaatgcacaaacattaacgacaactcaaggtattccaattaatattagagggcaaattgaccgtatcgatacgtatacaaagaatgatacaagttttgttaatattattgactataaatcctctgaaggtagtgcgacacttgatttaacgaaagtgtattatggtatgcaaatgcagatgatgacatacatggatatcgttttacaaaataaacaacgccttggattaacagatattgtgaaaccaggcggattattatacttccatgtacatgaacctagaattaaatttaaatcttgggcagatattgatgaagataaattagaacaagatttaattaaaaagtttaagctgagtggtttagtgaatgcagaccaaactgttattgatgcattggatattcgtttagaacctaaattcacttcagatattgtgccagttggtttgaataaagatggttctttgagtaaacgaggcagccaagttgcagatgaagcaacgatttataaattcatccaacataacaaagaaaattttatagaaacagcttcaaatattatggatggacatactgaagttgcaccattaaagtacaaacaaaaattgccatgtgctttttgtagttatcaatcggtatgtcatgtagatggcatgattgatagtaagcgatatcga

SEQ ID NO: 4319 - DNA, 684 bp, Staphylococcus aureus
atgagaatagataaatttttagcaaatatgggcgtcggtacacgtaatgaggtcaaacagttacttaaaaaaggccttgtaaatgtcaacgaacaagtaattaaatcaccaaaaacacatatagaaccagaaaacgataagatatcagttcgtggagaattaatagaatacgttgaaaatgtctatattatgttaaataagccaaaaggttatatatcggcaactgaagatcatcattcaaaaaccgttattgatttaatacctgaataccaacatctaaatatttttccggttggtcgtcttgataaagatacagaagggcttttattgataacgaatgatggtgattttaatcatgaattaatgagtccaaacaaacatgtttctaaaaaatatgaagttatttcagcaaatcctatcactgaagacgacattcaagcttttaaagaaggtgtaacactgtctgatggcaaggttaagcctgcaatattaacttatattgataatcaaacgtcgcacgtaacaatttatgaaggaaaatatcatcaagttaaacgaatgtttcatagcattcaaaatgaggtattacatttaagacgtatcaaaattgctgatttagaattggacagcaatttagattcaggagaatatcgtttattaactgaaaatgattttgacaaatta

SEQ ID NO: 4320 - DNA, 1347 bp, Staphylococcus aureus
ttaaaaggattattagcaattgaaagtgtgagagatgatgcaaaagcatcagaagacgcaccagttggtccaggtcctcgtaaggcattagactacatgtatgaaattgcacatagagatggatttacaacacatgatgtggatcatattgcaggaagaattgaagcaggtaaaggaaatgacgtgttaggtatcttatgtcatgttgacgttgttcctgctggtgatggatgggatagtaatccgtttgagccggttgtaacagaagatgctatcatagctagaggtacacttgatgacaaaggtccaacaattgctgcttattatgcaattaagatattagaagatatgaatgtggattggaagaaacgtattcatatgattattggtacggatgaagaatctgattggaaatgtacggatcgctattttaaaacagaagaaatgccaacattaggttttgcaccagatgcagaatttccgtgtattcatggtgaaaaaggcattacaacatttgacttagttcaaaataaacttactgaagatcaagatgaacctgattatgaattaataacttttaaatctggtgaacgttacaacatggtgcctgatcatgcagaagcaagagtgcttgttaaagaaaatatgacagatgttattcaagactttgagtactttttagaacaaaatcatttacaaggtgatagtactgttgatagtggcattctagttttaacagttgaaggtaaagcggttcatggtatggatccatctatcggtgtgaatgcgggtctttacttactaaaattcttagcatcattaaatcttgataataatgcacaagcgtttgtagcatttagtaatcgctatttatttaattcagattttggtgaaaagatgggaatgaaattccatacagatgtcatgggtgatgtgacaactaatattggtgttattacatatgataatgaaaatgcgggtcttttcggtatcaacttacgctacccagaaggatttgaatttgaaaaagctatggatcgttttgcaaatgagattcaacaatatggctttgaaatgaaattaggtaaagtccaaccaccacattatgttgataaaaatgatccttttgtacaaaagttagttactgcatatagaaatcaaacaaatgatatgactgaaccttatactataggtggcggtacttatgcgagaaacttagacaagggtgtagcatttggcgcaatgtttagtgattctgaagatttaatgcatcagaaaaatgaatatatcactaaaaaacagttatttaacgcaactagtatttacttagaagcaatttattcatta

SEQ ID NO: 4321 - DNA, 783 bp, Staphylococcus aureus
gaggtggacgagttggagcagttttatcaattagggtggacacttgattctgcaggtggtgcatctggtgaagcatatatggctgaacaagatggacaaaagttgtttttaaaacgaaattcaaatccatttattgcggcattatcagcagaaggtattgtgcccaaattagtatggacgaaacgcatagaaacaggcgaggttgttacagcacaacattggaaaaatggccgtgaactatcttcaaatgaaatgaagcaaacaagagttgcacatttattaaagaagatacacaattctagacctttattaagtatgttaaagcgtatggaaatggaacccattactcctgagattatgcttaataaaattaatgcctctttatcaagagaagtattaacacatcatattgtgagaaaatcattaacttatttggaagagcatatgccgagtttagattcacgttttttcacagttgtacatggtgatgtgaatcataataattggttattatctgatcgtgatgaactatttttagtagattgggaaggcgcaatgattgcagacccagcaattgacatcggaatgctgctttacaactatgttccacaacaacaatggtctgaatggcttgaaacatatggtgttcaagagagcttgaatttaaataaacgtatgaaatggtatacggtaattcaatctataggtcttgtgcaatggtatgaagagcaaaaaagatataaggatatgaacacttggcttaaattcctaaatgaagttatg

SEQ ID NO: 4322 - DNA, 1026 bp, Staphylococcus aureus
tttatggattatgcgattcaacttgcaaatatggtacaaggtcaaacaggtgttaatccacccgttggcgctgttgtagttaaagaaggtaggattgttggtattggtgcacacttgagaaaaggtgacaagcatgcggaggttcaagcacttgatatggcacaacaaaatgctgaaggtgcgacgatttatattacgttagagccatgtagtcattttggttcaacaccaccctgtgttaacaaaataattgattgtaagatagctaaagtagtttacgcaacaaaagacaattcgttagatacacatggtgatgatacgttacgggatcacggtattgaggttgaatgcgttgatgatgaacgttcatcacaattataccaagacttttttaaagcaaaagcaaagcaactgccacaaattacagtgaaagtatctgcaagtttagatggtaaacaagcgaatgataatggacaaagtcaatggattactaacaaagaggttaaacaagatgtctataagttaagacatcgacacgacgcagtgttaactggaagacgtacagttgaattagatgatccacaatatactacacgtattcaagatggaaaaaaccctataaaagtaatattgtctaagtctgggaatattcattttaatcagcaaatttatcaagatgaatcaacaccaatttggatatatacagaaaatccaaatttaacaaccaatcaaacacatattgaaattatttacttgaagtcttgtgatttaacaacaattcttcacaatttatataaaagaggagttggtactttgctagtcgaggcaggtccaaccactacttcagaatttctccaatctaattatatagatgaatttattctctattatgccccgaaattaattggcggatctggaaattatcaattctatcaaacaaatgatgtgattgagataccagatgcgaaccaatttgaaattgttcattccgagttattaaatcaaaatgttaaattaactttacga

SEQ ID NO: 4323 - DNA, 630 bp, Staphylococcus aureus
atgtttactggcatcgttgaagaaataggtgtcgttaaaagtgttcaaattcgtcaatcagtcaggacgattgaaatcgaagcacataagattacggcagatatgcatattggtgattccatcagtgttaatggtgcatgtttaacagtgattgattttgatcagacatcttttactgttcaagtaattaaaggcactgaaaataaaacctatttagcagatgttaagcgacaatcagaagtaaatttagagcgtgccatgagtggtaacggtaggtttggtggacattttgtcctcggtcatgtagatgaactaggaacagtttcaaaaataaatgaaacagccaatgccaaaattattacgattcaatgtagccaacatattaataatcagttagttaagcaagggtctattactgtggatggtgtaagtctaacggtatttgataagcatgataacagttttgacattcatcttattccagaaacgaggcgttcaacgattttatcatccaaaaaattaggagataaagtacatttagaaacagacgttttgtttaaatatgttgaaaatattttaaataaagataaagaccaattatctgtagataaattaagagcatttggtttt

SEQ ID NO: 4324 - DNA, 1173 bp, Staphylococcus aureus
ttcgataatattgacagtgctttaatggctttaaaaaatggagaaacaattattgtagtagatgatgagaatcgtgaaaatgaaggtgatttagtagcggtcactgaatggatgaacgataataccattaattttatggcgaaagaagcaaggggattaatatgcgcaccagtgtctaaagatattgcacaacgtttggatttggaacaaatggttgatgataactccgacatctttggtacgcaatttacagtgagtattgatcatgtagatacaacaacaggaattagcgcttatgaacgtacattgactgccaaaaagctcatagatcctagtagtgaagctaaagattttaatcgtcctggtcatttatttccattagtggcacaagataaaggggtgttagctagaaatggacacacagaagcggctgttgatttagctaaacttactggtgccaagcccgctggtgtcatttgtgagattatgaatgatgacggcacgatggcgaaaggacaagatttacaaaagtttaaagaaaaacatcaattaaagatgattacgattgatgatttaattgaatatcgtaaaaaattagaaccagaaattgaatttaaggcaaaagtgaaaatgcctacagatttcggaacatttgatatgtatggttttaaagcgacttacacagatgaagagatagttgtactgacaaaaggtgcaattcgacaacatgaaaatgtacgcttacattctgcgtgccttacaggcgatattttccatagtcagcgttgtgattgtggtgctcaacttgaatcgtctatgaagtatatcaatgaacatggcggcatgattatttatctacctcaagaaggtcgtggcataggattgttaaacaaattacgcgcatatgaattaattgagcaaggatatgatacagtaactgcaaatttagcattaggttttgatgaagatttgcgagattatcatattgctgcacagattttaaaatattttaacatcgaacatatcaatttattaagtaataatccaagtaaatttgagggattaaaacaatatggcattgatattgcagaaagaattgaagttatcgtaccagaaacggtacataatcatgattatatggaaacgaaaaaaataaaaatgggtcatttaata

SEQ ID NO: 4325 - DNA, 897 bp, Staphylococcus aureus
ttatgggtattcggtattttagtaatcttagcgattgtagctgttgtgtatgtagctgctaaaatttttattactggtaataagatacacaatccgttagatcgcaatcattcagaattaagagataaaaaagtgagtttaaacgatggtgatccattcacaatcgctttatttggtgtcgattcagatgctgatcgtaagaaaaagggtggcggagagcgtagtgatagtattatgattttatctatcaaccctaaaacgaagaaaactgaaatagtaagtataccgcgtgatacaagagcggaaattgttggccgtggtactactgaaaaaattgcacatgcctatgcatatggtggaccaaatatggctgttaaatcacttgaaaaattaatgaatgtgccaattgatcattatgcgacaatcgatatggatggtttgcataatatgatagatagcatcggcggtgttgatgtagtaagtaatgatacattcactgttgatggtgttcgttttacaaaaggacagcaaacacatgtaaatggtgatcaagcattgaagtttattagaagtcgtaaagaagaaggtgctggtggtgactttggtcgacaacaacgtcagcaaattgtacttgaagcgatggctaataagattgcaagcccatcatcgattacacattttaatagtctaatgaatgaaattcaaaataatgttaaaacagatttaacattaggtgatttgaatacgattagaagcaattataaagatgctaatgacacaattaataaacatcaattgagtggtcaaggcggcattcaaagtgacggattgtactacttcattcctagtgagcagtcaaaagctgaaagtactaagttattaaaagataatctagag

SEQ ID NO: 4326 - DNA, 2934 bp, Staphylococcus aureus
gtcacgcttgatggtaaagattatcttgtagaaccagatacaaatttacttgaattcattaaatcgcaagatacttttgtaccttcaatttgttataacgaatcaatgggaccaatacaaacgtgtgatacatgtactgttgagattgatggtaaaattgaacgttcatgtagtacagtgattgatcgtccaatgacagtaaatacagtgaataatgacgtgaaagatgctcaaaaagaagcgcttgatcgaattttagaaaagcatatgctgtattgtacagtatgtgattataataatggtgattgtgaaattcataatacgatggatgcatggggacttcagcatcaaacgtatgaatataaagagaagccatacgaaaaagattacggcccattttatcgttatgatccaaatcaatgtatcttatgtgggcgttgtgtagaagcatgtcaagatattgaagtaaatgaaacaattagaattgattgggatcgtgagcatccacgtgtcatttgggataatgatgtaccgattaatgaatcgtcatgtgtatcttgtggtcaatgcgcaactgtatgcccgtgtaatgcgatgatggaagttaacatggaaggtaatgcgggttatatgactgatacggaacctggttcattagcggcaatgattgatttaactaaaaaagcagaacctggttatggtccactatttgcaatctcagattcagaagcagaaatgcgtaaagagcgtattaagaaaactaaaacagtgtgtacatattgtggtgtgggctgttcatttgaagtttggactaaagatagagaaattttaaaagtacaaccatcacatgattctccagcaaataaaattgcgacttgtgttaaaggtaaattttcatggggacatattaattcagatcaacgcttaacgaaaccattagtaaggaaaaatggtgagttccatgaagtagaatgggatgaagcattaaatgtcattgcagataattttacatctattaaagaaaagtatggcccagatgcactatcattcatttcttcttctaaagcgacgaatgaagaatcgtatttaatgcaaaaattagcaagacaagttattggcactaataacgttgataactgttcaagatattgccaagcacctgcaacaaaaggcttatttagaacggttggacacggtggtgactcaggtagtattgaagatttagaaaaagcagcaatgtctgtattgattggtacgaatacagccgaagcgcatccggttattgcatcacgcatgaagcgtgctcaaaaattatttggacaaaaaatacatgtgtttgatattagaaaacatgaaatggctgaacgcgcagatcgtttttatcaaccgaaaccaggtacagatttggcttggttaagcgcagtgacgaaatatatcattgatcatgacttacacgataaagcctttatcgaagagtgggttgaagattttgatgaatattacaagtcattagaaacatttacaatggcattcgctgaagaggctactggtattccagaagcagagttgattaagttcgctgaagaatgtgccaaagcagagtccgttgtcatttgttgggcaatgggtatcacacaacaagacattggaagtgattcaagtacagcaatttcgaacttattattagttactggaaattatcgtagacctggtacaggtgcgtatccattacgtggacataataatgttcaaggttgtagtgatatgggtagtatgcctgataaaattactggctatcaaagtattgaagcggacgatattcgcgctaaattcgaaaaagaatatggcgttaaattgaatcctaaagttggtaaagataatcatgaaatggttgaaggtgtccatgatggggaaattcattcattatatctatatggagaagatactggtattgtagattcaaatattaattttgtacaagctgcttttgaaaaattagatttcatggtagtccaagatgaatttttaacatttacagctacatttgcagatgttgtcttaccagcaagtccttcattagaaaaagatggtacttttacgaatactgagcgacgtattcaacgcttataccaagcattgaaacctttaggtgattctaaacctgactggaaaatattccaagcaattgctaataaattaggtttcgattggaattacaaacatccaagcgaaattatggatgaaattgctagactaacaccattatatgctggcgtaagctacgaacgtttagaaggatttaatagtttacaatggcctctgcatccagatggtacagatgaaccaatactttatttagaaggatttaatttcgataatggtaaagcaaagttattcccattatcatttgataattactttaagcaagatgaagtttatgatattcatgtaaataatggtcgattgttagagcacttccatgaaggtaatatgacttatcaaacaccaatgattaaatacaaagtgccacgtgcatttgttgaaatttctccagaacttgctgaagatagaggcattcatgaaggtgcagaagttaagttgatatctgaaacaggagaagcggtattacaagttcatgtgacagatcgtgttaaaggtaaagaaatctatattccattaaataatgatgcgatggaaaatggagatctaggtgcaattaacttattaactaatagtgatgttgatcaatacacggatacaccatcttataaacgtacaagctgtcgtttggaggtaattacgaaacgtggtaagtcaccgttgaaccctaataatttccgtgtcaataaaaaacgtcatccgcagtacagtgttcaagtacagaaaaaatgggaacgtccagattatgttttcccaggaaatcaggtggataaa

SEQ ID NO: 4327 - DNA, 645 bp, Staphylococcus aureus
gttgaagatatcgtcaaaaatttcggagaaggtttgtctgaaacaaaagttttaaaaggtattaattttgaaatggaacaaggggaatttgtcattttaaatggtgcctctggttctgggaaaacaacattgctaacgatattaggcggattgttaagtcaaacgagtggtacagtgctttacaatgatgcaccattgtttgataaacagcatcgtcctagtgatttacgattggaagatattggttttatttttcaatcttcacatttagttccttatttaaaagtgatagagcaattgacactcgtaggccaagaagcgggaatgaccaaacaacaaagttcaaaaagagcaatacaacttttgaaaaatattggtttagaagatcgcttgaatgtatatccgcatcagttatctggcggtgaaaagcaacgtgttgcgattatgagagcatttatgaataatccgaaaatcattttagcagatgaacccacagcaagtttagatgccgatagagcaacaaaagttgttgagatgatacgtcaacaaattaaagaacaacaaatgattggtattatgattacacacgatcgaagattatttgaatatgcagatcgagtgattgaattagaagatggcaaaata

SEQ ID NO: 4328 - DNA, 1278 bp, Staphylococcus aureus
agtgaaagtgaacgtttacaacaactttcaaatgaatatattctaggcggtgtcaattccccttctcgttcttataaagctgtaggaggcggtgcacctgttgttatgaaagaaggacacggtgcatatttatatgatgtcgatggcaataaatttattgattatcttcaagcatacggtccaattattacggggcatgcacatcctcatattactaaagcaattcaagaacaagctgctaaaggtgttttatttggtacgccgactgaactagaaattgaattcagcaaaaaattacgtgatgcaattccatctcttgagaaaattcgctttgtaaattctggaacagaagcagtcatgacaacaattcgtgttgcacgtgcatatactaaaagaaataaaattataaaatttgctggatcttatcatggccattctgatttagtattggttgcagcaggtagcggcccatctcagctcggttctccagattcagctggtgttccagaaagcgtagcacgtgaagtcattactgttcctttcaatgatattaacgcatataaagaagcaattgaattttggggtgatgaaattgccgcagtattagtagaaccaattgttggtaactttggaatggtaatgcctcaacctggatttttagaagaggttaatgaaatttcacataacaacgggacactagtgatttatgatgaagtaattactgcattccgtttccattacggtgccgctcaagacttattaggtgttatccctgatttaactgcatttggtaaaattgttggcggtggtttaccaattggaggctatggtggacgtcaagatattatggaacaagtagcacctctaggacctgcatatcaagctggtacaatggctggtaacccattatctatgaaagcaggtattgcattacttgaagtactagaacaagacggtgtttatgaaaaattagacagcttaggccaacaactagaagaaggtttacttaaattaatcgaaaaacataatatcacagctacaattaatcgtatttacggatctttaacattgtactttacagatgaaaaagtcacacattatgatcaagttgaacattctgatggcgaagcgttcggtaaatttttcaaattaatgttaaatcaaggtatcaatttagcaccttctaagtttgaagcttggttcttaacaactgaacatacagaagaagatattaaacaaactttaaaagctgcagactatgcttttagtaaaatgaaa

SEQ ID NO: 4329 - DNA, 537 bp, Staphylococcus aureus
atgaagcgaatcgcagtttattgtggtgcaagcaaaggtcatgacccttcatatgtacaaaaagcatatgatttaggtaaatattttgctgaacaaggttatgaattagtatttggtgcagggtcaattggtattatgggtgccattcaagatggtgtattagatcatggtggcaaagctattggcgtcatgcctaaaatgttagatgaacatgaaatcacaagccaacgtttaactgaattaattttagttgattctatgcatgaacgtaaaaataaaatggcagaacttgcagatgcatttgtcatggctcctggtggcgcaggttcactagaagaatttttcgaaatgtatagttgggctcaaataggtatccatgaaaagcctattgccatttataatattaatggctttttcaatccactacaaacaatgattgaccatatgattgaggaaggttttattgatcctaagtatcgtgcacttgcgccgttatgcgacactaaggaatcattaatagaatcaatattgaatttc

SEQ ID NO: 4330 - DNA, 894 bp, Staphylococcus aureus
aatgtattgaatcatattcaagaagcgtttttaaatacattgaaagttgaacggaatttttcggaacacacattgaaatcatatcaagatgacttaattcagtttaatcaatttttagaacaagaacatttacagttgaatacttttgaatacagagatgctagaaattatttgagctatttatatttaaatcatttgaaaagaacatctgtttctcgtaaaatctcaacgttaagaactttctatgaatattggatgacgcttgatgagaacattattaatccatttgttcaattagtacatccgaaaaaagaaaaatatcttccgcaattcttttatgaagaagaaatggaagcgttatttaaaactgtagaagaggacacttcaaaaagtttacgggatcgagttattcttgaattgttatatgctacaggcatccgtgtttcggaattagttaatattaaaaaacaagatatagatttttacgcgaatggtgttaccgtattaggaaaagggagcaaagagcgttttgtaccgtttggtgcttattgtagacaaagcatcgaaaattatttagaacatttcaaaccaattcagtcatgcaatcatgattttcttattgtaaatatgaagggtgaagcaatcactgaacgcggtgtacgatatgttttaaatgatattgttaaacgaacagcaggcgtaagtgagattcatccccacaagctcagacatacatttgcaacgcatttattgaatcaaggtgcagacctaagaacagtacaatcgttattaggtcatgttaatttgtcaacaactggtaaatatacacacgtatctaaccaacaattaagaaaagtgtatctaaatgcacatcctcgagcgaaaaaggagaat

SEQ ID NO: 4331 - DNA, 534 bp, Staphylococcus aureus
acaacattacatgcaacaacaatttatgctgtaagacataatgggaaagcagctatggctggagatgggcaagtaacgcttggtcaacaagtcatcatgaaacaaacggcaagaaaagttcgtcgtttatatgaaggtaaagtgttagctggtttcgcaggtagtgtagcagatgcgtttacgttatttgaaaaattcgaaacaaaattacaacagtttagtggtaacttagaaagagctgctgttgaattggcacaagaatggcgaggcgataaacaattacgtcaattagaagctatgctaattgtaatggataaagatgctattttagttgtcagtggaactggcgaagttattgccccagatgatgaccttatcgctattggatcaggaggcaactacgcattaagcgcaggacgtgcattgaagcgccatgcatcgcatttgtctgctgaagaaatggcatatgagagcttgaaagtagcggctgatatttgtgtctttaccaacgataatattgttgtcgaaacacta

SEQ ID NO: 4332 - DNA, 1551 bp, Staphylococcus aureus
ttattaagcctcctactcattttgctggggatcattctaggagttgttggagggtatgttgttgcccgaaatttgttgcttcaaaagcaatcacaagctagacaaactgccgaagatattgtaaatcaagcacataaagaagctgacaatatcaaaaaagagaaattacttgaggcaaaagaagaaaaccaaatcctaagagaacaaactgaagcagaactacgagaaagacgtagcgaacttcaaagacaagaaacccgacttcttcaaaaagaagaaaacttagagcgtaaatctgatctattagataaaaaagatgagattttagagcaaaaagaatcaaaaattgaagaaaaacaacaacaagtagatgcaaaagagagtagtgttcaaacgttaataatgaagcatgaacaagaattagaacgcatctccggtctcactcaagaagaagctattaatgagcaacttcaaagagtagaggaagaactgtcacaagatattgcagtacttgttaaagaaaaagaaaaagaagctaaagaaaaagttgataaaacagcaaaagaattattagctacagcagtacaaagattagcagcagatcacacaagtgaatcaacggtatcagtagttaacttacctaatgatgagatgaaaggtcgaatcattggacgagaaggacgaaacatccgcacacttgaaactttaactggcattgatttaattattgatgacacaccagaagcagttatattatctggttttgatccaataagaagagaaattgctagaacagcacttgttaacttagtatctgatggacgtattcatccaggtagaattgaagatatggtcgaaaaagctagaaaagaagtagacgatattattagagaagcaggtgaacaagctacatttgaagtgaacgcacataatatgcatcctgacttagtaaaaattgtagggcgtttaaactatcgtacaagttacggtcaaaatgtacttaaacattcaattgaagttgcgcatcttgctagtatgttagctgctgagctaggcgaagatgagacattagcgaaacgagctggacttttacatgatgttggtaaagcaattgatcatgaagtagaaggtagtcatgttgaaatcggtgtagaattagcgaaaaaatatggtgaaaatgaaacagttattaatgcaatccattctcaccatggtgatgttgaacctacatctattatatctatccttgttgctgctgcagatgcattgtctgcggctcgtccaggtgcaagaaaagaaacattagagaattatattcgtcgattagaacgtttagaaacgttatcagaaagttatgatggtgtagaaaaagcatttgcgattcaggcaggtagagaaatccgagtgattgtatctcctgaagaaattgatgatttaaaatcttatcgattggctagagatattaaaaatcagattgaagatgaattacaatatcctggtcatatcaaggtgacagttgttcgagagactagagcagtagaatatgcgaaa

SEQ ID NO: 4333 - DNA, 543 bp, Staphylococcus aureus
gtaatcattgtacattctatgcatggaaatagtagaaatcattggtatcagtggttggagcataacttaactttagaaggatatgacgtaacattatttaattttgaatcccctgaagcgaatacagtggaacagtggattgaagctatgacgaaacaaattaatgtacgcaaaaaggatacatattttgtaacacatggtttaggttcaatcacagctttaaaatatattgaaatgattgatcagccgattgaaggcttttttagtatagcgggctttaaagaagatgcagaaaatatagatttagatattgatttaagtaatgtaaccattgattacgataatattaaaaagaaagttgacaatttttacggattgagttctaaaaatgacaaatacgtttcatataaagaaactcagcgtttaatgaatgcattagaggggaacttgcgaatcgtggaagatggagggcatttcttagaagaggatggcttcgaaacatttacagcgttgcaagatcggatgcaagattacatgacacga

SEQ ID NO: 4334 - DNA, 1422 bp, Staphylococcus aureus
aaaaaagccacaaaatttgcagttgctaaccttattatcgtgtcaacagtttttagttctgtcacacctgcaattgcgcaatccgataaaagttctaaagatgaaagtttcgcggttggtaatactaaaaatccaaaaaatgttatctttttagttggcgatggcatgggtccatcatttaacacagcttatcgttattataaaaatgatccgcatgctaaagaaatgacccctactgcttttgattcatatttaaaaggcacaaatcgtacatattcaaatgacccaaaacagaatattactgattctgcagctggcggaacagcctttagttccggtcataagacatataatggtgccatcggtgttgacagtaacaagcagaaagtgaagacggtgcttgaacgtgcaaaagaaaaaggtaagtcgactggtcttgtttcaacagctgaattaacagatgcaacaccagcagcatatgctgcacacgtgacttctagagatgataaaaatgaaatcgctaaacaattttataaagataaaatcaacggaaagcataaagttgatgttttattaggcggtggcgctaaatatttcggtaaaagtaatggcaatttagataaaaaattcaaaaaagatggttacgaccttgccacgaacagtaaggagttatcaaaatctgataaagataaagttcttggtttgtttgcagataaaaatatgccacttgcaatagatgcttcaaaagacgaaccatcattagctgatatgcaacaaagtgcacttagtaagcttgagcgtaataaaaaagggttctttttaatggtcgaaggtgcttctatagataaatcagcgcattccaacgatattacaggcgttatgtctgaaatggaaggttttgaaaaagcattcgatgacgccattcaatatgctaagaagcataaagatacacttgtcgttgcaacagcagatcactctactggtggtctaacaattggtaaagataaaggatacgaatggaatcctcaaccgattaaatcgatgaaacactctggatcatatatgacagaaaaaatggctaaaggtgaagaccctgaaaaagttattaatgaaggttatggctttgaattttcacaagatgatatgaaaaaggttaaaaaagagaataaaaagctaaaaagactacttaaaaaagaaaaagacgaaaaatccgcagatgtagaaaaacaaacaaaagccttacaacacgcaattcagaagccagtaaatgataaatcttatacagggtggacttccgatggacatacaggcgaggatgttaatacctacgcttatggacctagatcagaatcatttagtggtaatatcgaaaatacagaaagcgcaaaaataatatttgatatattcaagtaaaacataaaa

SEQ ID NO: 4335 - DNA, 1917 bp, Staphylococcus aureus
gaaagaatcatgagttcacaaaaaaagaaaattagtctttttgcgttcttcttattaaccgtaataacgattaccttgaagacgtatttttcttattatgttgatttttctttaggtgttaaaggtttagtacaaaacttaatattattgatgaatccttatagtttagtagcactggttttaagtgtgttcctattctttaaaggcaaaaaagcattttggttcatgttcataggcggcttcttattgacgttcctattatatgccaatgttgtgtactttagattcttctcggattttttaacgtttagtactttaaaccaagtaggtaacgtagaatctatgggtggtgcggttagtgcatcattcaaatggtatgactttgtttatttcattgatacgttagtttacttattcattttaatatttaaaacaaaatggttagacacaaaagcatttagtaagaaatttgttcctgtcgtaatggcggcttcagtagcattattcttcttaaacttagcttttgctgaaactgatagaccagaattattaacacgtacatttgaccataaatatttagtgaaatatttaggaccgtataactttacagtatacgatggtgttaaaactatcgaaaataatcaacaaaaagcgttggcatctgaagatgacttaacaaaagtattaaattacacgaaacaacgtcaaacagagcctaacccagaatattatggggtggcaaagaagaaaaatattattaagattcatttagaaagtttccaaaccttcttaattaataaaaaggttaatggtaaagaagtaacaccgtttttaaacaaattatcaagtgggaaagagcaattcacatacttccctaactttttccatcaaacaggtcaaggtaaaacatctgactctgaatttacaatggataacagtttatacggtttaccgcaaggttctgccttttcattaaaaggagataatacgtatcagtcattaccagcaattttagatcaaaagcaaggctacaaatctgatgtcatgcacggtgactataaaacattctggaacagagaccaagtatataaacactttggtatcgataaattctatgatgcaacatactatgacatgtcagataaaaacgttgtaaacttaggcttgaaagacaaaattttctttaaagattctgctaattatcaagctaagatgaaatcaccattctattctcatttaattacattgactaaccactatccattcacattagatgaaaaggatgcaactattgagaagtcaaacacaggtgatgcaacagttgatggttatattcaaacagcgcgttatttagacgaagcattagaagaatatattaatgacttgaagaaaaaaggattatatgacaattcagtgattatgatttatggtgaccactatggtatctctgaaaaccataacaatgccatggaaaaactattaggtgaaaaaatcacaccggctaaatttacagatttaaacagaactggtttctggattaaaatccctggtaaatctggtggtatcaataatgaatatgctggtcaagtcgatgtaatgccaacaattttacatttggctggtatagatacgaagaactatttaatgttcggtactgatttattctctaaaggtcataatcaagtagttccattcagaaatggtgactttataacaaaagattataaatatgttaatggtaagatttattctaataaaaataatgaactcataactactcaaccagctgatttcgaaaagaataaaaagcaagttgaaaaggatctcgaaatgagtgacaacgtgcttaatggtgatttgtttagattctacaaaaatccagacttcaaaaaggtaaatccttcgaagtataaatat

SEQ ID NO: 4336 - DNA, 1872 bp, Staphylococcus aureus
atggaagcatataaaattgaacatttaaataaatcttatgccgataagactatattcgataacctagatttatcaatttcagaaggtgaaaaaataggtttggtaggcataaatggtacagggaaaagtacgttgttaaaagtaattggtggtattgatgatgattttacagccaatgttatgcatccaaatcaatatcgaattcgatattcgtctcagaaacaggaccttaatgaagatatgacagtttttgatgcagtattaagttctgatacaacaactttacgtatcatcaagcaatatgagcaggcagtacaagcttatgcggatgaccaaagtgataaattgttcaagcgaatgatggatgcgcaagatgctatggatcaacatgatgcttgggactataacgctgaaattaaaacaatcctctcaaaactaggtatacatgatactactaaatacattaaagaattatccggcggacaacaaaaacgtgttgtacttgctaaaacattaatagaacaaccagatttattgttattagatgaacctacgaaccatttagacttcgaatcaatcagctggttgatcaattatgtgaagcaatatcctcatacagttttattcgtaacccatgatcgatattttttaaatgaagtttccactagaattattgaactaaacagaggtaagttagcgtcatatcctggtaactatgaatcttatattgaaatgcgcgctgaaagagaagtaacaattcaaaagcaacaacaaaaacaacgagctttatataaggaagaacttgcttggatgagggctggagctaaggctcgtactacaaagcaacaagctagaattaatcgatttaatgacctagaaaatgaagttaaccagcgatataaagacgataaaggtgaattgaatcttgcttattcaagattaggtaagcaagtgtttgaattagaagacttatcaaaggctattaatgataaagtattatttgaacatctgacggaaattattcaaaaaggtgagcgtattggtgttgttgggccaaatggagctggtaaaacaacactcttaaatattttgagtggagaagaccaacaattcgaaggtaaattgaagactggccagacggttaaagtagcttattttaagcaaacagatgagaccctggatagagatattcgtatgattgattatttaagagaagaaagtgagatcgcaaaagaaaaagatggaacctcggtatctattacacaacttcttgaacgatttttatttccaagtgccactcatggtaaaaaagtttataaattatctggtggagagcaaaagcgtttgtatttattacgtttactcgtacaccagccaaatgttctgttgttagatgaaccgacaaatgatttagatactgagactttaacaatacttgaagattatattcatactttcggtggtacaatgattaccgtaagccatgatcgttacttcttaaataaagttgcacagtcatattggtttattcatgatggtcagatagaaaagattataggaacttttgaagattatgaaagttataaaaaatcattagataaaaataaatctacattgaagcaacaatctaaatcttctacaactgtacgtaagaaaaatgggttatcatataaagaaaaattagaatatgaacaattgatgaaacgcatagaacaagcggaagtaagaatggaagaaattgatgtgctcatgattgaggcaagtgcagattatgggaaaattaaagaattaaacgaagaaaaagaacaacttgaaattcaatatgatttagacatcacaagatggagtgagttagaagaaattaaagaacaa

SEQ ID NO: 4337 - DNA, 975 bp, Staphylococcus aureus
atgaaaaggttaagcataatcgtcatcattggaatctttataattacaggatgtgattggcaaaggacgtctaaagaaccgtctaaaaatgcccaacagcagcaagtgattaaaattggatatttgccgattacacattcagctaatttgatgatgactaaaaaattattatcacaacacaatcatccgaaatataaattagaattagttaaattcaataattggccagatttaatggacgcattaaacagtggtcgtattgatggtgcatctaccttgatagagctcgcgatgaaatcaaggcagaagggctcgaatataaaggctgtggcattgggtcatcatgaaggcaatgtcattatgggacaaaaaggtatgcacttaaatgaatttaataataatggcgatgattaccattttggtataccacatcgttattcaacacattatcttttacttgaggaattacgtaaacaactgaagattgaaccgggtcattttagctatcatgaaatgtcgccagcggagatgccagccgcattaagtgaacacagaattacagggtattctgtagccgaaccattcggtgcactgggtgaaaagttaggcaaaggcaagactttgaaacatggtgatgacgttatacctgatgcgtattgctgtgtgctagtactgagaggcgaattgcttgatcaacacaaggatgtagcgcaagcatttgtacaagattataaaaagtctggctttaaaatgaatgatcgcaagcaaagtgtagacattatgacgcatcattttaaacaaagtcgtgacgttttaacacagtcagcggcatggacatcctatggtgatttaacaattaagccatccggctatcaagaaattacgacattggtaaaacaacatcatttgtttaatccacctgcatatgatgactttgttgaaccgtcattgtataaggaggcatcacgttcatga

SEQ ID NO: 4338 - DNA, 909 bp, Staphylococcus aureus
atgatttatacagtgactttcaacccttcaattgactatgtcatttttacgaatgattttaaaattgatggtttgaacagagcaacagcaacatataaattcgctgggggaaaaggtattaatgtctcacgtgttttaaagacattggatgttgagtcaactgctttgggatttgcaggtggatttcctgggaaattcattgtagatacattaaataacagtgcaattcaatcgaattttattgaagttgatgaagatacacgtattaatgtgaaattaaaaacaggacaagaaacagaaatcaatgcaccgggtcctcatataacgtcaacacaatttgaacaactgttgcaacaaattaaaaatacaacaagcgatgatatagttattgttgctggaagtgtaccaagtagtattccaagtgatgcgtatgcgcaaattgcacaaattacagcacagacaggtgctaaattagtagtcgacgctgaaaaagaattggctgaaagcgttttaccatatcatccactatttattaaacctaataaagatgaattagaagtgatgtttaatacaacagtgaactcagacgcagatgttattaaatatggtcgtttgttagttgataaaggtgcgcaatctgttattgtctcacttggcggtgatggtgctatttatattgataaagaaatcagtattaaagcagttaatccacaagggaaagtggttaatacagttggctctggtgatagtacagttgcaggcatggtggctggaattgcttcaggtttaacgattgaaaaagcattccaacaagcagtcgcatgcggtactgccacggcatttgatgaagacctagcaacacgggacgctatagaaaaaataaaatcacaagttacgattagcgtactt

SEQ ID NO: 4339 - DNA, 1929 bp, Staphylococcus aureus
atgagagtaacagagttattaacaaaagatacaatagcaatggatttaatggcaaatgacaaaaatggtgttattgatgagttagttaatcaattagacaaagcaggtaaattaagtgatgtagcgtcatttaaggaagcgattcacaatcgagaatcacaaagtacaactggtatcggagaaggtattgctattccacatgcgaaagtagccgcagttaagtctccagctatcgcattcggtaaatctaaagaaggtgtcgattaccaaagtttagatatgcaaccagctcatttattctttatgattgcagcgccagaaggtggtgcccaaacacatttagatgctttagctaaactatctggtattttaatggatgaaaatgtacgtgaaaaattattacatgcatcgtctccagaagaagtgttagcaattatcgatcatgctgatgatgaagcgacaaaagaagaagaggcagaagctgaagcacaacaagttgctgctgtagaagcaaatcaagacactaatggatcaaacgagccatatgtattagctgtaactgcttgtccaacaggtattgcacacacatatatggcgcgtgatgcattgaaaaagcaagcggataaaatgggcattaaaattaaagttgaaacgaacggttcaagtggtattaaaaaccatttaacggaacaagatattaaaaatgcaacaggtatcattgttgctgctgatgttcatgttgaaacggatcgcttcgatggtaaaaatgtcgtagaagtaccagtagcagatggtattaaacgcccagaagaattaattaataaagcattagatacaagtcgtaaaccttttgttgcccgtgatggtcaaagaaaaggtaactcaaatgacagtcaagaaaaattaagcccaggtaaagctttctataaacacttaatgaacggtgtttctaacatgctaccacttgtaatatctggtggtattttaatggcaattgtatttttatttggagcaaattcatttaatccaaaaagctcagagtacaatgcgtttgcagagcagctttggaacattggtagtaaaagtgcattcgcgttaatcattccaattttatctggattcattgcacgtagtattgcggataaacctggattcgcttcaggtcttgtaggtggtatgttagcaatttcaggtggttcaggatttattggtggtattattgcaggtttcttagcaggttacttaacacaaggtgttaaagccatgacacgtaagttaccacaagcattagagggattaaagccgacattaatttatccactattaacagtgacagctacaggcttattgatgatttatgtctttaatccaccagcatcttggttaaatcatttgttattagatggattaaacaatttatcaggttctaatattgtattattaggtttagttattggcgctatgatggcgattgatatgggtggtccattcaacaaagcggcatatgtttttgcaacaggtgcgttgattgaaggtaatgcagcaccaattacagctgcaatgattggtggtatgattccaccgttagcaattgcgacagcgatgttaattttcagacgtaaatttacaaaagaacaacgtggttcaattatccctaactatgtgatgggtatgtcgtttattacagaaggtgcgattccatttgcagctgccgatccattacgtgttattccttcaatgatgattggttcaggtataggtggcgcaattgctttaggcttaggttctcgaattactgcgccacacggtggtattattgtaattgttggtactgatggtgcacacttacttcaaactcttattgcacttctagttggtacattagtttcagcattaatttatggacttattaaaccaaagttaactgaa

SEQ ID NO: 4340 - DNA, 1170 bp, Staphylococcus aureus
ttaattatatataacggcaaagtttatactgaagatggcaaaatcgataatggttacattcatgtgaaagatggacagattgttgcaattggagaagtaaatgataaagcagcgattgataatgatacgacaaataaaattcaagtgattgatgcaaaaggtcatcatgtagtgccaggttttatcgatatacatattcatggtggttatggacaggatgcaatggatgggtcacacgatggcttaaaatatctatccgaaaatttgttgtctgaagggacgacatcatacttggccactacaatgacgcaatcgactgataaaatagataaagcacttataaatattgctaaatatgaagtggagcaagatgttcacaatgcagcggaaattgtaggtatacatttggaagggccatttatatctgaaaataaagttggtgctcaacatccgcaatacgttgtacgcccatttatcgataaaattaaacattttcaagagactgctaacggactaataaagattatgacgtttgcacctgaagttgaaggtgcaaaagaagcgcttgaaacgtataaagatgacattattttttcaattggtcatacagtggcaacatacgaagaagcagttgaagctgttgagcgaggagctaaacatgtcacgcacttatataatgcagcgacgccattccaacatagagaaccaggtgtttttggagcagcatggttgaatgatgctttacataccgaaatgattgttgatggcacacattctcatccggcatcggttgcaattgcttaccgtatgaaaggtaatgaacgtttttatttaattaccgatgcaatgcgtgcaaaaggtatgcctgaaggagaatatgatttgggtggtcaaaaagtaactgttcaatcgcaacaagcacgtcttgcaaatggtgcgcttgctggtagtattttaaaaatgaatcatgggttacgtaacttaatatcatttacaggtgatacattagatcatttatggcgtgtaacaagtttaaatcaagccattgcattaggtatcgatgatagaaaaggtagtattaaagtaaataaggatgcagatcttgttattctagatgatgacatgaatgtaaaatctacaataaaacaaggtaaggttcacacatttagc

SEQ ID NO: 4341 - DNA, 2268 bp, Staphylococcus aureus
atgattaaaccgaagtataagtggaaattaattaaaccaactgaatacataagtgatgaattaacatcaaaattaaagttaacgccaatcgtaaaaaaaatattagaaagtaaatcgattattgatgaacaagcaattgaatccatcatttcagatacagatatcaatcatgatgcattgcaattgagcgatatgacaaagactattgaaagaattaaaagagcgatagcgaatgatgagaaaatcctagtttatggtgattacgatgccgacggtgttacctcaactacaattttagtgacaacattacaacttttaggtgcacaagtaggatggcatattcctaaccgctttaccgaaggatatggaccaaacgaactagcatttagaaatgctcatgatgaaggcataacattaatcataactgttgataatggcatacaaggtcataatgaaattaaaatggttcaagatttaggagttgatgtcattgtaactgatcatcatgaaattggtagtacattaccagaagcatatgcaatcgtacatccaatgcatccatcgtttaattatccgttccaacaattgtgtggtgcaggtgttgcgtacaaattagcacaagcattgattgaaaatgtacctgattattttaaagcattagttgcgataggtaccattgcggatttagtatccttaactgatgaaaatcgatcattagtgaaacaaggattaaaagtcttaaatgatcaatgtccgacctctgttaaagcattgctaaaagaagcgggatacaatgacaatattgacgaagaaacaattggttttattattggacctagacttaatgctgtaggtcgtttagatgacgcatcattagcttgcgaattgttgatgactgacgacgaagaagaagctgcatttttagcagaacaagttgaacattttaaccgtgaaagaaaagatattgtagcagctatcacagaagaagcaatggcaatggcagaaatgaaagttaaaaatggagatttatttttacttttagcaaaagaaaattggcatgaaggtgtcttaggtattgttgcttcgaaaattgtcgaaacgtttgctttgccaacattaattttaaatattgatagggagcaaaatcatgcaaaaggttccgccagatcaattgatcaagtgtcgatgtttgaaatactatcagcacaccaagagttaatcgctaaatttggcggccatcatatggctgcaggtatgacgatggatattgaaaatatagaatcgttagctgaaggtttaaataaatggatgaaagaattatctgaaacaacttcgttagatcccgtaaagccagtagatgtattattaacagaaaatgatataacgattaaaaatattcgtgatatgaatcgtttaagacccttcggaacagatttttctagacctatttttgaaatggatgatttatcagtttcttcagttaaggcgataggtcaacaaaaaaatcatctaaaattgacacttggtgaaagtaatatcgccgcactattttggcaaaatggacacttagaacctgagttacaagatgaacaaccaattaatatattaggttctgttcaaatcaacgaatggaatggtaatcaatcaccgcaattaattattcaagatattgcgatgaacgaacagcaaatattagattatagaagtaagcgaaaaagtttaccttttacagaaaatgatgaaaatattgtcgtgcttattcatcctaaaagtgataaagtaaatgcgaatgaatattattatggtgaagaaattaaacaacaaactgataaagtagtattaagagatttacctacgtcaatggaagatttgtctaattccctgcaacaactgcaattttctcaactttatatagttttgcaacataatcattcgatttacttcgatggtatacctaatatggatgtttttaaaaagtgttataaagcattaataactaaacaagaaacaaatatccagaaagagggtatgttattgtgtcaacatttaagtgtaaaaccagatacacttaaattcatgttgaaagttttcttagacttaaaatttgtaacacaagaagatggtttaattcgaatcaatcaacaacctgataaaagatcgattgattccagcaaagtatatcaattaagacaacaacgtatggatgttgaaaagcaattattatatcaagatttttcagaaatgaaaaattggataaagtcacaattg

SEQ ID NO: 4342 - DNA, 873 bp, Staphylococcus aureus
atgaaaaaaatagaggcatggttatctaaaaagggtcttaaaaataaacgtactctaatagtagtgattgcctttgtcttatttatcatctttttgtttttattgctgaatagcaatagtgaagatagtgggaacattacgataactgaaaatgctgaattacgtacaggtccaaacgctgcgtatccagtcatttacaaagttgagaaaggtgaccattttaaaaagattggtaaagtaggtaaatggattgaagttgaagatacatccagtaatgaaaaaggttggatagctggatggcacacaaatttagatattgtcgcggataatacaaaggagaaaaatcctttgcaaggtaaaacaatagtgcttgatcctggtcatggaggtagtgaccagggtgcttcaagcaatactaaatataaaagcttagaaaaagattatacgttgaaaacagcaaaagaattgcagcgcactttagaaaaagaaggcgcaactgttaagatgacaagaacagacgatacatatgtttcactagaaaatcgtgatatcaaaggcgatgcctatttgagtatacataatgatgcattagaatcatctaatgcaaatggaatgacagtttattggtatcatgataatcaaagagctttagcagatacgttagacgctatgattcagaagaaaggtctactttctaatcgcggttcaagacaagaaaattatcaagtgttaagacaaacaaaagttcctgctgttttattagaattaggttatattagtaacccaactgatgaaacgatgattaaagatcaattacatagacaaattttagaacaagcaattgttgatggccttaaaatttatttttctgcg

SEQ ID NO: 4343 - DNA, 780 bp, Staphylococcus aureus
atgaacgtttcggtaaacattaaaaatgtaacaaaagaatatcgtatttatcgtacaaataaagaacgtatgaaagatgcgctcattcccaaacataaaaacaaaacatttttcgctttagatgacattagtttaaaagcatatgaaggtgacgtcatagggcttgttggcatcaatggttccggcaaatcaacgttgagcaatatcattggcggttctttgtcgcctactgttggaaaagtggatcgtaatggtgaagtcagcgttatcgcaattagtgctggcttgagtggacaacttacagggattgaaaatatcgaatttaaaatgttatgtatgggctttaagcgtaaagaaattaaagcgatgacacctaagattattgaatttagtgaacttggtgagtttatttatcaaccagttaaaaagtattcaagtggtatgcgtgcaaaacttggtttttcaattaatatcacagttaatccagatatcttagtcattgacgaagctttatctgtaggtgaccaaacttttgcccaaaaatgtttagataaaatttacgagtttaaagagcaaaacaaaaccatctttttcgttagtcataacttaggccaagtgagacaattttgtactaagattgcttggattgaaggcggaaagttaaaagattacggtgaacttgatgatgtattacctaaatatgaagctttcctaaacgattttaaaaagaaatccaaagccgaacaaaaagaatttagaaacaaactcgatgagtcccgc

SEQ ID NO: 4344 - DNA, 396 bp, Staphylococcus aureus
atgaaacgtgtaataacatatggcacatatgacttacttcactatggtcatatcgaattgcttcgtcgtgcaagagagatgggcgattatttaatagtagcattatcaacagatgaatttaatcaaattaaacataaaaaatcttattatgattatgaacaacgaaaaatgatgcttgaatcaatacgctatgtcgatttagtcattccagaaaagggctggggacaaaaagaagacgatgtcgaaaaatttgatgtagatgtttttgttatgggacatgactgggaaggtgaattcgacttcttaaaggataaatgtgaagtcatttatttaaaacgtacagaaggcatttcgacgactaaaatcaaacaagaattatatggtaaagatgctaaa

SEQ ID NO: 4345 - DNA, 603 bp, Staphylococcus aureus
atgtattcagtgattagtaagattttgaatttcattttagttaaaatgtcaaaatcattatacgtaatcggtaaagataatattcctaaggatagtaaatatgtcgtaacttgtacgcatgaaagttataacgaagtcattatgctaggtatggcattatatcctaatcaaattcattatatggctaaaaaagaattattcaaaaataaatggattggtaaatttttaacgtctttaaatgcatttcctgtagatcgtgaaaatccaggacctagtactttaaaacgcccaatcaatttgttgaaagataataagacagttggtatcttcccaacaggttctcgcacatcgcaagaaggtgcacctttgaaacgtggtgcttcaacaattgcaatgttaagtaagtcaccaatattacctgttgcttatgttggtcctactaagattcatggtcttttaacaggacaagcatacataaatattggtaaaccaatcgatattaacgatttacctaaagatttaaaacgaaacgagcgtatcgattacattacaaaagagattgaaacacgaacagcaaagttacaacaagaattgcatgaaatt

SEQ ID NO: 4346 - DNA, 1446 bp, Staphylococcus aureus
tttttccaaaatttagggcgttcgttaatgttaccagttgccattttaccggctgcagcaattattgccggaattggtaatacgttaaatgcacttcatgcggcgccgaaaatcgcaatgttctttactacggtaggtactacgattttagagcaattaggtattttatttgcaattggtgtagctataggaatggcaaagaaaaatgatggtgcagtcgcgcttgcagctgcgttaggatattttttagttacagttgtattatcaccaatgaaattagcgcctttattaggaatgaaagcttctgaaataaattcagcttttgaaaaaatgaataatggtaatgtctttgttggtattgtaataggtttaatagcagcctatgcatacaataagtttagtgaaacagaattaccattagcattatcattttttagtggtaaacgtctagttccaattatgactgcattttactgtacatttttagttgtcatattgttattcttatggccactactttattcatggattgtaaaatttggtgaatctatagttggtttaggatcatttggtgctttcgtatatggtgttgccaacagattattaattcctacaggattacatcatgcactgaatagtgtgttctggtttgatacgattggtattaatgatattggtaaattccaaagtggcaaagatgctataaaaggtattacaggacgctatcaagcgggattcttcccaatcatgatgttcggtattccagcggctgcgttagcaatgtatcatacagctaaaactactcagaaaaaacaagtttacggttggttcctagcgagttcagttgcagcatttttcgttggtgttacagagccgattgagtttgcatttatgtttgttgcgccaatcttatatgttgttcatgcgttattaacaggattatctttatttatcgcagctacattccattggacagctggattttcatttagtgcaggtttgatagattatgtgttatcactaattaatccagtatcaaatcatccattgatgttgcttgttcaaggtgttgtattcttcatcttatactatgtgattttccgtgtagtaatccaagtatttaacttaaatacgattggtagaggtgaaaatgaattagttgatccaacagttgtaaaagataatattgctcctggtgaaaatgatattaaacaaagtaaatatcataatcatgctatacaaatattagaaggtttaggtggtcaagagaatattgttaatttaaccaattgtgcaacaaggttgcgtctagagttaaaagacacatctattattgatcaacagaagattaaaaacgccggtgcagttggtgttactgttaatggcaaacattcaactcaagttattgtcggtacacacgtacagcaggttgctgatgaaattgaa

SEQ ID NO: 4347 - DNA, 1083 bp, Staphylococcus aureus
catcaaccgttgttattaacacctggcccaacccctgtacctgatgccattatgagagaaattcaagcacctatggttggtcatcgttctaaagattttgaagacatcgcacaacaagcatttcaaggtctgaagccaatatttgggagtcaaaatgatgtacttattttaacatctagcggtacaagcgtcttagaagctagtatgttgaacattgtaaaccctgaagatcacttcgttgtcattgtttcaggtgcctttggtaaccgatttaaacaaattgcacaaacttattacaaaaatgtgcatatttatgacgtaacatggggagaagctgtagatgtcaaagatttcatcaattacctttcaactttaaatgttgaagttaaagcagtatttagtcaatattgcgaaacatctacgacagtgctacaccctattcacgagttaggaaatgccatcaatcaatttaatagtaatatttattttgtagttgacggcgtaagttgcattggtgctgttgatgttgacattaacaaagataaaattgatgtacttgtttctggtagtcaaaaagcaattatgttacctccaggattagcttttgtagcttatagccaccgtgcaaaagaacgtttcaaagaagtaactacaccaaaattttatctagacttaaataaatacatttcgtcacaagctgacaattctacaccgttcacaccaaatgtgtctttatttagaggtgtaaatgcatacgttgaaaccgtaaaagcagaaggtttcaatcacgtaatagcacgacactacgcaattagaaatgcattaagaagcgccttaaaagcattagatttaactttattagtcaatgataaagatgcatctccaacggttacggcattcaaacctaacacaaatgatgaagtgaaaataatcaaagatgaacttaaaaatcgctttaaaataacaattgctggtggtcaaggccatcttaaaggtcaaattttaagaattggtcatatggggaaaattagtcctttcgatattttatcggtggtatctgctttagaaattattttaactgaa

SEQ ID NO: 4348 - DNA, 423 bp, Staphylococcus aureus
ttgcatcaacatgactttaaagtccaaacttcttggcaaggtggtcgtaacaatgtcggaaacgttcaaggcgatatactttcagagaatatttcaatacctgcttctttaggtggtgttggtataggaacaaatcccgatgaaatgttagtatcagccgcttcatcatgttatatcatctcattagcagctactcttgaacgtgcaaagttcacagatatttcaattgaacaacaatcgattggaacagcttgtttaaataatggaaaattcagtatgtcaaaaattgtgcaccatcctcacattgaaattccaagtgatcaaatagcacaattagaaaagcgattaccaaaattgataacaattgcagataataattgcatgatttcaaatgctgtaagaaataatgtggacataaaaatc

SEQ ID NO: 4349 - DNA, 600 bp, Staphylococcus aureus
atggctcgattcagaggttcaaactggaaaaaatctcgtcgtttaggtatctctttaagcggtactggtaaagaattagaaaaacgtccttatgcaccaggacaacatggtccaaaccaacgtaaaaaattatcagaatatggtttacaattacgtgaaaaacaaaaattacgttacttatatggaatgactgaaagacaattccgtaacacatttgacatcgctggtaaaaaattcggtgtacacggtgaaaacttcatgatcttattagcaagtcgtttagacgctgttgtttattcattaggtttagctcgtactcgtcgtcaagcacgtcaattagttaaccacggtcatatcttagtagatggtaaacgtgttgatattccatcttattctgttaaacctggtcaaacaatttcagttcgtgaaaaatctcaaaaattaaacatcatcgttgaatcagttgaaatcaacaatttcgtacctgagtacttaaactttgatgctgacagcttaactggtactttcgtacgtttaccagaacgtagcgaattacctgctgaaattaacgaacaattaatcgttgagtactactcaaga

SEQ ID NO: 4350 - DNA, 1038 bp, Staphylococcus aureus
aatcgacttactcaaatgttaagtattgaatatccaattatacaagcaggtatggcaggaagtacgacaccgaaattagttgcatcagtaagtaacagtggtggattaggcacaataggcgcaggttactttaatacgcagcaattagaagacgaaatagattatgtacgccaattaacgtcaaattcttttggtgtaaatgtctttgtaccaagtcaacaatcatataccagtagtcaaattgaaaatatgaatgcatggttaaaaccttatcgacgcgcattacatttagaagagccggttgtaaaaattaccgaagaacaacaatttaagtgtcatattgatacgataattaaaaagcaagtgcctgtatgttgttttacttttggaattccaaatgaatctattataaaaagattgaaagaagcaaacattaagctaataggtacagcaacaagtgttgatgaagctattgcgaatgaaaaagcgggtatggatgctatcgttgctcaaggtagtgaagcaggtggacatcgtggttcatttttaaatcctaaaaatcaattacctatggttggaacaatatctttagtgccacaaattgtagatgtcgtttcaattccggtcattgccgctggtggaattatggacggtagaggagttttggcaagtattgttttaggtgcagaaggggtacaaatgggcaccgcatttttaacatcacaagatagtaatgcatcagaactactgcgagacgcaattataaatagtaaagaaacagatacagtcgttacaaaagcgtttagtggaaagcttgcacgcggtatcaacaataggtttatcgaagaaatgtcccaatatgaaggcgacatcccagattatccaatacaaaatgagctaacaagtagcataagaaaagccgcagcaaacatcggcgacaaagagttaacacatatgtggagtggacaaagcccgcgactagcaacaacgcatcccgccaacaccatcatgtccaatataatcaatcaaattaatcaa

SEQ ID NO: 4351 - DNA, 1293 bp, Staphylococcus aureus
atgattgaacgctattctagagaagaaatgtctaatatttggactgatcaaaatcgctatgaagtatggttagaagtggaaattttagcatgtgaggcatggagtgaattaggacatataccgaaagctgacgtacaaaaaattcgtcaaaacgcaaaggtaaatgtcgaacgtgcacaagaaattgaacaagaaacgcgccatgatgttgtagcctttactagacaagtttctgaaacgctaggtgaagaacgtaagtgggtacattatggtttaacttctactgatgttgtagatacagctttaagtttcgttattaaacaagcaaatgacattattgaaaaagatttagaaagatttatcgacgttttagctgaaaaagcaaaaaattataaatatacattgatgatgggacgtacacatggagtgcatgcagaaccaactacatttggtgtcaaaatggcattgtggtacacggaaatgcaacgtaacttacaacgtttcaaacaagtaagagaagaaattgaagtagggaaaatgagtggtgcagtaggtacttttgctaacattcctcctgaaatagaaagttatgtgtgtaaacatttaggtattggcacagcgcctgtatcaacgcaaacattgcaacgcgatcgacatgcatactatattgcgacattagcattaatcgcgacgtcactagaaaaatttgccgttgaaattcgtaaccttcaaaaaactgaaacaagagaagttgaagaagcatttgcaaaaggtcaaaaaggttcatctgcaatgcctcataaacgaaatccaattggttctgaaaatatcacaggtatttcaagagtaattcgtggttatattactacagcttatgagaatgtgccattatggcatgaaagagatatttctcattcttcagctgagcgtattatgttaccagatgttacaatagcactagattatgcattgaatcgtttcacgaatattgtggaccgtttaactgtatttgaagataatatgcgtaataacatagataaaacatttggtctgattttctcacaacgtgtcttattagcattaattaataaaggtatggttcgtgaagaagcatacgacaaagtacaaccaaaagcgatgatatcttgggaaacgaaaacacctttccgtgaattaatcgaacaagatgagtctattacaagtgttttaacaaaagaagaattggatgaatgtttcgatcctaaacatcatttgaatcaagttgacactattttcgaacgcgctggattagca

SEQ ID NO: 4352 - DNA, 2041 bp, Staphylococcus aureus
atgaatgcgttattaaatcatatgaatacagagcaaagtgaagctgtaaagacaacagaaggaccattgttaattatggcaggtgctggttcagggaagacacgtgttttaacacatagaattgcttatttattagacgaaaaagatgtctcaccatacaatgttttggctattacttttacaaataaagctgcaagagaaatgaaagaacgtgttcaaaaattagtaggtgatcaagcagaagttatttggatgtcaacattccactcaatgtgtgttcgtattttacgtcgtgatgcagatcgaattggtatagaacgcaattttacgataattgatcctacagaccaaaaatctgttattaaagacgtcctaaaaaatgaaaatattgatagtaaaaagtttgaacctcgtatgtttatcggtgcaatcagtaatttgaaaaatgaacttaaaacacctgcggatgctcaaaaagaagccacagattatcactcgcaaatggtagcaacggtttatagtggatatcaacgccaattgtcacgtaatgaagcgttagattttgatgaccttattatgacaacgattaacttatttgagcgtgtaccagaagttttagaatattatcagaacaaattccaatatattcatgtagatgagtatcaagataccaataaagcacaatacacattagttaaattattagcaagtaagtttaaaaacttatgtgttgtaggtgactcagatcagtcaatttatggttggcgtggtgctgatattcaaaatatcttatcatttgaaaaagactacccagaagcgaatacaatctttttagagcaaaattatcgttcgacgaaaacgattttaaatgcggctaacgaagtgattaaaaataattctgaacgtaagccaaaaggactgtggactgcaaatacgaatggtgagaaaattcattactatgaagcaatgacagaacgtgatgaagcggaatttgtaatacgagaaattatgaagcatcaacgtaatggtaagaaatatcaagatatggcaattttatatagaacaaatgcacaatcacgtgtacttgaggaaacattcatgaaatctaatatgccatacacaatggttggtggccaaaagttctatgaccgtaaagaaatcaaagatttattaagttatttgcgtataattgccaatagtaatgatgacattagtttgcaacgtattattaatgttccaaaaagaggtgtaggtccttcatctgttgaaaaagttcaaaattatgcacttcaaaacaatatcagtatgtttgatgcacttggagaagctgattttatcggattgtcaaaaaaggtgacacaagagtgtcttaatttttacgagttgatccaaagcttgataaaagaacaagaatttttagaaattcatgaaatagttgatgaagtattacaaaagtctggctaccgagaaatgcttgaacgtgaaaatacactagaatctcgaagtagattagaaaacatcgatgaatttatgtcagtaccaaaagactatgaggaaaataccccattagaagaacagtcattaattaactttttaacggatttatcgttagtagctgatattgatgaggcagatactgaaaatggcgtaacactaatgacgatgcactcggctaagggccttgaatttccaatcgtctttataatggggatggaagaatctttattcccacatattagagcgattaagagtgaagatgatcatgaaatgcaagaagaacgtcgtatttgttatgtagcaatcacaagggctgaagaggtgttatatatcactcatgcgacatcaagaatgttatttggtcgccctcagtcaaatatgccatctagatttttaaaggaaattccagaatcactattagaaaatcattcaagtggcaaacgacaaacaatacaacctaaggcaaaaccttttgctaaacgtggatttagtcaacgaacaacgtcaacgaaaaaacaagtatcgtcatctgattggaatgtag

SEQ ID NO: 4353 - DNA, 1971 bp, Staphylococcus aureus
cgtgtgaacgagttacatgatttattaaatcaatacagttatgaatactatgtagaggataatccatctgtaccagatagtgaatatgacaaattacttcatgaactgattaaaatagaagaggagcatcctgagtataagactgtagattctccaacagttagagttggcggtgaagcccaagcctctttcaataaagtcaaccatgacacgccaatgttaagtttagggaatgcatttaatgaggatgatttgagaaaattcgaccaacgcatacgtgaacaaattggcaacgttgaatatatgtgcgaattaaaaattgatggcttagcagtatcattgaaatatgttgatggatacttcgttcaaggtttaacacgtggtgatggaacaacaggtgaagatattaccgaaaatttaaaaacaattcatgcgatacctttgaaaatgaaagaaccattaaatgtagaagttcgtggtgaagcatatatgccgagacgttcatttttacgattaaatgaagaaaaagaaaaaaatgatgagcagttatttgcaaatccaagaaacgctgctgcgggatcattaagacagttagattctaaattaacggcaaaacgaaagctaagcgtatttatatatagtgtcaatgatttcactgatttcaatgcgcgttcgcaaagtgaagcattagatgagttagataaattaggttttacaacgaataaaaatagagcgcgtgtaaataatatcgatggtgttttagagtatattgaaaaatggacaagccaaagagagtcattaccttatgatattgatgggattgttattaaggttaatgatttagatcaacaggatgagatgggattcacacaaaaatctcctagatgggccattgcttataaatttccagctgaggaagtagtaactaaattattagatattgaattaagtattggacgtacaggtgtagtcacacctactgctattttagaaccagtaaaagtagctggtacaactgtatcaagagcatctttgcacaatgaagatttaattcatgacagagatattcgaattggtgatagtgttgtagtgaaaaaagcaggtgacatcatacctgaagttgtacttagtattccagaacgtagacctgaagatgctttcacatatcatatgccaacccattgtccaagttgtggacatgaattagtacgtattgaaggcgaagtagcacttcgttgcattaatccaaaatgccaagcacaacttgttgaaggattgattcactttgtatcaagacaagccatgaatattgatggtttaggcactaaaattattcaacagctttatcaaagcgaattaattaaagatgttgctgatattttctatttaacagaagaagatttattacctttagatagaatggggcagaaaaaagttgataatttattagctgccattcaacaagctaaggacaattctttagaaaatttattatttggtctaggtattaggcatttaggtgttaaagcgagccaagtgttagcagaaaaatatgaaacgatagatcgattactaacggtaactgaagcggaattagtagaaattcatgatataggcgataaagtagcacaatctgtagttacttacttagaaaatgaagatattcgtgctttaattcaaaaattaaaagataaacatgttaatatgatttataaaggtatcaaaacatcagatattgaaggacatcctgaatttagtggtaaaacgatagtactaactggtaagctacatcaaatgacacgcaatgaagcatctaaatggcttgcatcacaaggtgctaaagttacaagtagcgttactaaaaatacagatgtcgttattgctggtgaagatgcaggttcaaaattaacaaaagcacaaagtttaggtattgaaatttggacagagcaacaatttgtagataagcaaaat

SEQ ID NO: 4354 - DNA, 753 bp, Staphylococcus aureus
ctgaagaaacgtcgttaataaaagaggatttttatgagaatgaagcgatttttaactattgtacaaattttattggttgtaattattatcatttttggttacaaaattgttcaaacatatattgaagacaagcaagaacgcgcaaattatgagaaattacaacaaaaatttcaaatgctgatgagcaaacatcaagcacatgtgagaccacaatttgaatcacttgaaaaaataaataaagacattgttggatggataaaattatcaggaacatcattgaattatccagtactacaaggtaagacaaatcacgattatttaaatttagattttgagcgagaacatcgacgtaaaggtagtatttttatggattttagaaatgaattgaagaatttaaatcataatactattttatacgggcaccatgtcggtgataatacgatgtttgatgtgttagaagattatttaaagcaatcgttttatgaaaaacacaagataattgaatttgacaataaatatggtaaatatcaattgcaagtatttagtgcatataaaactactactaaagataattacatacgtacagattttgaaaatgatcaagattatcaacaatttttagatgagacaaaacgtaaatctgtgattaattcagatgttaatgtaacggtaaaagataaaataatgactttatcaacatgcgaagatgcatatagtgaaacaacgaaaagaattgttgttgtcgcaaaaata

SEQ ID NO: 4355 - DNA, 1023 bp, Staphylococcus aureus
caacaaacaatgtcagagttaaaacaacaagcgcttgtagatattaatgaagcaaatgatgaacgtgcactgcaagaagttaaagtgaaatacttaggtaaaaaagggtcagttagcggactaatgaaattgatgaaggatttgccgaatgaagagaaacctgcgtttggtcaaaaagtgaatgaattgcgtcaaacaattcaaaatgaattagatgaaagacaacagatgttagttaaagaaaaattaaataagcaattggctgaagaaacaattgatgtatcattaccaggtcgtcatattgaaatcggttcaaagcatccattaacacgtacaatagaagaaattgaagacttattcttaggtttaggttatgaaattgtgaatggatatgaagttgaacaagatcattataacttcgaaatgttgaatttacctaaatcacaccctgcacgtgatatgcaagatagtttctatattacggatgaaattttattacgcacgcatacatcaccagtgcaagcacgtacgatggaatcacgtcatggtcaaggtccagttaaaattatttgccctggtaaagtgtatcgtcgtgactctgatgatgcgacacatagtcatcaatttacacaaattgaaggattagttgttgataaaaacgttaaaatgagtgatttgaaaggtactttagaattgttagctaagaaattatttggtgctgatcgtgaaattcgtttacgtccaagttacttcccattcactgaaccttctgtagaagttgatgtgtcatgttttaaatgtaaaggaaaaggttgtaatgtgtgtaaacacacaggatggattgaaattttaggtgctggaatggtacatcctaatgtattagaaatggctggttttgattcttcagagtactctggatttgcatttggtatgggaccagaccgtattgcaatgttgaaatatggtatagaagatattcgtcatttctatactaatgatgtgagatttttagatcaatttaaa

SEQ ID NO: 4356 - DNA, 2376 bp, Staphylococcus aureus
atgttgatatcaaatgaatggttgaaagaatatgtaacaatcgatgattctgtaagtaatttggcagaacgtattacgcgcacaggtattgaagtggatgatttaattgactacacaaaagatatcaaaaatttagttgtcggcttcgttaagtcaaaagagaaacatcctgatgcagataaattaaatgtttgccaagttgatatcggagaagacgaacctgtacaaatagtatgtggtgcaccgaatgttgatgcaggacaatatgtcattgttgctaaagtaggtggaagattgcctggtggtattaaaattaagcgtgccaaattacgcggtgaacgttcagaaggtatgatttgttcgttacaagaaattggtatttcaagtaattatataccgaaaagttttgaatcaggcatttatgtatttagtgaatcccaagttccaggaacagatgccttacaagctttatatttaaatgatcaagtaatggaatttgatttaacgccgaatcgtgcagatgctttaagtatgataggtactgcttatgaagttgcagcattatataatacaaaaatgactaagccagagacaacatcaaatgagcttgagttatctgcaaatgatgaactaactgtgacaattgaaaatgaagataaagtaccatattatagtgcacgtgttgttcacgacgtgacaattgaaccctcgccaatttggatgcaagcacgcttaataaaagcaggtatacgtcctattaataatgttgtcgacatttcaaattatgtgttattagaatacggtcaaccattgcatatgtttgatcaagatgcgattggttcacaacaaattgttgttcgtcaagctaatgaaggcgaaaaaatgacaacattagatgatacagaacgtgaattattaacgagcgatattgtcattactaatggacaaactccaattgcattagctggtgttatgggtggcgatttttcagaagttaaagaacatacatcaaatatagttattgaaggtgctatttttgattctgtttccattcgtcatacatcaagacgtttaaatttacgcagtgaatcatctagtcgttttgaaaaaggaatagctactgaatttgtagatgaagcagtcgaccgtgcatgttatttattacaaacttatgcaaacggaaaagtgctaaaagatagagtatcttcaggagaacttggtgcatttattacaccaatcgacatcactgctgataaaattaatcgcactattggatttgatttgtcacaaaatgatattgttactatttttaatcaactagggtttgatacagaaataaatgatgatgttattacagtgcaagtaccatcacgtcgtaaagatattacaattaaagaagatttaattgaagaagttgcacgtatatatggttacgacgatattccatcaacgttacctgtcttcgaaaaagttactagtggtcagctaactgatcgtcaatataaaactagaatggttaaagaagtgttagaaggtgctggattagaccaagctattacgtattcgttagtttctaaagaagatactactgcatttgcgatgcaacagcgtcaaacaattgatttattgatgccaatgagtgaagcgcatgcgtcattacgtcaaagtttattaccacatttaatcgaagcggcatcatataatgtggcacgcaaaaataaagatgtaaaattatttgaaatcggcaatgtcttctttgctaatggtgaaggtgaactaccagatcaagttgaatatttaagtggtattttaactggagattatgtagtcaatcaatggcaaggtaagaaagaaacggttgatttctatttagcaaaaggtgtcgtggatcgagtatctgaaaagttaaaccttgaatttagttatcgtcgtgctgatattgatggattacatccaggtcgcacagctgaaatcttattagagaataaagttgttggttttattggtgaattacatccaacattagcagctgaaaatgatttaaaacggacgtatgtttttgagttgaattttgatgcattaatggctgtgtcggtaggttacattaattaccagccaattccgagattcccaggcatgtctcgtgacattgcattagaagtagatcaaaatattccagcagctgatttattatcaacgattcatgcacacggtggcaatatattaaaagacacacttgtctttgatgtatatcagggtgaacatttagaaaaaggtaaaaaatcaattgcaatacgattaaattatttagacacagaagaaacattgacagatgaacgcgtttcaaaagtacaagcggaaattgaagcagcatta

SEQ ID NO: 4357 - DNA, 1164 bp, Staphylococcus aureus
atgagatacctaacatcaggagaatcacatggacctcaattaacagttattgttgaaggtgtacctgcaaatttagaagttaaggttgaggatattaataaagaaatgtttaagcgtcaaggcggttacggacgtggacgtcgtatgcaaattgaaaaagatacagtggagattgtttcgggtgtaagaaatggttatacattaggtagccctattacaatggttgttactaatgatgattttacacattggcgaaaaattatgggcgctgcgccaataagcgacgaagaacgagaaaatatgaaacgtacaattacgaagccaagaccgggacatgcagatttagttggcggtatgaaatataatcatcgtgacttacgaaatgtattagaacgttcatctgccagagaaacagcagcacgtgtagcggtcggtgcactatgcaaagttttattagaacaattagatatcgaaatatacagtcgtgttgttgagataggtggcattaaagataaagatttttatgattcagaaacatttaaagcaaaccttgatcgaaatgacgtccgtgtaattgatgatggcatcgcacaagcaatgcgcgataaaattgatgaagcgaaaaacgatggtgattcaatagggggcgtagttcaagttgtagttgaaaatatgcctgttggtgtaggtagttatgtacattatgatcgtaaattagatggaagaatagcacagggtgtcgttagtattaatgcatttaaaggtgtaagttttggagaaggatttaaagcagctgaaaagcctggtagcgaaattcaagacgaaattctctacaatactgaattgggctattatcgtgggtcaaatcacttaggtggtttagaaggcggtatgtcaaatggaatgccaattatcgttaatggtgtaatgaaaccaattccaacgttatataaaccattaaattcagtagacattaatactaaagaagactttaaagcaacaattgaacgttctgatagttgtgctgttcctgcagcaagtatcgtctgtgaacatgtcgtagcatttgaaattgcaaaagcattattggaagaattccaatcaaatcatattgagcaacttaaacaacaaattattgagcgcagacaattaaatattgagttt

SEQ ID NO: 4358 - DNA, 588 bp, Staphylococcus aureus
atgaatttattttacaatcctaaatatgtaggagatgtcgcatttttacaaattgaaccaattgaaggtgaattaaactacaataaaaaaggtaacgttgttgaaattactaatgaaggtaatgttgtaggttataatatttttgaaatttcaaaagatataacaattgaagaaacaggtcatattaaattaactgatgaacttgtaaatgtattccaaaagcgtatttcagaagctggttttgattataaattaaatgctgacctatcaccgaaatttgtagttggctatgttgaaactaaagacaaacatcctgatgcagataaattaagtgtactaaatgtaaatgttggaaatgacacattacaaattgtatgtggcgcgcctaacgttgaagctggacaaaaagtcgttgttgctaaagtaggtgcagtgatgcctagcggtatggtaattaaagatgctgaattacgtggtgttgcctcaagcggtatgatttgttcaatgaaagaattgaatttacctaatgcacctgaagaaaaaggtattatggtattaaatgacagctatgaaattggacaagcattt

SEQ ID NO: 4359 - DNA, 610 bp, Staphylococcus aureus
atgtctaaatttgatgaacaaatcattgtagtacctagagaaattatttttaataatgaaaagaatactttcaatgggtttttaaataagagtgggggcagaaggtcaaaataaaagtgatgcgctaagtcaatatgaagttaagcgaaaaaacgatatggaagaggatccatcatataaacaactcatttcttattgtttacttgaaaatgagcatggcgagatattagtgtatgaacgattatctggcggtggagaagctcgattgcatggacaatcttcaataggtgtaggcggtcatatgaatgatgttccaggagcagaatctattaacgaagtattgagagttaatgcacagagagaattagaagaagaagtaggtttaagtgagcaagattcacaaaatatggaatatatcggttttattaatgacgataataatgaggtgggcaaggtacatattggtgttgtatttaaaatcacggtaagtacgaatgatgtagaagctaaagaaacagatactttacgaataaaatggattgaaaaaggcaacatagagtcatatgatgatttcgaaacgtggagcgcattaatccttcaagatttataa

SEQ ID NO: 4360 - DNA, 261 bp, Staphylococcus aureus
atggaaaactttgataaaacaatgaaattcgactatgaagaacttccaacacaagatgtaagagatgttttaaataatgtttatcgaacattagatgaacgaggatataatgccgtaaaccaaattgtaggttatttattatcaggtgaccctgcgtatattccacgccaaaatgaagcaagaaatcaaattcgtcatattgatagagatgttattatggaagagcttgtttcttactatttaaaagagcaaaataaataa

SEQ ID NO: 4361 - DNA, 414 bp, Staphylococcus aureus
aaaattttaggactcgatgtcggtagtagaacggtaggaattgcaattagtgatataatgggttggacggcacaaggattagacacactccgaatcaatgaagaaaataatgaattaggtattgaccaattagtagacattattaaaaaacataatgtgggtacagtcgtaataggactacctaaaaacatgaataattcaataggatttcgaggcgaagcttcgttaacatataaagaaaaattattagaagcttatccttctattgagattgtgatgtgggatgaaagattaagcacaatggctgctgaacgatcattattagaagcagatgtttcaagacaaaaaagaaaacaagtgattgataaaatggcagcggtatttattttacaaggctatttagattcactacat

SEQ ID NO: 4362 - DNA, 309 bp, Staphylococcus aureus
atgactgaacataatcatgattcacaactagaaattaataacgaagaagaattattaactttattcgatgaagagggaaatgaagttttataccgaaaagttttagaattttatcatcctgaattcaaaaaagagtatgttatcttagctgaagaaggtgctcaatcagatgaagacgatatgattgagcttgtaccaatgattaatgaaccagatgagtcaggtgacggtggtaagttagtaccaatcgaaactgatgaagaatgggacatgattgaagaagttgtaaatactgaaatggaagaataa

SEQ ID NO: 4363 - DNA, 1338 bp, Staphylococcus aureus
cgttgtttaattgcgaacagaggtgaaattgctgtaaggattataagagcttgcagagaatatgggattgaaactgtagcagtttatgcaaaaggggacgagcaaagcttgcatgtacatttagcagatcaagctatatgtattggggaagctaatgctttagatagttatttaaatattgaccgcatcatatctgctgcacaaatcactggtgctaatgcaattcacccaggttatggctttttatcagaatcaacaaaatttgctcaaaccgttgaggaacaaggcatagcgtttatagggcctactaaaaatacgatggaaatgatgggggataaaataacagcaagacaaacagttcatcatgcaggtgttcctgtgattccaggatcaaatggtgctgtgaatcatgtgtctgaaattgagaagcttgccaaagacatcggttatccagttgttatcaaagctgccagtggcggtggtggtaaaggtatacgtattgtaaagaaagctgaagatttagaaaaggcatttaaagaagctaaaagtgaaggaaaaaaatactttgatgatgatcgtgtttatgttgaggcttttatacctgttgcaaaacatgttgaagttcaagttatgggggatgggcaggataattatgtacatttaggggaacgtgattgttctgtacaacgtaaaaatcaaaaattaatcgaagaatctccttgtgcagcattaactgaagaaagacgacaacaaatatgtaacgatgctgttaaagttgcacgtgcagcaaattatagaagtgcaggtacgattgaatttttagtaactgataccgcacattactttattgaaatgaatgctcgaattcaagttgaacatactgttacagagatgcgagcagaacgtgatttggttgcagcacaattgtatttattggaacataatcatttacctttttcacaaagcgatattcaatttaatggtcatgtgatagaagcgagaataaatgccgaaaatcctgaaaagaaatttcaaccaacacctggtaaagtgacagcgttacatttaccacaaggctttaatgtgcgagtcgattctttactatatcacggttatcaagtttcaccatattatgattctttagtagctaaagtaattgtaaaatctcatgatagagcttcagcaattgataaattgaaagccaccttagatgaaatggtgatagatggattttctacaactgccgattttttatatgcagttttaaattatccactatatcgtgatggagatgcaaaagatgttgatattaaatttttagaaaaacatcaaattgtt

SEQ ID NO: 4364 - DNA, 741 bp, Staphylococcus aureus
gttgatttgaattgtgatttaggagaagcatttggaaattattcctttggtggtgatcatcaaattattccgttaattacaagtgcgaatgttgcttgtggttttcacgctggtgatgaaaatgtaatgaatgaaacggtaaaacttgccaaagcacataatgttgcagtaggtgcacatcctggttttcctgatttgaaaggctttggcaggcgaaatatagatatctcaaacgacgagatttataatttgatgatttatcaattaggtgcattacaagggttttgtcgcattcatcaagttaaaattaatcatgttaaaccgcatggtgcattgtatcagatgggtgcaaaagacagagaaatagcaagcgttatagcacaagctgtttatgactttgatccatcactagtgctagtaggattagcaaattcatatctaatttcagaagcaaagaatgtcggattgattacagcttctgaagtgtttgctgatagacgatacgaagatgatgggcagctcgttagtagaaaagaaagtgatgctgtgattactgatactgacgaagcacttaagcaggttttgaagatggtgaaggaaaataaagttatttcaaaaaacaataaggaagtaacgttacaagcagatacaatttgtgtgcatggtgatggagaacatgcattattatttgtttcgaaaattagagaaattttaatgaaagaaggcattgatattcaatcc

SEQ ID NO: 4365 - DNA, 1365 bp, Staphylococcus aureus
atggcatttgaaggcttatcagaacgcctgcaagcgacgatgcaaaaaatgcgtggtaagggtaaacttactgaagctgatataaagataatgatgcgtgaagtaagattagcgttacttgaggctgacgtaaactttaaagtggtaaaagaatttattaaaacagtatcagaacgcgcattaggttccgatgtaatgcaatcattaacaccagggcaacaagttattaaaatagttcaagatgaattaacgaagttgatgggtggagaaaatatatcgattaatatgtcaaataaaccacctactgttgttatgatggttggtttacaaggtgctggtaaaacaacaactgcaggtaaattagcattattgatgcgtaaaaaatacaacaaaaaacctatgttagttgcagcagatatttatcgtccagcagcgataaatcaattacaaacagtagggaaacaaattgatattcctgtatacagtgaaggagatcaagtaaagccacaacaaattgtaactaatgcattaaaacatgctaaagaagaacatttagactttgtaatcattgatacagcaggtcgattacacatcgatgaagcattgatgaatgaattaaaagaagtaaaagacattgctaaaccaaacgaaattatgttagttgtcgattcaatgacgggtcaagatgctgtcaatgttgcagaatcttttgacgatcaacttgatgtcacaggtgttaccttaactaaattagatggtgatacacgtggtggtgcagctttatctattcgttcggtgacacaaaaaccaattaaatttgttggtatgagtgaaaagttagatggtttagagctattccatcctgaacgtatggcatcacgtatttcaggcctgggtgatgtgtcaaggttaattgaaaaagcgcaacaagatgtggatcaagaaaaagcaaaagatttagagaaaaagatgcgcgagtcatcatttactttagatgattttttagaacaacttgatcaggtgaaaaatttaggaccactggatgatattattaaaatgattccaggtatgaataaaatgaaaggtctagataagcttaatatgagtgaaaagcaaattgatcatattaaagcgattatccagtcaatgacgccggctgaaagaaacaatccagacacattgaatgtatcacgtaaaaagcgtattgctaaaggttctggtcgttcattacaagaagtcaatcgtttgatgaaacaatttaacgatatgaagaaaatgatgaaacaattcactggtggcggtaaaggtaaaaaaggtaaacgcaatcaaatgcaaaatatgttaaaaggtatgaatttaccgttt

SEQ ID NO: 4366 - DNA, 477 bp, Staphylococcus aureus
atgactttatccattctagttgcacatgacttgcaacgagtaattggttttgaaaatcaattaccttggcacctaccaaatgatttgaagcatgttaaaaaattatcaacaggtcatactttagtaatgggtcgtaagacatttgaatcgattggtaaaccactaccgaatcgtcgaaatgttgtacttacttcagatacaagtttcaacgtagagggcgttgatgtaattcattctattgaagatatttaccaactaccgggccatgttttcatatttggagggcaaacattatttgaagaaatgattgataaagtggacgacatgtatattactgttattgaaggtaaattccgtggtgatacgttctttccaccttatacatttgaagactgggaagttgcctcttcagttgaaggtaaactagatgaaaaaaatacaattccacatacctttctacatttaattcgtaaaaaa

SEQ ID NO: 4367 - DNA, 2025 bp, Staphylococcus aureus
atgcatcatgtaaataaatatttcaatcaaacaatggtgatagaagctttgaaaatgagtttttataagctgaatcctaaacaattaataaaaaatccgataatgtttgtcgttgaggttggaatgattttaacgttgatattaatatgttttcctgacatatttggaactagctatctatcgcgaggttatttgattacaatttttatcatattattaataactatattgtttgctaatttttcagaagcctttgctgaaggtcgtggaaaagcgcaagctgatagtttaagacaagcacaatcaaatttaactgctcgattgatagaagaaaatggtgcgtatcggatagtgaacgccacagagttaaaagccggacaaaatattcgggtagaaaatggagaaacaatccctgctgatggcgttgtaataaatggattagcaaccgttgatgaatctgcaattactggtgaatctgcacctgtgataaaagaatcaggtggcgattttgatggagtcattggcggtacacttgtaacatctgattggttagaaatacgtgttgagagtgaagcgggtacatcttttttagataaaatgattgccttagttgaaggggcggaaagaaataaaacaccaaatgaaattgcactttttacattattaacaacgttaacaattatatttttagtcgttattgtaacattatatccaatagcatcttacctgcatttaattttacctattgcgatgctcattgcgttaacagtatgtttaataccaacgacaatcggtggtttgttatcggcaattggtattgctggcatggatcgtgttactcaattcaatgtattagcgaaaagtgggcgtgctgtagaagtatgtggagatgtcgatgtaatgattttagacaagacaggcacaatcacttatggcaatcgaatcgctagtgaatttttaccagtgaatcaacaaatgtgggaaaaattgatagtcgctgcttatatgtcatcaatctacgatgatacgccagaaggaaaaagtattgtgcgattagcgaagcagatgtatataaatgagctgcctaaagacattgatggcacatataagccttttacagctgaaactagaatgagcggaatcattacaaatgaaatatcggtattcaaaggtgcacctaatagtatgataaatcttgtcaaacaacaacaaggcgatattcctcttaatattgagtctatctgtatggatgtatcgagtaaaggtggcacaccattaatagttattgaaaacaacgtcatgcttggcgtgatttatttaaaagatgtgattaaagatggtctagtagaacgatttgctgaattgagaaaaatgggcattgaaacagttatgtgtacgggcgataatgctttaacagcagctacaattgcaaaagaagcgggtgttgatagatttgttgcagagtgtaaacccgaagataaaattaaagtcatcaaagatgaacaagcgaaaggccatattgttgcgatgacaggagatggtacaaatgatgcacctgcgctagcacaagcgaatataggattagctatgaactcagggacaattagtgctaaagaggcggccaatctaattgatttagattcgaatcctacaaagttaatagaggttgtaaaaataggcaaacaattattaatgacgagaggtgcattaacgacatttagtttggctaatgacgtagcaaaatactttgcaattttacctgcactaatgatgtcaacgattccagaaatgacttcactaaatattatgcatttatcgtcacctaaatctgcaatcatatcagctttgatattcaatgcattaatcattgttgccttaattccaattgccatgaaaggtgtaaaagtaaagggttacagcattgatagaatttttataaataatatgttgatttatggattaggtggattaatcgtcccgtttttaggcattaaattaatagatatgattgtacaattttttgtg

SEQ ID NO: 4368 - DNA, 372 bp, Staphylococcus aureus
ttaacgataataactatggtattatgtggatttttattcccgttagctatcacgttaattggtcaaatatttttttatcaacaagcaaatggtagtttaattacgtatgacaatcgtatagttggatcaaaattgattggacagcactggacagagacacgatattttcacgggagaccgagtgcagttgattataatatgaatcctgaaaaattatataaaaacggcgtatcatcaggtggaagtaatgaatcgaatggaaacaccgaattaatagcacgcgtgaaacatcatgttaaatttggtaattcaaatgtaacaatagatgctgcaacaagttctgggtcgggcttagatccgcatattacgctt

SEQ ID NO: 4369 - DNA, 756 bp, Staphylococcus aureus
atgactaagtgtccaaagtgtaagaaaattatgtacacaaaagaattagctgaaaatttaaatgtgtgctttaattgtgatcatcatattgctttaactgcgtataaacgtatagaagcaatttctgatgaaggatcatttacagaattcgataagggaatgacctctgcgaatccattagattttccaagttatatagaaaaaattgaaaaggaccaacaaaagacaggtcttaaagaagcagtagtgactggtacagcgcaactagatggtatgaaatttggcgttgctgtcatggattcacgttttagaatgggaagtatgggatcggttatcggtgaaaagatatgtcgcatcattgattactgcactgagaaccgtttaccatttattcttttctctgcaagtggtggtgcacgtatgcaagaaggtattatttccttgatgcaaatgggtaaaaccagtgtatctttaaaacgtcattctgacgctggactattatatatatcatatttaacacatccaactactggtggtgtatctgcaagttttgcatcagttggtgatataaatctaagtgagccaaaagcgttgataggttttgcaggtcgtcgagttattgaacagacaataaacgaaaaattgccagatgatttccaaactgcagaatttttattagagcatggacagttggataaagttgtacatcgtaatgatatgcgtcaaacattgtctgaaattctaaaaatccatcaa

SEQ ID NO: 4370 - DNA, 966 bp, Staphylococcus aureus
atgaagaaaattgcagttttaactagtggtggagattcacctggaatgaatgctgccgtaagagcagttgttcgtacagcaatttacaatgaaattgaagtttatggtgtgtatcatggttaccaaggattgttaaatgatgatattcataaacttgaattaggatcagttggggatacgattcagcgtggaggtacattcttgtattcagcaagatgtccagagtttaaggagcaagaagtacgtaaagttgcaatcgaaaacttacgtaaaagagggattgagggccttgtagttattggtggtgacggtagttatcgcggtgcacaacgcatcagtgaggaatgcaaagaaattcaaactatcggtattcctggtacgattgacaatgatatcaatggtactgattttacaattggatttgacacagcattaaatacgattattggattagtcgacaaaattagagatactgcgtcaagtcacgcacgaacatttatcattgaagcaatgggccgtgattgtggagatctagcattatgggctggattatcagttggtgctgagacaattgtagttccagaagtgaaaacagatattaaagaaatagctgataaaattgaacaaggtattaaacgtggtaagaaacactcaatcgttcttgtagcagaaggttgtatgactgcgcaagattgtcaaaaagaattatcacaatacatcaatgttgataatagagtgtctgtgttaggtcacgttcaacgtggtggtagcccaacaggtgcggatagagttttagcatcacgtttaggtggatatgcggtagacttattaatgcaaggtgaaacagctaagggtgttggaattaagaacaataaaattgtagcaacatcttttgatgaaatttttgatggtaaagatcataaatttgattatagtctatatgaacttgctaacaagttatctata

SEQ ID NO: 4371 - DNA, 1755 bp, Staphylococcus aureus
atgagaaaaactaaaattgtatgtacaattggaccagcttcagaatcagaagaaatgattgagaaattaatcaatgctggtatgaacgttgcacgattaaacttttcacatggtagtcatgaagagcataaaggtagaattgatacaattcgtaaagtagctaaaagattagacaaaattgtagcaattctattagatacgaaaggtccagaaattcgtacgcataatatgaaagacggtatcattgaacttgaacgtggtaacgaagttattgttagcatgaatgaagttgaaggaacacctgaaaagttctcagtaacatatgaaaacttaattaacgatgttcaagtaggttcatacattttacttgatgatggcttaattgaattacaagttaaagatattgatcatgctaaaaaagaagttaaatgtgatattttaaactcaggtgagcttaaaaacaaaaaaggtgttaacttacctggtgtaagagtaagtttacctggtattacagaaaaagatgctgaagatatccgtttcggtattaaagaaaatgttgacttcattgcagcaagtttcgtacgtcgtcctagtgatgttttagaaattcgtgaaattttagaagaacaaaaagctaacatttcagtattccctaaaattgaaaaccaagaaggtattgataatattgcggaaattcttgaagtgtctgatggtttaatggttgcacgtggtgacatgggtgttgaaattccacctgaaaaagtaccaatggttcaaaaagatttaatcagacaatgtaacaaattaggtaaaccagttattacagctacacaaatgttagattctatgcaacgtaacccacgtgctacacgtgcagaagctagtgacgttgccaacgcaatctatgatggtacagatgcagtaatgttatctggtgaaactgctgctggtttatatcctgaagaagctgttaaaacaatgagaaatattgctgtatcagctgaagcagcccaagattacaaaaagttattgtcagatcgtactaaattagttgaaacttcattagtgaatgctatcggtatttcggttgcacatacagctttaaacttaaatgttaaagcaattgtagctgctactgaaagtggttcaacggcacgtactatctctaaatatcgtccgcattcagacattattgcagtgactccaagtgaagaaactgcacgtcaatgttcaattgtttggggtgttcaacctgtagttaaaaaaggacgtaagagtacagatgcattgttaaacaatgcagttgcaacagctgttgaaactggtagagtaactaatggtgatttaatcattattactgctggtgtaccaactggtgaaactggaactactaatatgatgaaaatccacctagttggtgacgaaattgctaatggtcaaggtattggacgtggttcagttgttggtactacgttagttgctgaaactgttaaagatttagaaggtaaagatttatctgacaaagttatcgttactaactcaatcgatgaaacgtttgtaccttatgtagaaaaagctttaggcttaattacagaagaaaatggtattacatcaccaagtgcaattgttggtttagaaaaaggtattccaacagttgtaggtgtagaaaaagctgttaaaaacataagcaataacatgttagttacgattgatgctgctcaaggtaaaatctttgaaggatatgcaaacgtacta

SEQ ID NO: 4372 - DNA, 1101 bp, Staphylococcus aureus
agaggtttagaaggggttatcgcagcggagactaaaataagttcaattattgaaagtcaattgacttatgccggctatgatattgatgatctagctgaaaatgcgcaatttgaagaagttattttcctattatggaactatagattgccaaacgaagaagagcttgctcatctaaaagggaaattaaatcaatacatgacattaaatcctcgtgtgtatacacattttgaggagtatgttacagatcacgtgcatccaatgacagcattacgtacgtcgttatcatatattgcacatttcgatcctgatgctgaaaatgaatcagatgaaaatcgttatgaaagagcaatgcgtatacaggctaaagtagcatcattagttacagcgtttgctcgagtaagacaagataaagaaccacttaagcctaatcctgacttaagttatgcggcaaacttcctatatatgttacgtggggaattaccaacagatatagaagttgaagccttcaataaagcacttattttacacgctgatcatgagttgaacgcatctgcatttacagcacgttgtgcggtatcatcattgtcagatatgtactcaggtattgtagcagctgtaggttctctgaaagggccattacatggtggtgcaaacgaacaagttatgacgatgttatctgagattgggtcaattgaaaatgttgatgcttacttagacgaaaaatttgctaataaagataaagtaatgggcttcggtcatcgtgtatataaagatggcgatcctagagcgaaatatttaagagaaatgagccgtcaaattacgaaagacgctggtcgtgaagaattatttgaaatgtcagtgaaaatggaaaaacgtatggcagaagaaaaaggattaattcctaatgttgatttttatagtgcgagtgtttatcactgtatggaaatacctcatgacttattcacgccaatctttgctgtaagtcgttctgcaggatggattgctcatattttagaacaatataaagacaatagaattatgcgtcctagagcgaaatatattggagaaacgaatcgtaagtatatcccgcttgaagaaaga

SEQ ID NO: 4373 - DNA, 1269 bp, Staphylococcus aureus
ataactatgactgcagaaaaaattactcaaggaactgaaggattaaacgtacctaacgaaccaattatcccatttattatcggtgatggaattggaccggatatttggaaggcagcaagccgagttatagatgctgctgttgagaaagcctataatggcgaaaaacgcattgaatggaaagaagtgctagctggccaaaaagcatttgatacaactggcgaatggttacctcaagaaacacttgatacaattaaagaatatttaattgctgttaaaggacctttaacaacaccaattggtggtggtattagatcattaaatgtagctttacgccaagaattagatttatttacttgtttaagaccggtacgttggtttaaaggagtaccatcacctgttaaacgtccacaagatgttgatatggttattttccgtgaaaatactgaagacatttatgctggtattgaatttaaagaaggtacaacagaagttaaaaaggtaattgacttcttacaaaacgaaatgggtgcgacaaacattcgattcccagaaacttcaggtattggtattaaaccagtttctaaagaaggtactgagcgattagttagagcagctattcaatatgctatcgataataaccgtaaatcagttactttagttcataaaggtaatattatgaaatttacagaaggctcatttaagcagtggggttacgatttagcattaactgaatttggtgatcaagtattcacttggcaacaatatgacgaaattgttgaaaatgaaggcagagatgctgctaatgctgcacaagaaaaagctgaaaaagaaggcaagattatcattaaagattctattgctgacattttcttacaacaaattttaactcgcccagctgagcatgatgttgtagcaactatgaacttgaatggtgactatatttcagatgctttagctgcacaagttggtggtattggtattgcgccaggtgcaaacattaattatgaaacaggtcatgctatttttgaagcaacacatggtacagctccaaaatatgcaggtttaaataaagtgaatccatcttcagtaattttaagttctgtattaatgttagaacatttaggatggcaagaagcggcagataagattacagattcaattgaagatacaattgcttcaaaagttgttacttatgactttgcccgtttaatggatggtgctgaagaagtttctacatcagcatttgcagatgaattgattaaaaattta

SEQ ID NO: 4374 - DNA, 807 bp, Staphylococcus aureus
ttacaagacgttattgtacaagaaatgaaagtgaaaaagcgtatcgatagtgctgaagaaattatggaattaaagcaatttataaaaaattatgtacaatcacattcatttataaaatctttagtgttaggtatttcaggaggacaagattctacattagttggaaaattagtacaaatgtctgttaacgaattacgtgaagaaggcattgattgtacgtttattgcagttaaattaccttatggagttcaaaaagatgctgatgaagtagagcaagctttgcgattcattgaaccagacgaaatagttactgtaaatattaaacctgcagttgatcaaagtgtgcaatcattaaaagaagccggtattgttcttacagatttccaaaaaggaaatgaaaaagcgcgtgaacgtatgaaagtacaattttcaattgcttcaaaccgacaaggtattgtagtaggaacagatcattcagctgaaaatataactggtttttatacgaagtatggtgatggtgctgcagatatcgcacctatatttggtttgaataaacgacaaggtcgtcaattattagcgtatcttggtgcgccaaaggaattatatgaaaaaacgccaactgctgatttagaagatgataaaccacagctcccagatgaagatgcattaggtgtaacttatgaggcgattgataattatttagaaggtaagccagttacgccagaagaacaaaaagtaattgaaaatcattatatacgaaatgcacacaaacgtgaacttgcatatacaagatacacgtggccaaaa

SEQ ID NO: 4375 - DNA, 1458 bp, Staphylococcus aureus
taccaattagaagacgacagtttaatgttacataatgacttatatcaaattaatatggctgaaagttattggaatgataatattcatgaaaaaatggctgtatttgatttgtattttagaaaaatgccatttaatagtggctatgctgtttttaatggtttaaaacgcgtcattgattttatagaacattttggattttcagaatctgatttggaatatttaaagtctattggctacaaggatgatttcttatcatatttaaaagatttaaaattcacaggcagcatccgttcgatgcaagaaggcgaattatgctttggtaacgaaccattgttacgcgtagaagcaccattgattcaagcgcaattaatagaaacaattttattaaacattgtaaatttccatacactaattacaacaaaggctagtagaattcgtcaaattgcatcaaatgataaattaatggagtttggtacacgtcgtgcgcaagaaattgatgcagcattgtggggcgctagagctgcttacatcgggggctttgattctacaagtaatgttagggcaggtaaattatttggtatacctgtgtctggtacacatgcacacgcatttgtccaaacttatggagacgaatatgttgccttcaaaaaatatgctgaaagacataaaaattgtgtgttcctagtagatacattccatactttaaaatctggcgtgccaaatgcaataaaagttgcaaaagaattaggtgacaaaattaactttgtaggtattcgattggattctggagatatcgcttatttatctaaagaggcaagacgtatgcttgatgaagcaggatttactgaaactaaaattatcgcgtctaatgatttggatgaagaaacgattacgagtttgaaagcacaaggtgcaaaagtagattcttggggcgttggtacaaagctgattacaggatacgatcaaccagcattaggtgcagtatataaacttgtagctattgaaaatgaagatggttcatatagtgatcgtattaaattatcaaataacgctgaaaaggttacgacgccaggtaagaaaaatgtatatcgcattataaacaagaaaacaggtaaagcagaaggcgattatattactttggaaaatgaaaatccatacgatgaacaacctttaaaattattccatccagtgcatacttataaaatgaaatttataaaatctttcgaagccattgatttgcatcataatatttatgaaaatggtaaattagtatatcaaatgccaacagaagatgaatcacgtgaatatttagcacaaggattacaatctatttgggatgaaaataagcgtttccttaatccacaagaatatccagtcgatttaagcaaggcatgttgggataataaacataaacgtatttttgaagttgcggaacacgttaaggagatggaagaagat

SEQ ID NO: 4376 - DNA, 942 bp, Staphylococcus aureus
gttattgaagtgtgtaatcaaattggcattccatattacgctgttaattttgaaaaagaatattgggataaagtctttacgtatttcttagatgaatacaaaaaaggtcgtactccaaatccagacgttatgtgtaataaagaaattaagtttaaagcctttttagatcatgcgatgaatttaggtgcaaattatgtagcaacaggacattacgcacgcatacatcgtcatgaagatggtcatgttgaaatgttacgtggtgtagataataataaagatcaaacatacttcttgaatcaattatctcaacaacaactttcaaaagtgatgttcccaattggtgacatcgaaaagagtgaagtgcgtcgaattgctgaagaacaaggacttgttactgctaagaaaaaagattctacaggcatttgttttatcggcgaaaaaaactttaaaacatttttatcacaatatttacctgcacaaccgggtgatatgataacacttgatggtaagaaaatgggtaaacatagtggtttgatgtattacacaataggacaaagacatggtttaggtataggtggagatggcgatccttggtttgttgtcggtaaaaatctaaaagataatgttttatatgtagaacaaggattccatcacgatgcattatacagtgattacttaattgcttcagactattcatttgtaaatccagaagataatgacttagatcaaggttttgaatgtacagctaaatttagatatcgccaaaaagatacgaaagtttttgtgaaacgtgaaaacgaccatgcactacgtgttacttttgctgagccagtaagagcaatcacacctggacaagcagttgttttttatcaaggtgatgtgtgtcttggtggagcaacaattgacgatgtgttcaaaaatgaaggtcaattaaattatgtt

SEQ ID NO: 4377 - DNA, 2628 bp, Staphylococcus aureus
atgaaaaagttaaaagcgagtgaaattagacaaaaatatctagatttctttgttgaaaaaggacatatggttgaaccttctgcaccattagtgccaattgatgatgatacattattatggattaattcaggtgtagcaacattaaagaaatattttgatggacgtgaaacacctaaaaagccaagaattgtaaactctcaaaaagctattcgtacaaatgatattgaaaatgttggtttcacagcgcgtcaccatacattctttgaaatgttaggtaacttctcaattggtgattactttaaacaagaagcgattgaatttgcttgggaatttttaacgagtgataaatggatgggtatggagccagataaattgtacgttacgattcatccggaagatatggaagcatacaacatttggcataaagatattgggcttgaagaaagtcgtattattcgcattgaaggtaacttctgggatattggtgaagggccttcaggaccgaacactgagattttctatgatcgcggagaagcatatggacaagacgatccggcagaagaaatgtatccaggtggagaaaatgaacgctatcttgaagtatggaacttagtatttagtgaattcaatcataataaagatcatagttacacaccattacctaataaaaacattgataccggcatggggcttgagcgtatggcctcagtttctcaaaatgtacgtactaactatgaaacagatttatttatgcctataatgaatgaaatcgaaaaagtatcaggtaaacaatatttagtaaacaacgaacaagatgtggcatttaaagtaattgctgaccacattcgtacgattgcatttgcaatttctgatggtgcattacctgccaatgaaggtagaggatatgtattacgtcgattgttacgtcgtgccgttcgttttagtcaaacgttaggaatcaatgagccatttatgtacaaacttgttgatattgttgcagacattatggaaccatattatccaaatgttaaggaaaaagcagatttcattaagcgtgttataaagtctgaagaagaacgattccatgaaacattagaagatggtttagcgattttaaatgaattaattaaaaaagctaaagaaacaacaaatgaaattaatgggaaagatgcatttaaattgtatgatacgtacgggttcccaattgaattaactgaagaaatagcagtgcaagcaggattgaaagttgatatgacaacattcgagtcagaaatgcaacaacaacgtgatcgtgcacgtcaagcacgtcaaaattctcaatcaatgcaagttcaaagtgaagtattgaaaaatattacatctgcaagtacttttgttggttatgatactgcgacagctcaaacaacactaacacacttgatatataatggtgaagaagtttcacaagttgaagcgggtgaaacagtatacttcatgttaacggaaacaccattttatgcagtcagtggtggacaagttgcggatacaggtattgtttataatgacaattttgaaattgctgttagtgaagtaaccaaagcaccaaatggtcaaaacttgcataaaggagtagtacaatttggccaagtaaatgttggcgctacagtgtctgctgaagtgaaccaaaatgatcgacgtgacattcaaaagaaccatagtgcaacacatttattacatgcagcgttgaaatcagtactgggtgatcatgttaaccaagctggttcactagtagaagcagatcgtttacgttttgatttctctcattttggtccaatgactaatgatgaaattgatcaagttgaacgcttagtaaatgaagaaatttggaaaggtattgacgttaacattcaagaaatggatattgcttcagctaaagaaatgggcgcaatggcattattcggtgaaaaatatggtgatgttgtgcgtgtagtaaatatggcaccattttcaattgaattatgtggtggtattcatgtccgcaatacttctgaaattggtttattcaaaatagtaagtgagtcaggtacaggagctggtgtgcgtcgtattgaagcattaacaggtaaagcagctttcttatatttagaagatattcaagagaaatttaatacgatgaaatcacagctgaaagtgaaatctgatgatcaagtagtcgataagttaacacaattgcaagatgaagaaaaagcattattaaaacaattagagcaacgtgacaaagaaatcacatcacttaaaatgggtaatattgaagatcaagttgaagaaatcaatggctataaagtattggttactgaagtggatgtaccaaatgcgaaagcaattcgctcgacaatggacgattttaaatctaaactacaagatacaattatcattcttgcaagtaatgttgatgataaagtatcgatggttgcaactgtccctaaatctttaacaaataatgttaaagccggtgatcttatcaaacaaatggcaccaatcgttggtggtaaaggtggcggtcgtccagatatggctcaaggtggcggtacacaacctgaaaatatctcaaaatcattaagctttattaaagattacattaaaaatcta

SEQ ID NO: 4378 - DNA, 2535 bp, Staphylococcus aureus
attgatgctctagctgacaaagggaaaaaagcattagaagcattatctaaaaagtcacaagaagaaattgatcatattgttcatcaaatgagcttagcagctgttgatcaacatatggtgctagcaaaattagcacatgaagaaactggaagaggtatatacgaagataaagcgattaaaaatttatacgcttctgaatatatatggaattcaataaaagacaataagacagtagggattattggtgaagataaagaaaaaggattaacgtatgtagcggaaccaattggtgttatttgtggtgttacgccaacaacaaatcctacgtcgacaactatttttaaagcgatgattgcaattaagacaggaaatccaatcatttttgcattccatccaagtgcgcaagaatcgtcgaagcgtgcagcagaagttgtattagaagcggcaatgaaggcaggtgcacctaaagatattattcaatggattgaagtgccttctatcgaagcaacaaaacaattaatgaatcacaaaggtattgcattagttctagcaacaggtggttcgggcatggttaagtctgcatattcaactggcaaaccggcattaggtgtgggaccaggtaacgtgccgtcttacattgaaaaaacagcacacattaagcgtgcagtaaatgatatcattggttcaaaaacatttgataatggtatgatttgtgcttctgaacaagttgtagttattgataaagaaatttataaagacgttactaatgaatttaaagcacatcaagcatattttgttaaaaaagatgaattacaacgcttagaaaatgcaattatgaatgaacaaaaaacaggtattaagcctgatattgtcggtaaatctgcagttgaaatagctgaattatcaggtatacctgtccccgaaaatacaaaacttatcatagccgaaattagcggtgtaggttcagactatccgttatctcgtgaaaaattatctccagtattagccttagtaaaagcccaatctacaaaacaagcatttcaaatttgtgaagacacactacattttggtggattaggacacacagccgttatccatacagaagatgaaacattacaaaaagattttggactaagaatgaaagcttgtcgtgtacttgtaaatacaccatcagcggttggaggtattggtgatatgtataacgaattgattccgtctttaacattaggttgtggttcgtacggtagaaactcaatttcacataatgttagtgcgacagatttattaaacattaaaacaattgctaaacgacgtaataatactcaaattttcaaggtgcctgctcaaatttattttgaagaaaatgcaatcatgagtctaacaacaatggacaagattgaaaaagtgatgattgtctgtgaccctggcatggtcgaattcggttatacaaaaacagttgagaatgtattaagacaaagaacggaacagcctcaaattaaaatatttagcgaagtcgaaccgaacccatcaactaatacagtatataaaggtctggaaatgatggttgatttccaaccggatacaatcattgcacttggtggtggttcagcgatggatgctgcaaaagcaatgtggatgttctttgaacaccctgagacatcattcttcggtgctaaacaaaagttcctagacatcggtaaacgtacttataaaataggcatgcctgaaaatgcgacgttcatttgtatccctacgacatcaggtacaggttcagaagtaacaccatttgcagttatcacagatagtgaaacaaatgtaaaatatccgttggctgattttgctttaacacctgacgttgcaattattgaccctcaatttgtgatgagtgtgccaaaaagcgttacagcagatacaggaatggatgtactaacgcatgccatggaatcatatgtatctgtaatggcttcagattacacaagaggtttgagtctacaagcgattaaattgacgttcgaatatttaaaatcatctgttgaaaaaggtgataaagtttcaagagagaaaatgcataacgcatcaactttggctggtatggcatttgcaaatgcattcttaggcattgcacactcaattgcgcataaaattggtggggaatatggtattccgcatggtagagcgaatgcgatattactaccgcatattatccgttataatgctaaagacccgcaaaaacatgcattattccctaaatatgagttcttcagagcagatacagattatgcagatattgccaaattcttaggattaaaaggtaatacgacagaagcactcgtagaatcattagctaaagctgtctacgaattaggtcaatcagtcggaattgaaatgaatttgaaatcacaaggtgtgtctgaagaagaattaaatgagtcaattgatagaatggcagagctcgcatttgaagatcagtgtacaactgctaatcctaaagaagcgctaatcagtgaaatcaaagatatcattcaaacatcatat

SEQ ID NO: 4379 - DNA, 762 bp, Staphylococcus aureus
atgattgatattcataaccatatattgcctaatatcgatgacggtccgacaaatgaaacagagatgctggatcttttaaaacaagcgacaacacaaggtgttacagaaatcattgtaacatcacatcacttacatcctcgatataccacacctatagaaaaagtgaaatcatgtttaaaccatattgaaagcttagaggaagtacaagcactaaatctaaagttttattatggacaggaaataagaattaccgatcaaatccttaatgatattgatcgaaaagttattaccggtattaatgattcacgctatttactaatagaatttccatcaaatgaagttccacactatactgatcaattatttttcgaattacagagtaaaggctttgtaccgattattgcacatccagagcggaataaagcaataagtcaaaaccttgacatactatacgatttaattaacaaaggtgctttaagtcaagtgacaacggcgtcattagcgggtatttccggtaaaaaaattagaaaattagcaattcaaatgattgaaaacaatctgacacatttcatcggttcagatgcgcataacacagaaatcagaccgttcttaatgaaagacttatttaatgataagaaattacgtgattattatgaagatatgaacggatttattagtaatgcgaagttagttgttgatgataaaaaaattcctaaacgaatgccacaacaagattataaacagaaaagatggtttgggtta

SEQ ID NO: 4380 - DNA, 1017 bp, Staphylococcus aureus
gacaaaattttattaattactgggggcacaggatcattcggtaatgctgttatgaaacggtttttagattctaatattaaagaaattcgtattttttcacgcgatgagaaaaaacaagatgacattcgaaaaaaatataataattcaaaattaaagttctacattggtgatgtgcgtgatagtcaaagtgtagaaacagcaatgcgagatgttgattacgtattccatgcagcagctttaaaacaagtgccgtcatgtgaattctttccagttgaggcagtgaagacaaatattattggtacagaaaatgtcttacaaagtgcgattcatcaaaatgttaaaaaagtcatatgtttatctacagataaggcagcgtatcctattaatgctatgggtatttcgaaagcaatgatggaaaaagtattcgtagccaaatcaagaaatattcgtagtgaacaaacgcttatttgcggtacaagatacggcaatgtgatggcatcaagaggatcagtaattcctttgtttatcgacaaaatcaaagctggagaacctttaacgattacagatcctgatatgacaagatttttaatgagcttagaagatgcggtagaactagttgttcatgcatttaagcatgcagagacaggcgatatcatggttcaaaaagcaccaagttcaacggtaggggatcttgcgaccgcattattagaattgtttgaagctgataatgcaattgaaatcattggtacgcgacatggagagaaaaaagcagaaacattgttgacgagagaagaatacgcacaatgtgaagatatgggtgattattttagagtgccggcagactccagagatttaaattatagtaattatgttgaaaccggtaacgaaatgattacgcaatcttatgaatataactccgataatacacatattttaacggtggaagagataaaagaaaaacttttaacactagaatatgttagaaacgaattgaatgattataaagcttcaatgaga

SEQ ID NO: 4381 - DNA, 855 bp, Staphylococcus aureus
gattatattgttaaagcattagcatttgatggggagattagggcttatgctgctttgacaactgaaactgttcaagaagcacaaacgagacattatacatggccgacagcatctgctgcaatgggaagaacaatgacagcaacagctatgatgggcgcaatgttgaaaggtgatcaaaaattaactgtcactgtagatggccaaggacctattggacgaattattgccgatgcaaatgctaaaggcgaggtgcgtgcttatgtagaccatccacaaactcattttccattaaatgagcaaggtaaacttgatgtaagacgagcagtagggacaaatggatctattatggttgttaaagacgttggaatgaaagactatttctctggagcaagtccaattgtttcaggagaacttggtgaagattttacttattattatgctacaagtgaacaaacaccttcatcggtaggtcttggtgtattggtaaatcctgataatacgattaaagcagcaggaggatttatcattcaagttatgccaggtgccaaagatgaaacaatttcaaaattagaaaaagcaattagtgaaatgacgccagtttctaaattaattgaacaaggattaacgccagaaggattactaaacgaaatcttaggtgaagaccatgtgcaaattttagagaaaatgcctgttcaatttgaatgtaattgtagtcatgagaaatttttaaatgctattaaaggattgggcgaggctgagattcaaaatatgattaaagaagatcatggtgctgaagcagtatgtcatttctgtggaaataaatataaatatactgaagaagaattaaacgtgtta

SEQ ID NO: 4382 - DNA, 909 bp, Staphylococcus aureus
gataatattactcaaattattggcggtacaccggtagtcaaattgagaaatgtagtagatgacaatgcagcagatgtttatgtaaaattggaatatcaaaatccaggtggttctgtaaaggatagaattgctttagcaatgattgaaaaagcagagcgagaaggtaaaattaaacctggcgatacaattgtagaaccaacaagtggtaatacaggtatcggtttagcatttgtatgtgctgctaaaggatataaagcagtatttactatgcctgaaacaatgagccaagagcgtcgtaatttattaaaagcatacggtgcggaattagttttaacgcctggatcagaagcaatgaaaggtgcaattaaaaaagctaaagaattaaaagaagaacatggttacttcgagccacaacaatttgaaaaccctgcgaaccctgaagttcatgagttaactacaggtcctgagttattacaacaatttgaagggaaaactatcgatgcgttcctagctggtgttggtactggtggtacgttatctggtgtaggtaaagttctgaaaaaagaatatcctaacatcgaaattgttgctatagagcctgaggcttctccagtattgagcggtggtgagccaggtccacataaattacaaggtttaggtgctggatttattccaggtactttgaatacagaaatctatgacagtattattaaagtaggaaatgatacagcgatggaaatgtctcgtcgagttgctaaagaggaaggtattttagcaggtatttcatcaggtgctgcgatttatgctgccattcaaaaagcaaaagaattaggaaaaggtaaaacagtagtaacagtattgccgagtaatggtgagcgctacttatcaacacctttatattcattcgat

SEQ ID NO: 4383 - DNA, 801 bp, Staphylococcus aureus
atgactaaaacaaaaattatgggcatattaaacgtcacacctgattcattctcagatggtggaaaatttaataatgttgaatcagcagtaactagagtgaaagcgatgatggatgaaggtgctgacattatagatgttggaggtgtttcaacgagacccggccatgaaatggtttcattagaagaagagctgaacagagtattacctgttgttgaagctattgtcggttttgatgtgaaaatttcagtcgatacatttcgaagtgaggttgctgaagcatgtttaaaattaggcgttgatatcattaatgatcaatgggcggggctgtatgatcatcgtatgttccaaattgtagctaaatatgacgcggaaattattttaatgcataatggaaatggtaatcgtgatgaaccggttgtcgaagaaatgttaacatctttgttagcacaagcacatcaagctaaaatagctggtataccttcaaataaaatttggctagatccaggtataggtttcgctaaaactagaaatgaagaagccgaagttatggcaagactggatgaacttgttgcaacagaatatccagttttattagcgacaagccggaaacgtttcactaaagagatgatgggttatgatacaacaccggttgaaagagatgaagtaactgcagctacgactgcatatggtattatgaaaggcgttagagcagtacgcgttcataatgtcgagttgaatgctaaattagctaaaggtatagattttttaaaggagaatgaaaatgcaagacacaatctttct

SEQ ID NO: 4384 - DNA, 726 bp, Staphylococcus aureus
atggatcacaaatccccgctcgtgagttggaatttattcggttttgatatcgttttcaatttatcaagtatattgatgatacttgttacggcgtttcttgtttttctacttgctatcatttgtacgcgtaatttgaaaaaaagaccaactggcaaacaaaatttcgttgaatggatttttgatttcgtgaggggaatcattgaaggtaacatggcttggaaaaaaggtggtcaattccacttcttagcagtaacgctgattctgtacatttttatagctaatatgttaggtcttccgttttctatagtaacgaaagatcacacattgtggtggaaatcaccaacagctgatgcaacagtgactttaacgttgtctacaacgataatactgttaactcacttttatggaattaaaatgcgtggtacgaaacaatatcttaaaggttatgtacagccgttttggccattggcaattattaatgtttttgaagagttcacttcaacattaacgcttggtctgcgtttgtacggtaacatatttgcaggtgagatactattaacattacttgctggcttattctttaacgaaccagcatggggttggattattagtatcccaggattaattgtttggcaagcattttcaatatttgtaggaacaatccaagcatatatctttattatgctttcgatggtttatatgtcacataaagtggcagatgaacac

SEQ ID NO: 4385 - DNA, 504 bp, Staphylococcus aureus
gctaacttattcgttcttggtgcagctggaggcgttgagtggggtactgtgattgtacaggtcctaactttcatcgtgttacttgcgttacttaaaaagttcgcatggggtccattgaaagatgtaatggataaacgtgaaagagatattaacagagatatcgatgacgcagaacaagctaagttaaatgcacagaaacttgaagaagaaaataaacaaaaacttaaagaaacacaagaagaagttcaaaagattttagaagatgctaaggttcaagcacgtcaacagcaagaacaaattattcatgaagcaaacgtacgtgcaaacggtatgattgaaacagcacaaagtgaaatcaatagccaaaaagaacgtgccattgcagatattaataatcaagtatctgaactatcagtgttaattgcttctaaagttcttagaaaagaaatttctgaacaagaccaaaaagcattggttgacaagtatctaaaagaggcaggcgat

SEQ ID NO: 4386 - DNA, 1506 bp, Staphylococcus aureus
atggccataaaagctgaagaaatcagtgcattacttcgctcacaaattgaaaattatgagtcagaaatgtccgtaactgatgtaggtactgtattacaaattggtgatggtattgcattaattcacggattaaatgacgttatggctggtgagctagtagaattccataacggcgtacttggtttagcccaaaaccttgaagagtcaaacgtgggtgtggttattttaggaccatacacaggtattactgaaggtgacgaagttaaacgtactggtcgtatcatggaagtaccagtaggtgaagaactaatcggaagagttgttaatccattaggacaacctattgatggacaaggaccgattaacacaactaaaacacgtccagtagagaaaaaagctactggtgtaatggatcgtaaatcagtagatgagccattacaaacaggtatcaaagcaattgatgctttagtaccaattggtagaggtcaacgtgagttgatcatcggtgaccgtcaaacaggtaaaacaacaattgcaattgacacaattttgaaccaaaaagatcaaggtacgatttgtatctatgttgctattggtcaaaaagattcaacagtaagagcaaatgttgaaaagttaagacaagcaggcgctttagactacactattgttgtagcagcatcagcttctgaaccttctccattattatatattgcaccatattcaggtgtaacaatgggtgaagaattcatgtttaacggtaaacatgttttaatcgtttatgatgatttaactaaacaagcagcagcttatcgtgagttatcattattattacgtagacctccaggtcgtgaagcatacccaggtgacgtattctacttacatagtagattattagaaagagcagcaaaattaaacgatgacttaggtggcggttcaattactgcattaccaattatcgaaacacaagctggtgatatttcagcttatgtaccaacaaacgttatttcaattacagatggacaaatcttcttacaatctgatttattcttctcaggtgtaagaccagcgattaatgccggacaatctgtatctcgtgttggtggatctgcacaaattaaagcaatgaagaaagttgctggtacgttacgtcttgacttagcgtcatacagagaacttgaatcatttgcacaattcggttcagaccttgatgaatttactgcaagtaaattagaacgtggtaaacgtactgttgaagtcttaaaacaagatcaaaacaaaccattaccagttgaacaccaagtgttgattatttatgcattaacaaaaggatatttagatgatattccagttgtagatatcacacgttttgaagacgagttaaaccactgggcagaatcaaatgctactgaactgttaaatgaaatcagagaaactggtggcttaccagatgctgagaagtttgacacagcaattaacgaattcaaaaaaagctttagcaaatctgaa

SEQ ID NO: 4387 - DNA, 267 bp, Staphylococcus aureus
atggcaatttcacaagaacgtaaaaacgaaatcattaaagaataccgtgtacacgaaactgatactggttcaccagaagtacaaatcgctgtacttactgcagaaatcaacgcagtaaacgaacacttacgtacacacaaaaaagaccaccattcacgtcgtggattattaaaaatggtaggtcgtcgtagacatttattaaactacttacgtagtaaagatattcaacgttaccgtgaattaattaaatcacttggtatccgtcgt

SEQ ID NO: 4388 - DNA, 2088 bp, Staphylococcus aureus
atgtctcaagaaaagaaagtttttaaaactgaatgggcaggaagatctttaacgattgaaacagggcaattagctaaacaagcaaatggcgctgtattggttcgttatggagatacagtcgtgttatcgacggcaactgcatcaaaagaacctcgtgatggagatttcttcccattaacagtgaactatgaagaaaaaatgtacgctgcgggtaaaattcctggtggatttaaaaagagagaaggacgtcctggtgacgatgcaacattaactgcgcgattaattgatagaccaattagacctttattccctaaaggatataagcatgatgttcaaattatgaacatggtattaagtgcagatcctgattgttcaccacaaatggctgcaatgattggttcatctatggcgcttagtgtgtcggatattccattccaagggccaatcgccggtgtaaatgtgggttatattgacggtaaatatatcattaacccaacagtagaagaaaaagaagtttctcgtttagaccttgaagtagctggtcataaagatgcagtaaacatggtagaggcaggcgctagtgagattactgaacaagaaatgttagaggcgattttctttggtcatgaagagattcaacgtttagttgatttccaacaacaaatcgtcgaccacattcaacctgttaaacaagaatttattccagcagagcgtgatgaagcgctagttgaacgtataaaatctttaaccgaagaaaaaggacttaaagaaacagttttaacatttgataaacaacaacgagatgaaaatcttgataacttaaaagaagaaatcgtcaatgaatttatcgatgaagaagatccagagaatgaattacttattaaagaagtttatgcaattttaaatgaattagtgaaagaagaagttcgacgtttaattgcagatgaaaaaattagaccagacggccgtaaacctgatgaaatccgtccattagattctgaagttggtattttacctagaacgcatggttcaggtctatttacacgtggtcagactcaagcactttcagttttaacgttaggtgctttaggcgattatcaattaattgatggtttaggacctgaagaagaaaaaagattcatgcatcattataacttcccgaatttttcagtaggtgaaactggtccagtacgtgcgccaggtcgtcgtgaaattggacatggtgcgttaggtgaaagagcattaaaatatattattcctgatactgctgatttcccatatacaattcgtattgtaagtgaggtacttgaatcaaacggttcatcatctcaagcgtcaatttgtggatcaacattagctttaatggatgcgggcgtaccgattaaagcaccagttgctggtattgctatgggccttgttacacgtgaagatagctatacgattttaactgatatccaaggtatggaagatgcattaggtgatatggactttaaagtcgctggtactaaagaaggtattacagcaatccaaatggatattaaaattgacggtttaacacgtgaaattatcgaagaggctctagaacaagcgagacgtggtcgtttagaaataatgaatcatatgttacaaacaattgatcaaccacgtactgaattaagtgcttacgcgccaaaagttgtaactatgacaattaaaccagataagattagagatgttatcggacctggtggtaaaaaaatcaacgaaattattgatgaaacaggcgttaaattagatattgaacaagatggtactatctttattggtgccgttgatcaagctatgataaatcgtgctcgtgaaatcattgaggaaattacacgtgaagcggaagtaggtcaaacttatcaagccactgttaaacgtattgaaaaatacggtgcgtttgtaggcctattcccgggtaaagatgcgttgcttcacatttcacaaatttcaaaaaatagaattgaaaaagtggaagatgtattaaaaatcggtgacacaattgaagttaagattactgaaattgataaacaaggtcgagtaaatgcatcacacagagcatta

SEQ ID NO: 4389 - DNA, 1545 bp, Staphylococcus aureus
atgtttccagaagacgaaatgctaggtattgatattgttataccagacatttcatacgtacttgaaaataaagataaattgaagggtatattccttacacacggacatgagcacgcgattggtgcagtgagttatgttttagaacaattagatgcaccagtatatggatctaaattgacaatagcgttaattaaagaaaatatgaaagcccgtaatattgataaaaaagttcgctactatacagttaataatgattcaattatgagattcaaaaacgtgaatattagtttctttaatacgacacacagtattcctgatagtttaggtgtttgtattcacacttcatatggtgccattgtgtatacaggtgaatttaagtttgaccaaagtttacatggacattatgcaccagatattaaacgtatggcagagattggtgaagaaggcgtatttgtcttaatcagtgattctactgaggcagagaaacctggatataatactccggaaaatgtgattgaacatcatatgtatgatgcttttgcaaaagtgcgaggtcgcttgatagtttcatgttatgcttcgaactttatacgtattcagcaagttttaaatattgctagcaagctaaatcgtaaagtgtcatttttaggaagatcacttgaaagttcatttaatattgctcgtaaaatggggtatttcgacattcctaaagatttgctaattcctataacagaagttgataattatcctaaaaatgaagtgataattatagctactggtatgcaaggagaacctgtagaagccttaagtcaaatggcgcaacataagcataaaattatgaatatcgaagaaggcgattctgtatttttagcaattacggcttctgctaatatggaagttatcattgcgaatacattaaatgagcttgtacgtgctggcgcacatattattccaaataacaagaagattcatgcttcaagtcatggttgcatggaagaattaaaaatgatgattaatattatgaaacctgaatactttattcctgtacaaggtgaatttaaaatgcagatagcacatgcgaagctagcagctgaagcaggtgttgcaccagaaaagattttccttgtggaaaaaggagatgtcattaattacaacggtaaagatatgatattaaatgaaaaggtaaattcaggaaatattttaatagatggtattggtattggggatgtaggaaatatcgtgttgagagaccgtcatcttttagcagaagatggtatctttattgctgtagtaacgttagatcctaaaaatagacgtatagctgcgggacctgaaattcaatctcgtggatttgtatatgtacgtgaaagtgaagacttattacgtgaagcagaagagaaagtacgtgaaatagtagaagctggtttacaagaaaaacgcatagaatggtctgaaattaagcaaaatatgcgtgatcaaattagtaaactattattcgaaagtacaaaacgtcgtcctatgattattccagtaatttctgaaatt

SEQ ID NO: 4390 - DNA, 969 bp, Staphylococcus aureus
atgatagctgttaattggaacacacaagaagatatgacgaatatgttttggagacaaaatatatctcaaatgtgggttgaaacagaatttaaagtatcaaaagacattgcaagttggaagactttatctgaagctgaacaagacacatttaaaaaagcattagctggtttaacaggcttagatacacatcaagcagatgatggcatgcctttagttatgctacatacgactgacttaaggaaaaaagccgtttattcatttatggcgatgatggagcaaatacacgcgaaaagctattcacatattttcacaacactattaccatctagtgaaacaaactacttattagatgaatgggttttagaggaacctcatttaaaatataaatctgataaaattgttgctaattatcacaaactttggggtaaagaagcttcgatatacgaccaatatatggccagagttacgagtgtatttttagaaacattcttattcttctcaggtttctattatccactatatctagctggtcaaggaaaaatgacgacatcaggtgaaatcattcgtaaaattcttttagatgaatctattcatggtgtatttactggtttagatgcacagcatttacgaaatgaactatctgaaagtgagaaacaaaaagcagaccaagaaatgtataaattgctaaatgacttgtatttaaatgaagagtcatacacaaaaatgttatacgatgatcttggaatcactgaagatgtgctaaactatgttaaatataatggaaacaaagcactttcaaacttaggctttgaaccttattttgaggaacgtgaatttaacccaatcattgagaatgccttagatacaacaactaaaaaccatgacttcttctcagtaaaaggtgatggttatgtattagcattaaacgtagaagcattacaagatgatgattttgtatttgacaacaaa

SEQ ID NO: 4391 - DNA, 1017 bp, Staphylococcus aureus
attagaacaattggttcaatgctcatcttagtatatagcatgctagctgcatttctgttcatcgataaagtttttgtaaatatcatctattttcaaggtatgttttatacacaaatattcggaataccagtctttttatttttaaatctcatcatcattttattgtgtattattgttggttcggtactcgcttacaaaatcaatcagcaaaatgattggattaagacgcaaattgagcgttcaatggaaggcgaaacagttggcattaatgatcaaaatatagaaatatatagtgaaacgttagatttataccatacactcgtacctttaaatcaagaattgcataagttgcgacttaaaactcaaaacttaaccaatgaaaattataatattaatgatgtgaaagttaaaaagattattgaagatgaacgtcaaagactagcacgagaacttcacgattctgttagtcagcaactttttgcggcaagtatgatgctatctgctatcaaagaaacgaagttagaaccaccattagaccaacaaattccgattttagagaaaatggttcaagattcgcagttagaaatgcgtgctttgctgttacatttaagaccgcttggtttaaaagacaaatctttaggtgagggtattaaagatttagttattgatttacaaaaaaaagtgccaatgaaagttgtgcatgaaatacaagattttaaagtgcctaaaggtattgaagatcatttgttcagaattacacaggaagcaatttcgaatacattgcgtcattcaaacggtacaaaagtgacagtagaattgtttaataaagacgattatttattgttgagaattcaagacaatggtaaaggttttaatgttgatgaaaaattagaacaaagttatggacttaaaaatatgcgtgaaagagctttggaaattggtgcaacgttccatattgtatcattgccagattcaggtacacgtatcgaggtgaaagcacctttaaataaggaggat

SEQ ID NO: 4392 - DNA, 1236 bp, Staphylococcus aureus
ttgactaattacaaagaaaagttacaacaatacgctgaactattagttaaggttggtatgaatgttcaaccaaaacagccagtatttattagatcatcagtagaaacattagaattaacgcatttaattgtagaagaagcttatcattgtggcgcttcagatgtacgtgttgtatatagcgatccaaccttaaaacgcttgaaattcgaaaatgaatctgtggaacattttgctaatcatgagataaaatcatatgatgttgaagcgagaatggattacgttaaacgtggcgctgctaatctagcacttattagtgaggatcctgatttaatggatggtatagatagccaaaaattacaagcatttcaacaacaaaacgcacgcgcatttaaaggatatatggaaagtgtacaaaaaaatcaatttccatgggtcgtagctgcttttccatctaaagcttgggcgaagagagtatatcctgaactatctgtagaagaagcatatattaagtttattgacgaggtattcgatattgtgcgaattgatggtaacgatccagttgaaaattggcgtcaacacatcgctaatttaagtgtttacgctcaaaagttacagcaaaaaaattaccatgcgttgcattatgtatctgaaggtactgatttaacagtaggtttagcgaaaaatcatatctgggaagatgctacaagttatgttaacggcaaggaacaagcttttattgctaatataccaactgaagaagtatttacagcaccagatcgaaatagagtagatggatatgttactaataaattgcctttaagttataatggaacgattatcgatcaatttaaattgatgtttaaagatggagaaattattgatttttcagctgaaaaaggtgaagcggtattgaaagatttaatcaataccgatgaaggttcaagaagattaggtgaagtagctttagtacctgatgattcaccgatatcaaatcgtaataccattttttacaatactttatttgatgaaaatgcagcatgtcatttagcgattggatctgcttacgcctttaatattcaaggtggaacggaaatgactgttgaggaaaagattgcaagcggattaaatgattcaaacgtacatgtcgacttcatgattggtagtagtgatttgactatttatggcatattcgaagatggttcaaaagaactagtatttgaaaatggaaattgggca

SEQ ID NO: 4393 - DNA, 682 bp, Staphylococcus aureus
ttgcattttacacaacgagaacaagacaaattaatgattgtagtggcggcggaagttgcacgtcgtcgtaaagcacgtggtttgaaactaaatcatcctgaggcattagctttaatcagcgatgaattattagaaggtgcacgcgatggtaagaccgttgcagagttaatgagttatggtagacaaattctaaacaaagaagatgtcatggatggtgtcgaacacatgattacagatatcgaaatcgaggctacgttccccgatggcactaagttaatcacagtacatcaccctattgtttaaaggaggcagtcaaatgataccaggagaaattattacaaaaagtacagaggttgaaattaataaccatcatcctgaaacagttatcgaagttgaaaatacaggagatcgaccaattcaagtgggctcacattttcatttttatgaagcaaatgcagcattagatttcgaacgcgaaatggcatatggaaaacatttagatattccagctggagcagctgttcgatttgaacctggggataaaaaagaagttcaattagttgaatatgctggcaaacgtaaaatttttggttttcgtggtatggtcaatggtcctatcgatgagtcacgtgtctatcgcccaactgatgaaaatgatgaatatgcaggtgtattcggagat

SEQ ID NO: 4394 - DNA, 612 bp, Staphylococcus aureus
gtggcaaacccgattaaaattggtattggtggtcctgtaggtgcaggtaaaacacaattaattgaaaaagttgtaaaacgtctttcaaaagaaatgagtatcggcgttattacaaatgatatatatacaaaagaagacgaaaagatattagtaaattcaggagttctacctgaaagtcgtatcattggtgttgaaactggtggatgtcctcatactgcgattcgtgaagatgcatctatgaactttgcagcaatagacgaattattagaacgtcatgacgatatagaactaattttcatagaatctggtggcgataacttagcagcaacatttagtccagaacttgttgacttttcaatttatattatcgatgttgctcaaggtgaaaagattccacgtaaaggtggtcaaggtatgattaagtcagatttctttgtaattaacaaaactgatttagctccctatgttggtgcatcattagaacaaatggctgaagatactaaagtatttcgtggtaaacgtccatttacttttactaacttaaaaaccgacgaaggtttggatgaagttatcgattggattgaacgcgacactttactcaaaggattatca

SEQ ID NO: 4395 - DNA, 588 bp, Staphylococcus aureus
atgtatgacacttaccattccggttggatagaatgtattacaggtagtatgtttagcggtaaatccgaagaacttataagacgtttaagaaggggcatatacgctaaacaaaaagtcgttgtatttaaaccggcgattgatgatcgatatcataaagaaaaagtggtctctcataatggtaatgccattgaagcgattaatatttctaaagcaagtgaaattatgacacacgacttaactaatgttgatgttataggaatagacgaagtgcaattttttgacgatgaaattgtaagtatagtagaaaaactatcagcagatggacaccgtgttattgttgctggattagatatggattttaggggcgaaccgttcgaaccaatgcctaaattgatggctgtcagtgaacaagtaacgaaacttcaagcagtttgtgctgtttgtggttcttcatctagtagaacgcaacgattaataaatggtaaaccagctaaaatcgatgatccgattatcttagtaggtgccaatgaaagttatgagccacgttgtcgcgcgcaccatatcgtagcacctagtgataataataag

SEQ ID NO: 4396 - DNA, 1236 bp, Staphylococcus aureus
atgtcttatatcaccaagcaagataaagttatcgcagaagcaatcgagagagaatttcagagacaaaatagcaacatagagttaatcgcatcggaaaattttgtatcggaagcggttatggaagcacaaggttcagtgttgactaataagtatgctgaaggctatccaggacgccgatattatggtggctgtgagtttgtagatgtaactgaaagcatcgcaattgatcgtgctaaagcattgtttggagctgaacatgtcaatgttcaaccacattcaggttcacaagcgaacatggctgtttacttagttgcattagaaatgggcgacacagttttaggtatgaatttgagtcatggtggtcacttgacacatggagcgcctgttaattttagtggtaaattctacaatttcgttgaatatggagtagataaagacacagaacgaatcaattatgatgaagttcgtaaattagcgttagagcataagcctaagcttattgtggcaggagcatcagcatattcaagaacaattgacttcaaaaagtttaaagaaatcgcagatgaagtaaacgctaagttaatggtagacatggcacatattgcaggattagtagcggcaggtttacatccaaatccagtagaatatgctgattttgtaacaactactacacacaaaacattacgcggaccacgtggtggtatgattttatgtaaggaagaatataaaaaagacatagataaaacaattttccctggtattcaaggtggacctcttgagcatgttattgcagcaaaagcagttgcttttggagaagcgttagaaaataatttcaaaacgtatcaacaacaagtggttaaaaacgcaaaagttcttgcagaagcattaattaatgaaggatttagaattgtttctggcggtacagataatcacttagtagctgttgatgtaaaagggtctataggacttactggtaaagaagctgaagagactttagattcagttggtatcacatgtaacaaaaataccattccgttcgatcaagaaaaaccttttgtaacgagtggtatacgtttaggtacacctgctgcaacaacgcgtggatttgatgaaaaagcttttgaggaagttgcaaaaatcatcagtttagcattgaaaaatagtaaagatgaagaaaaattacaacaagctaaagaacgcgttgcgaaattaacagctgaatatcctctatatcaa

SEQ ID NO: 4397 - DNA, 627 bp, Staphylococcus aureus
atgagtaaagtacacgttttcgatcatccattaattcaacacaaactaagctatattagagatgtaaatacaggtactaaagaatttagagaacttgtagacgaagttggtatgttgatggcatatgaagtaactagagacttagagcttcaggatgttgatattgaaacgcctgtaactaaaatgacggctaaacgattagctggtaaaaaattagctatcgttccaattttaagagctggtttaggtatgactgatggtattttaagtttagtacctgcagcaagagttggacatatcggtttgtatcgagatcccgaaacattaaaggctgtagagtattttgctaagctacctcaagatattactgaaagacaaatcattgttgttgatcctatgttagcaacaggcgcatcagcaattgaagctattacttcattgaagaaacgtggcgctaaaaatattcgcttcatgtgtttaattgcagcaccagaaggcgtagaaaagatgcatgaagcacatccagatgtagatatttatattgctgcacttgatgaaaagctaaatgacaaagcatatatcacaccagggttaggcgacgctggagatagattgtttggtactaaa

SEQ ID NO: 4398 - DNA, 1128 bp, Staphylococcus aureus
aagattatgaccatatttggaacaaggcccgaagccataaagatggctcctttagttaaagctttggaacaagaaaaaatgctcgagccaattgttgttgttacagcacagcatagagaaatgcttgattcagtattaagtacctttgaaatcaaaccaaaatacgatttgaatattatgaaatcaggacagacactttctgagataacttctaaatcaatcactcaattagaacaagtgattcaattagaaaaaccagacatggtacttgtacatggtgatacgatgacgacatttgcaggtggtttaacggcattttataaccaagtgccgattggacacgttgaagcagggcttagaagttatgataaatattcaccttttccggaagaggtgaatagacaattagttggtgtattagctgacttacattttgcacctactaaaaatgctgcatcgcatttgttaagtgaagggaaatattcagaaagtgttgttgtcactggtaatacagcgattgatgctatgaaatatacagttgatgacaattataaatctaacattatggataaataccatgacaaaaaattcattcttatgacagcacaccgacgagaaaatatcgggcaacccatggaaaatatatttaaagcggttagacgcttaatagatgaatatactgatttagcactagtatatccaatgcataaaaacccgaaagttcgagaggtggctcaaaagattttaggtagtcatgacagaattgaattgattgaacctttggacgtagtagatttccataattttgctaaaaaatcttattttattttgacagattcaggtggaattcaggaagaagcgccatcatttaataagccagttttagttttgcgaagcgttacagaacgtcctgaaagtgttgaagctggcacattaaaagtcattggaccaaataagcaaaatgtgtatcaagctgcaaaagaattaatcgatgatgagagattatatcatcaaatgtctgaagcatctaatccttacggtgatggatttgcttcagaaagaatagttaatcatattaagtattatttgaatttaatcactgaaaaaccaagcgatttctgaggaaaa

SEQ ID NO: 4399 - DNA, 480 bp, Staphylococcus aureus
atgtttcattttataattatggtggtatataacatgaattataacatattggaggttaaggaaatgccctttacaatgaaaggttaccccgaaaaatggaaagaatttgaagtaattaaacggcaaaaagcgatagaaattgcgaatgcaatgttaaaagaaggatatcttgaaaaagatgttgttcctattgcggcgaaaaaagcgaaagattggtatcgagcgttatcgaaagaagaaatcaaagcattagaagaagagaacttcgtacaattccatacagcaacaatggaaaaaacagaggtggatagtgaatatgcaacaactgataatgaagaacatattcaagaacaatcaaatcaagataaatcgtactttgatagcgaatcaattggcaaccaaagtggtggcgttcgacaaagagaaccgcttatggatggtccacatccaaaagttgtggaatcatttaaagacgtataa

SEQ ID NO: 4400 - DNA, 708 bp, Staphylococcus aureus
atgtcgtgtaatgaaggagtggctttgatgatgtatggatatccagagaaatggttggaaggtatgacaactggagaaagtatcgcagcagaattacgcttaggcattgtgaatggtcacatagctgaaggtacgttactcactgaaaatcaaatggcaaagcaatttaatgtgagtcgttcgccaattcgagatgcatttaaattattgcaacaaaatcaactcatccaattagaaagaatgggtgcacatgtgttgccgtttggggaacaagaaaagaaagaaatgtacgatttgcgactgatgttagagtcatttgcattttcaagagttaaaaatcaagagcgactacctatcgtaaaagaaatgaagaaacaacttgaaatgatgaaagtggcagtaaaatttgaggatgcagaatcatttacgaagcatgactttgaatttcatgaaacattaatcaaagcatctaatcatcaatatttaaactcattttggagtcatttaaaaccagtaatgatggcactcgttttaacatccatgcgacaacgtatgcaacagaacccgcaagattttgaacgcatacatcataatcatcaagtgtttattgatgcagtggaacaatacgacagtcaaattttgaaagaagcgtttcacttaaatttcgacgatgttggtaaagatattgaaggattttggttgaattaa

SEQ ID NO: 4401 - DNA, 2937 bp, Staphylococcus aureus
atgatcgttgttgggatgggacaagataaagaagctgcagcatcagaacaaaagacaactacagtagaagaaaatgggaattcagctactgataataaaacaagtgaaacacaaacaacggcaactaacgttaatcatatagaagaaactcaatcatataacgcaacagcaacagaacaaccgtcaaacgcaacacaagtaacaactgaagaagcaccaaaagcagtacaagcaccacaaactgcacaaccagcaaatttagaaacagttaaagaagaggtagttaaggaagaagcgaaacctcaagttaaggaaacgacacaacctcaagacaatagcggagatcaaaaacaagtagatttaacacctaaaatggctacacaaaatcaagcagcagaaacacaagttgaagtggcacagccaagaacggtatcagaaagtaatccacgtgtgacaagatcagcagatgtagttgaagctaaggaagctagtgacgcgaaagtggaaacgggtacagatgtgacaagtaaagttacagtagagagtggttctattgaggcacctcaaggaaataaagtagaaccgcatgctggtcaacgtgtcgtattgaaatacaaattgaaattcgaaaagggtttacacaaaggggattattttgatttcaccttgtctaataatgtaaatacttatggagtttcaacagctagaaaagtaccagaaatcaaaaatggttcagtcgtaatggcgacaggacaacttcttggaaatgggaaaattaggtatacatttacagattatattgattataaagtaaatgtgactgctgatttagaaatcaatttatttattgaccctaaaactgtacaaagcaatggacaacaaacaataacttcaacgttgaatgataaggaaacaaaaaacacattgccaatagaatataatccaggagtaagtaatagctatgctaatgtaaatggttctattgaaactttcgataaaggaaataatagattcactcatgtggcttacataaagccacaaaatgggcataaatcagatagcgtttcaattactggtacattaactcaaggtagtaaagcagatgggaaggctcctactgtaaaagtatatgaagttttaaaggatgctaatgaattaccacaaagtgtatacgcaaatgtatcagattcttcaatgtttaaagatgtaactgaggaaatgaaagataaattaaaagtagaaaataatgggaactataaattagatattgaaaaattagaaaaaagttatgttatacactatgacggtgaatacttaagtgggtcagatcaagtgaacttcagaacacacatgtttggatatccagaacagcagtataagtattactatactcatttaggatacaaacttacatgggataatggcttagttttatatagtaataaagcaaaaggcgatggcacaaatggaacaataacagaatcgaataatatgacatttgatgaagaatatggaactggagttattacaggtcaatatgataagaatttagtaactactgttgaagaagaatatgattcttcaactcttgacattgattaccacacagctatagatggtgaaggtggttatgttgatggatacattgaaacaatagaagaaacggattcatcagctattgatatcgattaccatactgctgtggatagcgaagcgggtcacgttggaggatacactgaatcctctgaggaatcaaatccaattgactttgaagaatcgacacatgaaaattcaaaacatcacgctgatgttgttgaatatgaagaagatacaaacccaggtggtggtcaagtaacaactgagtctaacttagttgaatttgacgaagagtctataaaaggtattgtaactggcgcagtgagcgatcatacaacagttgaagatacgaaagaatatacaactgaaagtaatctgattgaactagtagatgaactacctgaagaacatggtcaagcacaaggaccaatcgaggaaatcactgaaaacaatcatcatatttctcattctggtttaggaactgaaaatggtcacggtaattatggcgtgattgaagaaatcgaagaaaatagccacgttgatattaagagtgaattaggttatgaaggtggccaaaatagcggtaaccagtcattcgaggaagacacagaagaagacaaacctaagtatgaacaaggtggtaatatcgtagatatcgatttcgacagtgtacctcaaatccaaggtcaaaataatggtaaccagtcattcgaagaagatacagagaaagacaagcctaagtatgaacaaggtggtaacatcattgatatcgatttcgacagtgtgccacaaattcatggattcaataaacataatgaaattattgaggaagatacaaataaagataagccaaattatcaattcggtggacacaacagtgttgattttgaagaagatacacttccaaaagtaagcggtcaaaacgaaggtcaacaaacgattgaagaagatacaacgccgccaacgccaccgacaccagaagtaccgagtgagccaggcgaaccaacgccgccaactccagaggtaccaagtgagccggaaacaccaacaccgccaacgccagaggtaccagctgaacctggtaaaccagtaccaccagccaaagaagaacctaaaaagccttctaaaccagtggaacaaggtaaggtagtaacacctgtcattgaaatcaatgaaaaggttaaagcagtggcaccaactaaacaaaaacaatctaagaaatctgaactacctgaaacaggtggagaagaatcaacaaacaaaggtatgttgttcggcggattattcagcattctaggtttagcattattacgcagaaataaaaagaatcacaaagcataa

SEQ ID NO: 4402 - DNA, 594 bp, Staphylococcus aureus
atggaacatatttttagagaaggacaaaatggtgcgccgacgctaatattattgcatggtacaggtggtgatgagttcgatttattaccattaggcgaagcattgaatgaaaattatcacttgttaagtattagaggacaagtttcagaaaatgggatgaaccgttatttcaaacgtcttggtgaaggtgtttatgatgaagaagatttggcatttcgtggacaagaattgttaacgttcattaaagaagctgctgaacgttatgattttgatattgaaaaggctgtgcttgttggattttcaaatggatcaaatatagcgattaacttaatgttgcgttcagaagcaccatttaaaaaagcattgttatatgcaccattatatccaattgaagtaacgtcaacaaaaaatttatcagatgtcagtgtgttgctttctatggggaaacatgatccaattgtgccattagctgcaagtgaacaagtcattaacttgtttaagacacgtggggcacaagtcgaagaagtttgggtgaatgatcatgaaattacagaaactggattaacggctggtcaacaattacttgggaaataa

SEQ ID NO: 4403 - DNA, 435 bp, Staphylococcus aureus
atggatcgaacgaaacaatcgctcaatgtctttgtcggaatgaatagggcgttagacacattagagcaaattacaaaagaagacgtaaagcgatatggcttaaatattactgaatttgcagtgctagagttgctttataataaaggtccgcaaccaattcaacgtattagagaccgcgtattaattgcaagtagcagcatttcatatgttgtaagtcaattagaggacaaaggttggattacacgtgaaaaggataaagatgataaacgtgtatatatggcttgtttaactgaaaaaggtcaaagtcaaatggcagatattttccctaagcatgctgagacattaacaaaagcgtttgatgtgttaacaaaggatgaattaacaatcttacaacaagcgtttatgaaactaagtgcacaatctacagaagtgtaa

SEQ ID NO: 4404 - DNA, 927 bp, Staphylococcus aureus
ttaatagttgccttatttttagttgcagcttgtggtaatacggataattcaagtaaaaaagaatcatcaactaaagatactatttcggtaaaagatgaaaatggtacagtaaaagtacctaaagatgcaaaacgtatcgttgtattagagtactcatttgcagatgcattagcagcattagacgttaaaccagttggtattgctgatgatggtaagaaaaaacgtatcattaaaccagttagagaaaaaattgggaattatacttctgtaggtacacgtaaacagccaaacttagaggaaattagtaaattaaaaccggatttaattatcgctgatagcagtagacataaaggtattaataaagaattaaacaaaattgcaccaacattatcattaaagagttttgatggagactacaaacaaaacattaattcgttcaaaacaattgctaaagctttaaataaagaaaaagaaggcgaaaagcgtcttgctgaacatgataaattaatcaaaaagtataaagatgaaattaagtttgatagaaatcaaaaagtgcttccagcagttgttgctaaagctggtttattagcacatccaaactattcatatgttggacaatttttaaacgaacttggatttaaaaatgcattaagtgatgatgtaacaaaaggtttaagtaaatacttgaaaggaccttacttacaattagatactgaacatttagctgacttaaatcctgaacgcatgattattatgacagataatgctaaaaaagattctgctgaattcaagaagttacaagaagatccaacttggaaaaagttgaacgcagttaaaaataatcgcgtggatattgttgaccgtgatgtttgggcaagatctcgtggcttaatttcttctgaagaaatggctaaagaacttgttgaa

SEQ ID NO: 4405 - DNA, 906 bp, Staphylococcus aureus
atgagtaaaacagcaattatttttccgggacaaggtgcccaaaaagttggtatggcacaagatttatataacaacaacgatcaagcaactgaaattttaacttcagcagcaaacacgttagactttgatattttagagacaatgtttactgacgaagacggcaaattgggtgaaactgaaaacacgcaaccagctttattgacgcatagctcggcgttattagcggcgctaaaaaatttgaatcccgattttactatggggcatagtttaggtgaatattcaagtttagttgcagctgacgtattatcatttgaagatgcagttaaaattgttagaaaacgtggtcaattaatggcgcaagcatttcctactggtgtaggaagcatggctgcagtattgggcttagattttgataaagtcgatgaaatttgtaagtcattatcatctgatgacaaaataattgaaccagcaaacattaattgcccaggtcaaattgttgtttcaggtcacaaagctttaattgatgagctagtagaaaaaggtaaatcattaggtgcaaaacgtgtcatgcctttagcagtatctggcccattccattcatcgctaatgaaagtgattgaagaagatttttcaagttatattaatcaatttgaatggcatgatgctaagtttcctgtagttcaaaatgtaaatgcgcaaggtgaaactgacaaagaagtaattaaatctaatatggtcaaacaattatattcaccagtacaattcattaactcaacagaatggctaatagaccaaggtgttgatcattttattgaaattggtcctggaaaagttttgtctggcttaattaaaaaaataaatagagatgttaagttaacatcaattcaaactttagaagatgtgaaa

SEQ ID NO: 4406 - DNA, 738 bp, Staphylococcus aureus
atgaaaatgactaagagcgctttagtaacaggtgcatcaagaggaattggacgtagtattgcgttacaattagcagaagaaggatataatgtagcagtaaactatgcaggcagcaaagaaaaagctgaagcagtagtcgaagaaatcaaagctaaaggtgttgacagttttgcgattcaagcaaatgttgccgatgctgatgaagttaaagcaatgattaaagaagtagttagccaatttggttctttagatgttttagtaaataatgcaggtattactcgcgataatttattaatgcgtatgaaagaacaagagtgggacgatgttattgacacaaacttaaaaggtgtatttaactgtatccaaaaagcaacaccacaaatgttaagacaacgtagtggtgctatcatcaatttatcaagtgttgttggagcagtaggtaatccaggacaagcaaactatgttgcaacaaaagcaggtgttattggtttaactaaatctgcggcgcgtgaattagcatctcgtggtatcactgtaaatgcagttgcacctggttttattgtttctgatatgacagatgctttaagtgatgagcttaaagaacaaatgttgactcaaattccgttagcacgttttggtcaagacacagatattgctaatacagtagcgttcttagcatcagacaaagcaaaatatattacaggtcaaacaatccatgtaaatggtggaatgtacatg

SEQ ID NO: 4407 - DNA, 219 bp, Staphylococcus aureus
gaaaatttcaataaagtaaaagatatcatcgttgaccgtttaggtgtagacgctgataaagtaactgaagatgcatctttcaaagatgatttaggcgctgactcacttgatatcgctgaattagtaatggaattagaagacgagtttggtactgaaattcctgatgaagaagctgaaaaaatcaacactgttggtgatgctgttaaatttattaacagt

SEQ ID NO: 4408 - DNA, 714 bp, Staphylococcus aureus
gtgaagcaaaagaagtttatgaagatttatgaggcgttgaaagaagatatattaaacgggcagattcaatatggtgaacaaattccgtctgaacatgatttggtgcaattgtaccagtcatctcgagagaccgtgcgtaaggcattagatttgttggcattagacggtatgattcaaaagattcatggtaaagggtcacttgtcatttatcaggaggttacagagtttccattttctgaacttgttagttttaaagaaatacaagaagaaatgggtgtcgcatatttaactgaagttgttgtgaatgaggttgttgaagcgcatgaagttccagaagttcaacatgctttaaacatcaattctagtgaatcactcattcatattgttagaactcgtcggcttaaccaacatgtgaagattgttgatgaagattattttctaaagtcgattgtttcagatataggtaatgatgttgcgagtgattctatttatgattatttggaaaaggtattaaatcttaatattagttattcaagtaagtctattacttttgaaccgtttgatgaacaagcatatcaattgtttggggatgtatcggtggcttattcagcaacagttcgaagtattgtgtatttagaaaatacaatgccgtttcaatataatatttcaaaacatcttgcaaatgaatttaaatttaatgacttctcaagacgt

SEQ ID NO: 4409 - DNA, 1689 bp, Staphylococcus aureus
ttgaattatcaagccttatatcgtatgtacagaccccaaagtttcgaggatgtcgtcggacaagaacatgtcacgaagacattgcgcaatgcgatttcgaaagaaaaacagtcgcatgcatatatttttagtggtccgagaggtacgggaaaaacgagtattgccaaagtgtttgctaaagcaatcaactgtttaaatagcactgatggagaaccttgtaatgaatgtcatatttgtaaaggcattacgcaggggactaattcagatgtgatagaaattgatgctgctagtaataatggcgttgatgaaataagaaatattagagacaaagttaaatatgcaccaagtgaatcgaaatataaagtttatattatagatgaggtgcacatgctaacaacaggtgcttttaatgcccttttaaagacgttagaagaacctccagcacacgctatttttatattggcaacgacagaaccacataaaattcctccaacaatcatttctagggcacaacgttttgattttaaagcaattagcctagatcaaattgttgaacgtttaaaatttgtagcagatgcacaacaaattgaatgtgaagatgaagccttggcatttatcgctaaagcgtctgaagggggtatgcgtgatgcattaagtattatggatcaggctattgctttcggcgatggtacattgacattacaagatgccctaaatgttacgggtagcgttcatgatgaagcgttggatcacttgtttgatgatattgtacaaggtgatgtacaagcatcttttaaaaaatatcatcagtttataacagaaggtaaagaagtgaatcgcctaataaatgatatgatttattttgtcagagatacgattatgaataaaacatctgagaaagatactgagtatcgagccctgatgaacttagaattagatatgttatatcaaatgattgatcttattaatgatacattagtgtcgattcgttttagtgtgaatcaaaacgttcattttgaagtgttgttagtaaaattagctgagcagattaagggtcaaccacaagtgattgcgaatgtagctgaaccagcacaaattgcttcatcgccaaacacagatgtattgttgcaacgtatggaacagttagagcaagaactaaaaacactaaaagcacaaggagtgagcgtcgctcctactcaaaaatcttcgaaaaagcctgcgagaggcatacaaaaatctaaaaatgcattttcaatgcaacaaattgcaaaagtgctagataaagcgaataaggcagatatcaaattgttgaaagatcattggcaagaagtgattgatcatgccaaaaacaatgataaaaaatcactcgttagtttattgcaaaattcggaacctgtggcggcaagtgaagatcacgtacttgtaaaatttgaggaagagatccattgtgaaatcgtcaataaagacgacgagaaacgtagtagtatagaaagtgttgtatgtaatatcgttaataaaaacgttaaagttgttggtgtaccatcagatcaatggcaaagagttcgaacggagtatttacaaaatcgtaaaaacgaaggcgatgatatgccaaagcaacaagtacaacaaacagatattgctcaaaaagcaaaagatcttttcggtgaagaaactgtacatgtgatagat

SEQ ID NO: 4410 - DNA, 315 bp, Staphylococcus aureus
atgcgcggtggcggaaacatgcaacaaatgatgaaacaaatgcaaaaaatgcaaaagaaaatggctcaagaacaagaaaaacttaaagaagagcgtattgtaggaacagctggcggtggcatggttgcagttactgtaactggtcataaagaagttgtcgacgttgaaatcaaagaagaagctgtagacccagatgatattgaaatgctacaagacttagtgttagcagctactaatgaagcgatgaataaagctgatgagcttactcaagaacgtttaggtaaacatactcaaggcttaaacatccctggaatg

SEQ ID NO: 4411 - DNA, 594 bp, Staphylococcus aureus
atgcattatccagaacctatatcaaagcttattgatagctttatgaaattgccaggcattggtccaaagacagcccaacgtctggcttttcataccttagatatgaaagaagacgatgttgttcagtttgccaaagcattagtagatgttaagagagaattaacatattgtagcgtatgtggtcacattactgaaaatgatccatgttatatttgtgaagataagcaaagagatcgttcagttatttgtgttgtggaagatgacaaagatgtcatagctatggaaaaaatgagagaatacaaaggtttatatcacgttttacatgggtctatttcgcctatggatggaattggaccagaagatattaatattccttcattgattgaacgcttgaaaaacgatgaagttagcgaattaatcttagctatgaacccgaacttagagggggaatctacagccatgtatatttctagattagttaagcctataggtatcaaagtgacgagattagcacaagggttatcggtaggtggcgatttagagtatgctgacgaagtaacattatctaaagcaatcgcaggtagaacagaaatg

SEQ ID NO: 4412 - DNA, 1098 bp, Staphylococcus aureus
atggtatatagtgccagtatggttccagcaactaaaggcacattgactggtggtatcgatgttccaggaacgtatttttacaaccgacaattagcatatgtcataatgagttttataattgtattttttattgcatttttaatgaatgttaaattactgagtaatattaaagtgcaaaaaggtatgattataactatcgtctcgctattattactgacgttagtaatcggtaaagatattaatggttctaaaagttggataaacttaggatttatgaacttacaggcatctgagttattaaaaattgcaatcatattatatatcccatttatgatcagtaaaaaaatgcctagagtattaagtaaaccaaaattaattttaagtcctattgtattagcattaggttgtacgtttttagttttcttacaaaaagacgtagggcaaacattactaatattaattattttagttgcgattattttttattcaggaattggggtaaacaaagtcctaagatttggtataccagcagtgctaggattcttagtagtatttgtcattgcattaatggctggttggttaccaagttatttaactgccagatttagtacgctaacagatccattccaattcgaatcaggaactggataccatatttccaattcattgcttgcgataggtaacggtggcgtatttggaaaaggattaggaaatagtgcaatgaaattgggctatttaccagaaccacatacagattttatttttgcaattatttgcgaagaattaggtttaatcggaggattgctagttattactttagagttctttattgtatatcgtgccttccagtttgcaaataaaacatcatcatatttttataaacttgtgtgtgttgggattgccacatattttggaagccaaacgtttgtaaacattggcggtatttcggcaacaattccattaactggtgtgccattgccatttatcagctttggtggatcatcaatgattagtttaagtattgctatgggattacttctgattgtaggtaaacaaatcaaagtagaccagcaacgaaagaaacaacagcaaaaagtt

SEQ ID NO: 4413 - DNA, 3441 bp, Staphylococcus aureus
aaacaaataaaaaagttacttgttgctaaccgtggagaaattgcaattcgtatattcagagcggcagcagaattagacatcagcacagttgcaatttattcgaatgaagacaaaagttcattacatagatataaagcagatgaatcctatttagttggaagtgatttaggtcctgctgaaagttatttaaatattgagcgtatcattgatgtagcaaaacaagcgaatgtggatgcgattcatcctggctatggatttttaagtgaaaatgaacaatttgcgcgtcgttgtgcagaagaagggattaaatttattggtcctcatttagaacatttagatatgtttggagataaagttaaagctcgtacaacggctatcaaggcagatttaccagttattcctggtacagacggtccaattaaatcatatgaattagcaaaagaatttgcagaagaagctggtttcccgctaatgattaaagccacaagtggtggcggcggtaaaggtatgagaatcgttcgtgaagaaagtgaattagaagatgctttccatagagcaaaatcagaagcagaaaaatcatttggtaatagtgaagtttacatagaaagatacattgataatccaaagcatattgaagtacaagtcataggtgacgaacatggaaatatcgtacacttatttgaacgtgattgttcagtacaacgtcgtcatcaaaaagttgtagaagttgcaccatcagttggattatcaccaacattacgtcaacgtatttgtgatgctgcaattcaattgatggaaaatattaaatatgtcaatgcaggtactgttgaatttctagtatctggtgacgaattcttctttatagaagttaaccctcgtgtacaagtagagcatacaattacagagatggtaacaggaattgatattgttaagacacaaattttagttgcagcaggtgccgatttatttggtgaagaaattaatatgccgcaacaaaaagatattacaacattgggctatgccatccaatgtcgtattacaacagaagatccgttaaatgatttcatgccggatactggaacaatcattgcttatcgttcaagcggtggctttggtgtacgtcttgatgctggagatggtttccaaggtgctgagatatcaccttattatgattcattactcgtaaaattatctacacatgcgatatcatttaaacaagcagaagaaaaaatggtacgttcattacgagaaatgcgtattcgtggtgttaaaactaatattccattcttaattaatgtaatgaagaataaaaagttcacaagtggtgattacacaactaaatttattgaagaaacaccagaacttttcgacattcagccgtctctagatagaggtactaaaacattagaatatataggtaatgtaacaattaatggtttcccaaatgttgagaaacgtccgaaaccagactatgaattagcatcaattccaactgtatcttcaagtaaaatcgcttcatttagtggtacgaaacaattgcttgatgaagtaggtccaaaaggtgtagctgaatgggttaaaaagcaggatgatgtcttactaacagatacaacctttagagatgcacaccaatcattattagctacacgagttagaactaaggatatgattaatatcgcatccaaaacagcggacgtatttaaagatggtttctcactagaaatgtggggcggtgctacatttgatgtggcatataatttcttgaaggaaaacccatgggaacgacttgaacgtctacgtaaagctattccaaatgtattattccaaatgttgttacgtgcttcaaacgcagttggttataaaaactatcctgataatgttattcataaattcgtacaagaaagtgctaaagcaggcatagatgtctttagaattttcgattcattaaactgggtagatcaaatgaaagttgccaatgaagcagtacaagaagcgggcaaaatctcagaaggtactatttgttatacaggtgacattttaaatcctgagcgatcaaacatttatactttagagtattatgtcaaactagctaaagagttagaacgtgaaggtttccatattttagcgattaaagatatggcaggcttattaaaacctaaagctgcttacgaattgattggtgagttaaaagcagctgtagatttaccaatccatcttcacactcatgatacaagtggtaatggtttattaacgtacaaacaagcaatagatgctggtgtcgatatcattgatactgctgttgcttcaatgagtggtttaacaagtcagccaagcgccaattcgttatattatgcattaaatggcttcccacgtcaccttagaactgatattgaaggtatggagtcacttagtcattattggtcaactgtacgtacttattattcagactttgaaagtgatatcaaatcaccgaatactgaaatttatcaacatgaaatgcctggtggacagtattcgaatttaagtcaacaagctaaaagtttaggtttaggcgaaagatttgatgaagtcaaagatatgtatcgcagagtgaatttcttatttggtgatatcgtaaaagtaacgccatcgtctaaagtagttggtgatatggcactttatatggtacaaaatgatcttgatgaacaatccgtgattacagatggctataaattagatttcccagaatcagtagtgtcgttcttcaaaggtgaaataggacaacctgtaaatggttttaataaagatttacaagcggttattttaaaaggccaagaagcactaacagctcgtccaggtgaatatctagagccggttgattttgaaaaagtccgtgagttgcttgaagaagagcaacaaggtcctgttacggagcaagatattattagttatgtattatatccaaaagtatatgaacaatatattcaaactagaaatcaatacggaaacttatcgttacttgatacgcctacattcttctttggaatgcgtaatggtgaaacagtagaaatcgaaatcgataaaggtaaacgattaattattaaactagaaacgattagtgaaccagatgaaaatggtaatagaacgatttactatgcgatgaatggtcaagcgagacgtatttatattaaagatgaaaatgtgcatacaaatgcgaacgttaagccaaaagcagataagagtaatccaagtcatatcggtgcgcaaatgccaggttcagtaactgaagtcaaggttagtgtaggtgaaactgtgaaagctaatcagccgttgctaattactgaagctatgaaaatggaaacaacaattcaagcaccatttgacggtgtgattaaacaagtaactgtaaataatggtgatacaatagcgacaggcgatttattaatcgaaattgaaaaagca

SEQ ID NO: 4414 - DNA, 1194 bp, Staphylococcus aureus
caattttcaagacgtacatttttgaaaatgttaggtattggcggtgccggtgttgcaattggcgcaagtggtgttggtagcatgtggtctttcaaatcaatgttcaatacaccagaagatccggaaaaagatgcgtatgaattttatggtaaagtgcaaccaggcattaccacaccaacgcaaaaaacatgcaatttcgttgcgttagatttgaagtcaaaagatagagatgcaattaaggcaatgtttaaaaagtggacggttatggctgatcgtatgatggatggtgatacagttggcaagacgagtaacaatcctttaatgccaccagtagataccggtgaatcgataggattaggtgcaagcaagttaacgattacctttggaattagtaagtctttgatgaagaaaattgggttatctagtaaaattcccgatgcctttaaagatttaccgcattttccgaatgatcagttaatagacgattacagcgatggtgatattatgattcaagcatgctcaaatgattcgcaagtatcctttcatgcggttcataatttagttcgtccatttcgagatattgttaaggtacgttggtcgcaatctggttttatctctgctaaaggtaaggaaacacctagaaatttaatggcatttaaagatggaacaattaatcctagaaagagtaatcaacttaaagattatgtgtttattgatgacggatgggcgaaacatggaacttattgtgttgtcagacgtattcaaatacacattgaaacgtgggatcgtactgcactggaagaacaagaggctacatttggtcgcaagcgacatagtggtgcaccgttaacaggtgggaaagagtttgatgaaattgacttaaaagcgaaagatagtcatggcgagtatattattgataaagatgcccatacgagactagcgaaagaagcaaatacgtcaattttacgtagagcctttaattatgttgatggtacggatgaccgcacaggtaacttcgaaacaggcttgttgttcattgcttttcaaaaagcgacccaacaatttatcgatattcaaaacaatttaggtagtaatgataagttaaatgaatacattacacatagaggttctgcttcatttttagtattaccaggtgttagtaagggaggataccttggtgaaacattatttgac

SEQ ID NO: 4415 - DNA, 1980 bp, Staphylococcus aureus
ataggtaaaataataaatgaacgatataaaattgtagataagcttggcggcggcggcatgagtaccgtttatcttgcagaagatacgatacttaacattaaagttgcaattaaggcgatttttataccacctagagaaaaagaagaaacattaaaacgttttgaacgcgaagtacataactcatcacagctatcacatcaaaatatagtaagtatgatcgatgttgatgaagaagatgactgttactacttagtaatggaatatattgaaggtccgactttgtctgagtatatagaaagtcatgggccattaagtgttgacacggcgattaattttacgaatcaaatattggatggcattaaacatgcgcatgatatgcgtattgtacatagagatattaagccacaaaatatattaattgacagcaataaaacgttgaaaatatttgattttggaattgctaaagctttaagtgagacgtctttaactcagactaatcatgtgttaggtactgtgcagtacttttcgccagaacaagcaaaaggtgaggcaacggatgaatgtacagatatttattctataggtattgtgttatatgaaatgcttgttggtgaaccaccatttaatggagaaactgcagttagcattgcgattaaacatattcaggattctgtgccaaatgtgacaacagatgtacgtaaggatattccgcaatctttaagtaatgtcattttacgcgctacagaaaaagacaaagcgaatcgttacaaaacgattcaagaaatgaaagatgatttgagtagtgttttacatgaaaatcgagcgaatgaagacgtctatgaactcgataaaatgaaaacgatagcggtacctttgaaaaaagaagatctagcaaagcatattagtgaacataagtcgaatcaacctaaacgtgaaacgacgcaagtacctattgtaaatgggcctgctcatcatcagcaattccaaaagccagaaggtatgttgtatgaaccaaaacctaaaaagaaatcaacacgaaagattgtgctcttatcactaatcttttcgttgttaatgattgcacttgtttcttttgtggcaatggcaatgtttggtaataaatacgaagagacacctgatgtaatcgggaaatctgtaaaagaagcagagcaaatattcaataaaaacaatctgaaattaggtaaaatttctagaagttatagtgataaatatcctgaaaatgaaattattaagacaactcctaatacaggtgaacgtgttgaacgtggtgacagtgttgatgttgttatatcaaaaggccctgaaaaggttaaaatgccaaatgtcattggtttacctaaggagcaagccttgcagaaattaaaatcgttaggtcttaaagatgttaagattgaaaaagtatataataatcaagcgccaaaaggatacattgcaaatcaaagtgtaaccgcaaatactgaaatcgctattcatgattctaatattaaactatatgaatctttaggcattaagcaagtttatgtagaagactttgaacataaatcctttagcaaagctaaaaaagccttagaagaaaaaggatttaaagttgaaagtaaagaagagtatagtgacgatattgatgagggtgatgtaatttctcaatctcctaaagggaaatcagtagatgaggggtcaacgatttcatttgttgtttctaaaggtgaaaaaagcgactcatcagatgtcaaaacgacaactgaatcggtagatgtaccatacactggtaaaaatgataagtcacaaaaagttaaagtttatattaaagataaagataatgacggttcaactgaaaaaggtagtttcgacattactagtgatcaacgtatagacattcctttaagaattgaaaaaggaaaaacagcaagttatattgttaaagtagacggtaaaactgtagctgaaaaagaagtcagctat

SEQ ID NO: 4416 - DNA, 3063 bp, Staphylococcus aureus
atgaatatgaagaaaaaagaaaaacacgcaattcggaaaaaatcgattggcgtggcttcagtgcttgtaggtacgttaatcggttttggactactcagcagtaaagaagcagatgcaagtgaaaacagtgttacgcaatccgatagcgcaagtaacgaaagcaaaagtagtgattcaagtagcgttaatgctgcacctaaaacagacaacacaaacgtgagtgatactaaaacaacgtcaaacactaataatggcgaaacgagtgtggcgcaaaatccagcacaacaggaaacgacacaatcagcatcaacaaatgcaactacggaagaaacaccggtaactggtgaagctactactacggcaacgaagcaagctaatacaccggcaacaactcaatcaagcaatacaaatgcggaggaattagtgaatcaaacaagtaatgaaacggcttctaatgatactaatacagtatcatctgtaaattcacctcaaaattctacaaatgcggaaaatgtttcaacaacgcaagatacttcaactgaagcaacaccttcaaacaatgaatcagctccacagagtacagatgcaagtaataaagatgtagttaatcaagcggttaatacaagtgcgcctagaatgagagcatttagtttagcggctgtagctgcagatgcaccggctgctggcacagatattacgaatcagttgacagatgtgaaagttactattgactctggtacgactgtgtatccgcaccaagcaggttatgtcaaactgaattatggtttttcagtgcctaattctgctgttaaaggtgacacattcaaaataactgtacctaaagaattaaacttaaatggtgtaacttcaactgctaaagtgccaccaattatggtcggagatcaagtattggcaaatggtgtaatcgatagtgatggtaatgttatttatacatttacagactatgttgatactaaagaaaatgtaacagctaatattactatgccagcttatattgaccctgaaaatgttacaaagacaggtaatgtaacattgacaactggcataggaaccaatactgctagtaagacagtattaatcgactatgagaaatatggacaattccataatttatcaattaaaggtacgattgatcaaatcgataaaacaaataatacgtatcgccaaacaatttatgtcaatccaagcggagataacgttgtgttacctgccttaacaggtaatttaattcctaatacaaagagtaatgcgttaatagatgcaaaaaacactgatattaaagtttatagagtagataatgctaatgatttatctgaaagttattatgtgaatcctagcgattttgaagatgtaactaatcaagttagaatttcatttccaaatgctaatcaatacaaagtagaatttcctacggacgatgatcaaattacaacaccgtatattgtagttgttaatggccatattgatcctgctagcacaggtgatttagcactacgttcgacattttatggttatgattctaattttatatggagatctatgtcatgggacaacgaagtagcatttaataacggatcaggttcaggtgacggtatcgataaacctgttgttcctgaacaacctgatgagcctggtgaaattgaaccaattccagaggattcagattctgacccaggttcagatagtggttcagattctaattcagatagcggttcagattcgggtagtgattctacatcagatagtgattcagattcagcgagtgattcagattcagcgagtgattcagattcagcgagtgattcagattcaacgagtgattcagattcagcaagcgattcagattcagcgagtgattcagattcagcaagcgattcagactcagcaagcgattcagactcagcaagcgattcagactcagacagtgactcagacagtgattcagattccgacagtgactcagactcagatagcgattcagattccgatagcgattccgactcagacagtgactcagacagtgattcagattccgacagcgactcagattccgatagcgattccgactcagatagcgactcagattcagatagcgattccgactcagatagcgactcagactcagacagtgactcggattcagatagcgattcagactcagacagtgactcggattcagatagcgattcagactcagacagtgactcggattcagatagcgattccgattcagatagcgattcagactcagacagtgactcggattcagatagcgattcagattccgatagtgactcagactcagacagcgattccgactcagacagcgactcggattcagatagcgattccgattccgacagcgactcagactcagacagcgattccaattccgacagtgattcagactcagacagcgactcagattcagatagcgattccgactcagacagtgactcggattcagatagcgattctgactcagatagtgactcagattcagatagcgattcagaatcagatagtgattccgattccgacagcgactctgactcagacagtgactcagattcagatagcgattcagactcagatagtgattccgattccgacagcgactcagattcagcgagtgattccgactcaggtagtgactcagattcagcgagtgattccgactcaggtagtgactcagattcagcgagtgattccgactcaggtagtgactcagattcatcaagtgattcagactcagacagtgcctctgattcaacgagtgacacagaatcagacaacgactctgactcagaaagtgattcaaatagcgattccgactcaggttctaacaataatgtagttccgcctaattcacctaaaaatggtactaatgcttctaataaaaatgaggctaaagatagtaaagagccattaccagatacaggttctgaaggtgaagcgaatacgtcactaatttggggattattagcatcattaggttcattactacttttcagaagaaaaaaagaaaataaagataagaaa

SEQ ID NO: 4417 - DNA, 933 bp, Staphylococcus aureus
gtgtttcatcatatcagcgttatgttaaacgaaaccattgattatttaaatgtaaaagaaaatggtgtgtacattgactgtacgctaggtggagcgggacatgccctttatttactaaatcaattaaatgacgacggaagattaatagcaatcgatcaagaccaaactgcaattgataatgctaaagaagtattaaaggatcatttgcataaggtgacttttgttcatagcaacttccgtgaattaactcaaatattaaaagacttaaacattgaaaaagtagatggaatctattatgacttgggtgtttcaagcccacaactcgacattccagaacgaggattcagttatcaccatgacgcaacattagacatgcgtatggaccaaacacaagaactaacagcatatgaaattgttaacaattggtcatatgaagcgttagtgaagattttttatcgctatggcgaggagaaattttcaaaacagatagctcgaagaatcgaagcacatcgcgaacaacaaccaataacaacaacattagaattagttgacattataaaagaaggtattcctgcaaaagcaagaagaaaaggcggacatcctgcaaaacgagtatttcaagcactacgaattgcagtaaacgatgaattgtcagcttttgaagattcaatagaacaagcgattgaattagtgaaagtagacggcaggatttcggtaatcactttccattctttagaagatcgtttatgtaaacaggtgttccaagaatatgaaaaaggtccagaagtaccaagaggattaccagttataccagaagcatatacacctaagttaaagcgtgttaatcgtaaaccgattaccgctacagaagaagatttagatgacaataacagagcacgaagcgcgaaattacgtgtagctgaaatacttaaa

SEQ ID NO: 4418 - DNA, 2232 bp, Staphylococcus aureus
atggcgaagcaaaaaattaaaattaaaaaaaataaaataggggcagtcctacttgttggtttattcggactgctcttttttatattggttttaagaatttcatatatcatgattactggacattctaatggtcaagatttagtcatgaaggcaaatgaaaagtatttagttaagaatgcacaacaaccagaacgaggaaagatatatgatcgtaatggtaaagtgctagcagaagatgtagaaagatataaacttgttgcagtaatagataaaaaggcgagtgccaattctaaaaaacctaggcatgtagttgataaaaaagagactgcaaagaaattatctacagtcattgatatgaagccagaggaaattgaaaagagacttagtcaaaagaaagccttccaaattgaatttggacgcaaaggaacaaatttaacgtatcaggacaaattgaaaatagagaaaatgaatttgcctggtatttctttattgcctgaaacagaacgcttttatccaaatggcaattttgcatcacacttaattggtagagctcagaaaaatccggatactggtgaacttaaaggtgcgcttggagttgaaaagatttttgatagttatttaagtggatctaaaggatcattgagatatattcatgatatttggggatatattgcaccaaatactaaaaaagagaagcagcctaaacgtggtgatgatgtccatttaacaatcgattcaaatattcaagtgtttgttgaagaagctttagatggcatggttgaaagataccagccgaaagatttatttgcggttgtcatggatgccaaaactggagaaattttagcatacagtcagcgaccaacatttaatcctgaaactggtaaagactttggtaaaaagtgggcaaatgacctttatcaaaacacatacgagcctggatcaacatttaaatcatatgggttagcagctgctattcaagaaggtgcttttgatcctgataagaaatataaatctggacatagagatattatgggttcacgcatttcagactggaatagagtcggttggggtgaaatcccaatgtcactcggatttacttattcatctaatacattgatgatgcatttacaagatttagttggtgcagacaaaatgaaatcttggtatgaacgatttggatttggaaaatcaactaaaggtatgtttgatggagaagcacctggtcaaattggatggagtaatgaattgcaacaaaaaacgtcatcatttggtcaatcgacaacagtaacacctgttcaaatgttacaagcgcaatcagcgttctttaatgatggtaatatgttaaaaccatggtttgtgaatagcgttgaaaatcctgttagtaaaagacaattttataaaggtcaaaaacaaatcgcaggcaaaccaataacaaaagatactgctgaaaaagttgaaaagcaattggatttagttgtgaatagtaagaagagtcacgctgcaaactatcgtattgatggttatgaggtcgaaggtaagactggtacagcacaagtcgctgcacctaatggtggtggatacgttaaaggtccaaacccatattttgtaagttttatgggtgacgcgccgaagaaaaatcctaaagttattgtatacgctggtatgagcttggcacaaaaaaatgaccaagaagcttatgaattaggtgttagtaaagcgtttaaaccaataatggaaaatactttgaaatatttaaatgtaggtaaatcaaaagatgacacatctaatgcagagtatagtaaagtgccagatgttgaaggtcaagacaaacaaaaagctattgataatgtgagtgcaaaatcattagaaccagttactatcggttctggcacacaaataaaagcgcaatctataaaagcagggaataaagtcttacctcatagtaaagtactgttattaacagatggagacttaactatgcctgacatgtcaggatggacgaaagaagatgttattgcttttgaaaacctaacaaatattaaagtgaatttaaaaggtagcggttttgtgtcccaccaatcaattagtaagggacaaaaacttactgaaaaagataaaatagacgtagaattttcatcagagaatgtagacagcaattcgacgaataattctgattcaaattcagatgataagaagaaatctgacagtaaaactgacaaggataagtcggac

SEQ ID NO: 4419 - DNA, 1347 bp, Staphylococcus aureus
atgcttaattacacagggttagaaaataaaaatgtattagttgtcggtttggcaaaaagtggttatgaagcagctaaattattaagtaaattaggtgcgaatgtgactgtcaatgatgggaaagacttatcgcaagatgcgcatgcaaaagatttagaatctatgggcatttctgttgtaagtggaagtcatccattaacattgcttgataataatccaataattgttaaaaatcctggaataccttatacagtatctattattgatgaagcagtgaaacgaggtttgaaaattttaacagaagttgagttaagttatctaatctctgaagcaccaatcatagctgtaacgggtacaaatggtaaaacgacagttacttctctaattggagatatgtttaaaaaaagtcgcttaactggaagattatccggcaatattggttatgttgcatctaaagtagcacaagaagtaaagcctacagattatttagttacagagttgtcgtcattccagttacttggaatcgaaaagtataaaccacacattgctataattactaacatttattcagcgcatctagattaccatgaaaatttagaaaactatcagaatgctaaaaagcaaatatataaaaatcaaacggaagaagattatttgatttgtaattatcatcaaagacaagtgatagagtcggaagaattaaaagctaagacattgtatttctcaacacaacaagaagtagatggtatttatattaaagatggttttatcgtttataaaggtgttcgtattattaacactgaagatctagtattgcctggtgaacataatttagaaaatatattagcagctgtgcttgcttgtattttagctggtgtgcctattaaagcaattattgatagtttaactacattttcaggaatagagcatagattgcaatatgttggtactaatagaactaataaatattacaatgattccaaagcaacaaacacgctagcaacacagtttgccttaaattcatttaatcaaccaatcatttggttatgtggtggtttggatcgagggaatgaatttgacgaactcattccttatatggaaaatgttcgcgcgatggttgtattcggacaaacgaaagctaagtttgctaaactaggtaatagtcaagggaaatcggtcattgaagcgaacaatgtcgaagacgctgttgataaagtacaagatattatagaaccaaatgatgttgtattattgtcacctgcttgtgcaagttgggatcaatatagtacttttgaagagcgtggagagaaatttattgaaagattccgtgcccatttaccatcttat

SEQ ID NO: 4420 - DNA, 1317 bp, Staphylococcus aureus
atggatgataaaacgaagaacgatcaacaagaatcaaatgaagataaagatgaattagaattatttacgaggaatacatctaagaaaagacggcaaagaaaaagatcaaaggctacacatttttctaatcaaaataaagatgatacatctcaacaagctgagtttgatgaagaaatttacttgataaataaagacttcaaaaaagaagaaagcaaagatgaaaataatgattctgcttctagtcatgcgaataataataatatcgatgattctacagactctaataatgaaaatgaggattatagatataatcaagaaattgacgaccaaaatgaatcgaatggaattgcattcgataacgaacaacctcaatcagctcctaaggaccaaaatagcgactcgaatgatgaggaaacagtaacgaaaaaagaacgaaaaagtaaagtaacacaattaaagccattaacacttgaagaaaagcggaagttaagacgtaagcgacaaaagcgaatccaatacagtgttattacaatattggtattgttgattgctgttatattaatttacatgttttcaccacttagtaaaattgcgcatgtaaatataaatggaaataatcacgttagtacttcaaagataaacaaagtgttaggtgttaaaaatgattcgaggatgtatacgtttagtaaaaaaaatgctattaatgatctcgaagaggatccattaatcaaaagtgttgagatacacaagcaattaccaaacacattaaacgtagatatcacagaaaatgaaattattgctttagtgaaatataaaggtaaatatttacctttattagaaaatggtaaattgcttaaaggttcaaatgatgtcaaaattaatgatgcacctgtcatggatggtttcaaaggtacaaaagaagatgatatgattaaggcgttatctgaaatgacacctgaagttagacgatatattgccgaagtgacatacgccccaagtaaaaacaaacaaagcagaattgaattgtttacgacggatggacttcaagtaatcggtgatatttcgacgatatctaagaaaatgaaatattatccgcagatgtcacaatcattatcaagagatagttcgggtaaactaaaaacacgaggctatattgatttatcagtcggtgcttcatttatcccataccgtggaaacacgtctactcaatcagaaagcgataaaaatgtgactaaatcatctcaagaggaaaatcaagcaaaagaagaattacaaagcgttttaaacaaaattaacaaacaatcaagtaagaataat

SEQ ID NO: 4421 - DNA, 195 bp, Staphylococcus aureus
atggcagacgaaagtaaatttgaacaagcaaaaggtaatgttaaagaaacagtaggtaatgttactgataataaaaatttagaaaacgaaggtaaagaagataaagcttctggtaaagcgaaagaattcgttgaaaatgcaaaagaaaaagcaactgattttattgataaagtaaaaggtaacaaaggcgagtaa

SEQ ID NO: 4422 - DNA, 747 bp, Staphylococcus aureus
gcatcaacattagaaatcaaagacctacatgtgtctattgaggataaagaaatcttaaaaggtgttaacttgacaattaacactgatgaaatacatgcgattatgggaccaaacgggacaggtaaatcaactttatcatctgcaattatgggacacccaagctatgaagtaactaaaggagaagtacttttagacggtgtaaatattttagaattagaagttgatgaaagagcaaaagcaggattattcttggcaatgcaatatccatcagaaattacaggtgttacaaatgctgatttcatgcgttcagctatcaatgcgaaacgtgaagaaggacaagaaatcaacttaatgcaatttattaagaaattagataaaaatatggattttctagacatagataaagacatggcacaacgttatttaaatgaaggtttctcaggtggagagaagaaacgtaacgaaatcttacaattaatgatgttagaacctaagtttgcaatcttagatgaaatcgattcagggttagacatcgatgcattaaaagttgtatctaaaggtattaaccaaatgcgtggggaaaactttggtgcattaatgatcacacactaccaacgattattaaattacattactcctgataaagtacatgtaatgtatgctggtaaagtcgttaaatctggtggtccagaattagcaaaacgtcttgaagaagaaggatatgaatgggttaaagaagagttcggt

SEQ ID NO: 4423 - DNA, 423 bp, Staphylococcus aureus
aatctagatcaattatatagatctgtcattatggatcattataaaaatcctagaaataaaggtgtattagataacgggtctatgacagtagatatgaataacccgacatgcggtgaccgtatacgactaacatttgatatagaagacggcattataaaagatgctaagtttgaaggtgaaggttgttcgatttcaatggcaagtgcatcgatgatgacacaagctgttaaaggtcattcacttggagaagcaatgcaaatgagccaagaatttacgaaaatgatgcttggtgaagactatgtgattacagaagaaatgggagatattgaagcattgcaaggtgtatctcaattcccagctcgtattaaatgtgccacattagcttggaaagcattggaaaaaggtactgttgctaaagaaggt

SEQ ID NO: 4424 - DNA, 1347 bp, Staphylococcus aureus
cgaagacacgcgataattttggcagcaggtaaaggcacaagaatgaaatctaaaaagtataaagtgctacacgaggttgctgggaaacctatggtcgaacatgtattggaaagtgtgaaaggctctggtgtcgatcaagttgtaaccattgtaggacatggtgctgaaagtgtaaaaggacatttaggcgagcgttctttatacagttttcaagaggaacaactcggtactgcgcatgcagtgcaaatggcgaaatcacacttagaagacaaggaaggtacgacgatcgttgtatgtggtgatacaccgctcatcacaaaggaaacattagaaacattgattgcgcatcacgaggatgctaatgctcaagcaactgtattatctgcatcgattcaacaaccatatggatacggaagaatcgttcgaaatgcgtcaggtcgtttagaacgcatagttgaagagaaagatgcaacgcatgctgaaaaggatattaatgaaattagttcaggtatttttgcgtttaataataaaacgttgtttgaaaaattaacacaagtgaaaaatgataatgcgcaaggtgaatattacctccctgatgtattgtcgttaattttaaatgatggcggcatcgtagaagtctatcgtaccaatgatgttgaagaaatcatgggtgtaaatgatcgtgtaatgcttagtcaggctgagaaggcgatgcaacgtcgtaccaatcattatcacatgttaaatggtgtgacaatcatcgatcctgacagcacttttattggtccagacgttataattggtagtgatacagtcattgaaccaggcgtacgaattaatggccgtacagaaattggcgaagatgttgttattggtcagtactctgaaattaacaatagtacgattgaaaatggtgcatgtattcaacagtctgttgttaatgatgctagcgtaggagcgaatactaaggtcggaccgtttgcgcaattgagaccaggcgcgcaattaggtgcagatgttaaggttggaaattttgtagaaattaaaaaagcagatcttaaagatggtgccaaggtttcacatttaagttatattggtgatgctgtaattggcgaacgtactaatattggttgcggaacgattacagttaactatgatggtgaaaataaatttaaaactatcgtcggcaaagattcatttgtaggttgcaatgttaatttagtagcacctgtaacaattggtgatgatgtattggtggcagctggttccacaatcacagatgacgtaccaaatgacagtttagctgtggcaagagcaagacaaacaacaaaagaaggatataggaaa

SEQ ID NO: 4425 - DNA, 3480 bp, Staphylococcus aureus
atgacaatattgacaacgcttataaaagaagataatcattttcaagaccttaatcaggtatttggacaagcaaacacactagtaactggtctttccccgtcagctaaagtgacgatgattgctgaaaaatatgcacaaagtaatcaacagttattattaattaccaataatttataccaagcagataaattagaaacagatttacttcaatttgtagatgctgaagaattgtataagtatcctgtgcaagatattatgaccgaagagttttcaacacaaagccctcaactgatgagtgaacgtattagaactttaactgcgttagctcaaggtaagaaagggttatttatcgttcctttaaatggtttgaaaaagtggttaactcctgttgagatgtggcaaaatcaccaaatgacattgcgtgttggtgaggatatcgatgtggaccaatttctttacaaattagttaatatggggtacaagcgggaatccgtggtatcgcatattggtgaattctcattgcgaggaggtattatcgatatctttccgctaattggggaaccaatcagaattgagctatttgataccgaaattgattctattcgggattttgatgttgaaacgcagcgttccaaagataatattgaagaagtcgatataacaactgcaagtgattatatcattactgaagaagtgatcagccatcttaaagaagagttaaaaagtgcatatgaaaatacaagacccaaaatagataaatcagtgcgcaatgatctgaaagaaacgtatgaaagctttaaattattcgaaagtacatactttgatcatcaaatactacgtcgtttagtagcgtttatgtatgaaacaccttcgacaattattgattatttccaaaaagatgcaatcattgcggttgatgaatttaatcgtattaaagaaactgaagaaagtttaacagtagagtctgattcttttattagcaatattattgaaagtggtaatggatttataggacaaagttttataaaatatgatgattttgaaacattgattgaaggctatcctgtcacttatttttcattattcgctacaacaatgccgataaaactaaatcatattattaaattttcatgtaaacctgtccaacaattttatgggcaatatgacattatgcgttctgaatttcaacgatatgttaatcaaaactatcatatcgtggttttggtcgaaaccgaaactaaagttgaacgtatgcaagcgatgttaagtgaaatgcatattccatcaataacaaaattgcatcgctcaatgtcatcggggcaagcagtgattattgaaggcagtttatctgaaggatttgaactacctgatatgggattagttgtcattactgaacgtgagctttttaaatcaaaacagaaaaagcaacgaaaacgtacgaaagctatctcaaatgctgaaaaaattaagtcttaccaagatttaaatgtgggagattatattgttcatgtgcatcatggtgttggtagatatttaggtgttgagacgctcgaagtggggcaaacgcatcgtgattatattaaattgcaatataaaggtacggatcagctatttgttccagtagatcaaatggatcaagttcaaaaatatgtagcttcggaagataagacgccaaaattaaataaactcggtggcagtgaatggaaaaaaacaaaagctaaagttcaacaaagtgttgaagatattgctgaagagttgattgatttatataaagaaagagaaatggcagaaggttatcaatatggggaagacacagctgagcaaacaacatttgaattagattttccatatgaacttacgcctgaccaagcgaaatctatcgatgaaattaaagatgacatgcaaaaatcgcgtccaatggatcgcttgctatgtggtgatgttggttatggtaaaaccgaagttgcagtgagagcagcattcaaagctgtaatggaaggaaagcaggttgcatttttagttcctacaactattttagctcagcaacattatgagacgttaattgagcgtatgcaggattttcctgttgaaattcaattaatgagtcgttttagaacgcctaaagagataaaacaaactaaggaaggacttaaaactgggtttgttgacatagttgttggtacacacaaattacttagtaaagatatacagtataaagatttagggctgttgattgtagatgaagaacaacgatttggtgtacgccataaagagcgtattaaaacattaaaacataatgtagatgtactaacattgactgcaaccccaatacctagaacattgcatatgagtatgctaggtgtgcgcgatttgtcagtgattgaaacgccgccagaaaatcgtttcccagttcaaacatatgtattagaacagaacatgagttttatcaaagaagctttagaaagagaactatcccgtgatggccaagtattttatctttataataaagtgcaatccatttatgaaaaacgagaacaactccagatgttaatgccagatgctaacattgcagttgctcatggacaaatgtcagagcgcgatttagaagaaacgatgttaagttttatcaataatgaatatgatattttagtaacgacgacgattattgaaacaggtgtcgatgtcccaaatgcaaatactttgatcattgaagatgcagatcgctttggattgagtcagttgtatcaattaagaggtcgtgttggtcgttcaagtcgtattggttatgcatacttcttacatccagcaaataaggtactaactgagactgcagaagatcgattacaagcgattaaagaatttacggagttaggctcaggatttaagattgcgatgcgtgatttgaacattcgtggtgctggtaatttgttaggtaaacaacagcacggctttattgatacagttggatttgatttgtacagtcaaatgttagaagaagctgtaaatgaaaaacgtggtattaaggaaccagaatctgaggtgccagaagtcgaagttgatttaaacttggatgcatatttgccaacagaatatattgcaaatgaacaagctaaaattgaaatttataaaaagctacgaaaaactgaaacatttgatcaaattatcgacattaaagatgaattaattgatcgtttcaatgattatcctgttgaagtagcacgtttgcttgatatagtggaaataaaagtacacgcattacattcaggtatcacgttgattaaagataaagggaaaataattgatattcatttatctgtaaaagccactgaaaatattgatggcgaagtgctgttcaaagcaacacaacctttaggtagaacaatgaaggttggtgttcaaaataatgcaatgacaattactttaacgaaacaaaatcaatggcttgatagtttgaagttcttagttaagtgcattgaagaa

SEQ ID NO: 4426 - DNA, 1097 bp, Staphylococcus aureus
atggcacataccattacgattgttggcttaggaaactatggcattgatgatttgccgctagggatatataaatttttaaagacacaaaataaagtttatgcaagaacgttagatcatccagttatagaatcattgcaagatgaattaacatttcagagttttgaccatgtttatgaaacacatgaccaatttgaagatgtctataatgatattgtggcgcaattggttgaagctgctaatgaaaaagatattgtctatgcggttccgggtcatcctagagttgctgagacaactacagtgaaattactggctttagcaaaagacaatactgatatagatgtgaaagttttaggtggtaaaagctttattgatgatgtttttgaagcagttaatgtagatccaaatgatggcttcacactgttagatgcgacatcactacaagaagtaacacttaatgttagaacgcatacattgattacgcaagtttatagtgcaatggttgctgctaatttgaaaatcactttaatggaacgatatcctgatgattaccctgttcaaattgtcactggttcacgaagcgatggtgcggataacgttgtgacatgcccattatatgaattggatcatgatgaaaatgcattcaataatttgacgagtgtattcgtaccaaaaatcacaacaccgacatatttgtatcatgactttgattttgcaacggaagtgattgatactttagttgatgaagataaaggttgtccatgggataaagtgcaaacgcatgaaacgcttaaacgttatttacttgaagaaacatttgaattgttcgaagctattgacaatgaagatgattggcatatgattgaagaactaggagatattttattacaagtgttattgcatactagtattggtaaaaaagaagggtatatcgacattaaagaagtgattacaagtcttaatgctaaaatgattcgtagacacccacacatatttggtgatgccaatgctgaaactatcgatgacttaaaagaaatttggtctaaggcgaaagatgctgaaggtaaacagccaagagttaaatttgaaaaagtatttgc

SEQ ID NO: 4427 - DNA, 1332 bp, Staphylococcus aureus
caatatgatttagtcgttctcggtggaggtactgcaggatatgttgctgcgatacgtgcgtctcaattaggtaagaaagtggcaatagtagaacgacaactattaggaggtacttgtctccataaaggttgtattcctactaaatcgctgcttaaatctgctgaagtatttcaaacagtaaaacaggcagcaatgtttggcgttgatgtcaaagatgctaatgttaattttgaaaatatgttggcacgaaaagaagacattattaatcaaatgtatcaaggtgtaaagcatttaatgcaacacaatcacattgacatttataacggcacgggacgtattctaggtacatctatattttcacctcaaagtggcacaatttctgtcgaatatgaagatggtgaatcagacttattacccaaccaatttgtattaattgcaactggttcttcgcctgcagagttgccattcttatcatttgatcatgataaaattttatctagcgatgatatattatcattaaagacgttaccatcaagtgttggtattattggtggtggtgttatcggaatggaatttgcatcattgatgatagatttaggtgttgacgtaacagttatagaagctggtgaaagaattttaccaactgaaagtaaacaagcttcacaactattaaaaaaatcattgtcagcacgtggtgttaaattctatgagggaataaaactttctgaaaatgatataaatgttaacgaagatggtgttacatttgaaatttcctcagacataattaaagtagataaagtgttgctatcgattggtagaaaacctaacacatcagatattggtttaaacaacactaaaataaaactttcaacatcaggacatattttaacgaacgaatttcaacaaactgaagataaacatatttatgcagctggtgattgtattggaaaattacaattggcacatgttggatcaaaagaaggtgttgtggctgtcgatcatatgtttgaagggaacccaatcccagtaaactataacatgatgcctaagtgtatttattcacaacctgaaattgcttctatcggtttaaacattgagcaagcaaaggcagagggaatgaaagttaaaagttttaaagtaccatttaaagcaattggtaaagcagtgattgatagccatgacgcaaacgaagggtatagcgaaatggtgattgatcaatcaactgaagaaattgtgggtattaatatgattggtccacatgtaacagaattgattaatgaggcatcactgttacagttcatgaatggctcggcattagaattaggactaaca

SEQ ID NO: 4428 - DNA, 963 bp, Staphylococcus aureus
tataaatcattaggccttagcgaagaagacctaaaagtaatatataaatggatggatttaggtagaaaaatagatgaaagactgtggttattgaaccgtgcaggtaaaattccatttgttgtaagtggtcaaggacaagaagcaactcagattgggatggcatacgcattagaagaaggtgatattactgcgccttattatagagatctagctttcgttacttatatgggtatctcagcgtatgatacgtttttatcagcgtttggaaagaaagacgatgttaactctggtggaaaacaaatgccatcacactttagtagtagagctaagaatattttgtcacaaagttcaccggtagcaactcaaataccccatgctgttggtgctgctttagctttaaaaatggatggtaagaagaaaattgcaacagcaactgttggtgaaggtagctcaaaccaaggtgacttccatgaaggtttaaacttcgcgggtgtacacaaacttccttttgtatgtgtcattataaataataaatatgcaatttcagtacctgattcattacaatacgcagctgaaaaattatcggatagagcacttggttacggtatacatggtgaacaagtagatggtaataatccattagcaatgtataaagcgatgaaagaagcaagagaacgagctatttctggtcaaggttcaactttgattgaagcagtaacttctcgtatgacagctcattcatcggatgacgacgaccaatatcgtacgaaagaagagcgtgaagcgcttaaaaaagcagactgcaacgaaaagttcaaaaaagagttgctttcagctggcattatcgatgatgcttggttggcagaaatagaagcagaacataaagacattatcaataaagtaactaaggctgctgaagacgcgccatatccaagtgtcgaagaagcctatgcatttgtgtac

SEQ ID NO: 4429 - DNA, 981 bp, Staphylococcus aureus
atggctaaattatcttatttagaggcgattcgccaggcacaagacttagcattacaacaaaataaagatgtatttattcttggtgaagatgttggtaaaaaaggtggcgtatttggtactactcaaggactgcaacaacaatatggtgaggacagagttatcgatacaccattagctgagtcaaatattgtcggaacagccattggcgcagctatggttggtaaaagaccaattgctgagattcagtttgcagattttatcttacctgcaacaaatcaaattattagtgaagccgcgaaaatgcgttatcgttcaaataatgaatggcaatgcccattaacgattcgtgcaccatttggtggcggtgttcatggtggactttatcattcacaaagtattgaaagtatatttgcttcatcaccaggtttaacaattgttataccttcaacaccgtatgatgctaaaggtctattattatcttcaattgaatcaaatgatcctgttttatactttgaacataaaaaggcttatagattcttaaaggaagaagtgccagaagaatattacactgtacctttaggaaaagcagatgttaaacgtgaaggtgaagatttaacagtattttgttatggattaatggtcaattattgtttacaagcagcggatattttagcagcagacggtatcaatgttgaagtcgtagatttacgaactgtttatccattagataaagaaacaattattgatcgtgctaaacatacaggtaaagttttacttgtaactgaagataatttagaaggtagtattatgtctgaggtgtcagcgattattgcagaacattgtctgttcgaactagatgcaccaatcatgcgtttagctgctccagatgtaccatctatgccattttctcctgtattagaaaatgaaattatgatgaatccagaaaaaatcttaaataaaatgcgtgaattagcagaattc

SEQ ID NO: 4430 - DNA, 1275 bp, Staphylococcus aureus
gtcatggaaataacaatgcctaagttaggtgagagtgttcatgaaggtaccattgaacaatggttagtttctgttggtgatcatattgatgaatatgaaccattatgtgaagttattacagataaagtgacggctgaagtcccttccacgatatcaggaacaattacagaaattttagttgaagcggggcagacggtagctattgatacaattatctgtaaaattgaaactgctgatgaaaagacaaatgaaacaactgaagagatacaagcaaaagtggatgagcatactcagaaatctactaaaaaagctagtgcaacagtggaacagacatctactgctaaacaaaatcaaccacgaaataatggtcgcttttcacctgttgtatttaaactcgcttcagagcatgacattgatttatcacaagttgtaggtagtggatttgaaggtcgtgtaactaagaaggatttaatgtcagttattgaaaatggtggtaccacagctcaatctgacaaacaagttcaaacacaatcaacttcagtagctacatcaagtaaccaatcatctgaagacaatagtgaaaatagcacaataccagtaaatggtgtgcgtaaagcaattgcacaaaacatggttaatagtgtaacggagattccacatgcatggatgatgattgaggttgatgctacaaaccttgtgaatacgagaaaccattataaaaacaactttaaaaataaagaaggatataatttaactttctttgctttctttgtaaaagctgtagcagatgctttaaaagcatatccattattaaatagtagctggcaaggaaatgaaattgtcttacatacagacattaatatttcaattgctgttgctgatgaaaataaattatacgtacctgtgattaagcatgcagacgaaaagtcaatcaaaggtatagctagagaaattaatactttagcaacaaaagcgcgtaataagcaattgacaactgaagatatgcaaggtggaacatttacagttaataatactggtacatttggttcagtatcatcaatggggattataaatcatcctcaagcagcgattttacaagtagaatccatcgttaaaaagccagtagtaattgatgatatgatagcaattcgaagtatggtaaatttatgtatttcaatagatcatcgcattttagatggtttacaaactggtaaatttatgaatcatattaaacagcgtatcgaacagtatactttagaaaatacaaatatatat

SEQ ID NO: 4431 - DNA, 432 bp, Staphylococcus aureus
atggacatgaatttcgatttatacatgaacggtgttgtagaacaagcaaggaatgaaattgaatctgcgggatatgagcaattaactactgcagaagatgttgacaaagttcttaaacaagatggtacaacactagttatgatcaattctgtatgtggttgtgcaggtggtatcgcaagaccagcagcatcacatgctttacattatgacgtattacctgatcgtctagtgacagtatttgctggacaagataaagaagcgacacaaagagcgcgtgagtacttcgaaggttatgcgccttcaagtccgtcatttgcattagtaaaagatggaaagattacagaaatgattgaaagacatcaaatcgaaggtcatgatgtgatgaacgtaattaatcaattacaaacattattcaataaatattgtgaagaa

SEQ ID NO: 4432 - DNA, 942 bp, Staphylococcus aureus
tacaagattggatttagaacaataaaaacagcagtgggtatgactttaggtgtaattattagtaagctgttaggtttagataattatgcttcaagcgccatattagtcgtattatgtattaaacatacaaaagtacattcgctacaagcgattatttcaagattagtatcatgttttttagtattgtttttaggttcagcaatatttagtttattaggtcagagtccaattgtactcggtattatcgtattgttatttataccattaactgtcgtattaaaagtacaagaaggtgtcattacgagttgcgttatattacttcatgtttttaatgcaaaatcaattgatgtacatttaattgttaatgaaacattattactgttaattggactaagcattgcatttacaatgaatttaatgatgccaagtttagacaaacaactagacgaatacaaatgtaaaattgagcaacaaattgctgatatttttagtaaatatagttatatttgtgaaaaatatgaagataccattgcgattgaatttgaagcgttacttttaaatattaaaaaggcgaagtctatcgcgttccgagatgttaaaaatcattttgttagaaacgaaaattcatactatcattattttgatatgcgagaagagcaagtggaattgttaatgagaatgaaaccgctcatcgaaagtatctgtcataaagatccacttttaaatgatgttgcgtcactgctgaaagaaattggtctaaatgtgaatagtaatgactatacagcaatgcgtttacacaatttgtatgagacacgtttgaaattggatgaactgccattgccaacaacacacaaagcgcttaactcgagagcaagtattattcaaatattaaatgaattagaagaatatttacaaatcaaatcgcaatttggttcattgaaa

SEQ ID NO: 4433 - DNA, 183 bp, Staphylococcus aureus
atggcagacgaaagtaagttcgatcaatttaaaggcaatgttaaagaaacagtaggtaacgttactgataacaaagaattagaaaaagaaggtcagcaagataaagcgactggtaaagcaaaagaagttgttgaaaatgctaaaaacaaaataactgatgcaattgataaacttagaaaataa

SEQ ID NO: 4434 - DNA, 246 bp, Staphylococcus aureus
ttggcaaaatatacaatcgttgatatggatacttgtattgcatgtggtgcatgcggtgcagcagcgccagatatatatgattacgacgacgaaggtattgctttcgtaatccttgacgataaccaaggtactgcagaagtacctgaggaattatatgaagatatggaagatgcaattgatggatgccctacagattctattaaaattgcagacgaaacatttgatggggacgctttaaaatttgaa

SEQ ID NO: 4435 - DNA, 1518 bp, Staphylococcus aureus
gagttaatccttgtcttagactttggtagccaatacaaccaattaattacacgccgaattcgtgaaatgggcgtttatagtgaattacacgatcatgaaatttcaattgaagaaattaagaaaatgaatccaaaaggtatcatcttatcaggtggtccaaattcagtttatgaagaaggttcatttacaattgatccggaaatatataatttaggaattccagtacttggtatttgttacggcatgcaattaactactaaattattaggtggtaaagttgaacgtgccaatgaacgcgaatacggtaaagcaatcattaatgcgaagtcagatgagttattcgctggcttaccagcagaacaaacagtttggatgagtcattctgataaagtcattgaaattccagaaggctttgaagttatcgctgatagcccaagcacagactatgcagcaatagaagataagaaacgtcgcatttatggtgttcaattccatccagaagtacgtcatacagaatatggtaatgatttattaaataattttgtccgtcgtgtttgtgattgtaaaggtcaatggacaatggaaaactttatcgaaatcgaaatcgaaaagattcgtcaacgcgtaggagaccgtcgtgtattatgtgcgatgagtggcggcgtagattcatctgttgtagctgtactattgcataaagcaattggtgatcaactaacatgtatctttgtagaccatggcttacttcgtaaaggtgaaggcgacatggttatggagcaattcggtgaaggttttaacatgaatattattcgtgttaatgcgaaagatcgttttatgaataaattaaagggtgtttcagatcctgaacaaaaacgtaaaatcattggtaatgaatttgtatatgtgtttgacgatgaagcatcaaaacttaaaggtgtagacttccttgcgcaaggaacactatatacagacgtcatcgaatcaggtactaagacagcacaaacaatcaaatcacaccacaatgttggtggattaccagaagacatggaattcgaattaatcgaaccaatcaatacattgtttaaagatgaagtacgtaaattaggtattgaactaggtattccggaacatttagtgtggagacaaccattcccaggtcctggccttggtattcgtgtacttggagaaattactgaagataaactagaaatcgttagagaatcagacgcgattttacgccaagtgattagagaagaaggtcttgaaagagaaatttggcaatacttcacagtgttaccaaacattcaatcagtaggtgttatgggagactaccgtacgtatgatcacacagtaggtatccgtgcagtaacatctatcgacggtatgacaagtgactttgcacgcatcgattgggaagtcttacaaaagatttcaagtcgtatcgtaaacgaagtagaccatgttaaccgcgtagtctatgacattacatcaaaaccaccaagcacaattgagtgggaa

SEQ ID NO: 4436 - DNA, 1614 bp, Staphylococcus aureus
atgaatatcgtcaaagatcaattggaaaatgcaggatttaacgtgaagatgaatatccaaccagattatggaagctatcgtacacaacgtcaagccggcaattatgatatccaaatcgatgactggatgacagtattcggtgacccgaactatgctatgacggcattatttagttctacaggatcaaatagtttattgaaagataaacatgtagaccagttgttaaataaagcttctactcaaaatgaagcagatgttaaacaaacatataagcaaattgaagatgaagttgtatttgataaagggtatatggcgcctttatatggatcaaaaaagaatttagtatatgacaataaagtgttagataaaaatagtgttggattgccaaattcacgtgcattaatatggcaacaatttgattacaacaatagtagagaacgagatacgcggccacttgtgatgacacaacaagatggtgaaattcctacattggatccaatacgttcaattgcgccgtcagtatattcaattaatatgaatatgtacacaaggttattattattagatgaaaatgaccacttaacaacgaaaggttcgttaagtcgtgattatgctgtgaataaggacaataaagcgttttatttcttgttaagagatgatgattattttgcgaaagtggtcaatggacaagcacgtaatactggagagcgtgtatcggctgaagatgttaagttttctttagatagagcacgtgataaaaagtctgtgcctaacaataatacttataatatgcacaaacatataaatgacatcaagatattaaaagatgaggacatcgatcagttgcgtaaagagaaagacaaggacgataaatccatctatgataagttgattaaagcttataacgtcaaatcgttaacgacagatggtcaaagagtaaataataaagacggtatttatcaaattgttaaaattacgacagatcaatcgatgcctcgagaggtaaattacttaacacactcttcggcaggcattttatctaaaaaatttgttaatcaagtaaatcaagaatatccaaaaggatatggggatagcagtaccattcctgcaaattcagatggaaaaaatgcgctttatgcaagtggtgcatacattatgacacagaaaaatgcatatcaagcaacgtttcaacgtaatccaggattcaacgaaacagaaaaaggtagttatggaccagctaaaattaaaaatattacattgaagtttaatggtgacccgaataatgcattgtcagaacttagaaatcattcaattgatatgttggcagatgtgaatcaaaaacattttgatttaattaagtcggataaaaatttaagcattattcgcaaaaatggacgcaagtcagtctttttaatgctaaatattaaaaaaggtatatttaagacgcatccaaacttgagacaagcagtagttaatgcgatagatcaggatcaatttattaagttttatcgtggcgataaatttaaaattgcatcaccgattacaccacttgtcgatactggtaacgagcaacgtcaagatttagaaaaagtagaaaaagccattaatcaataa

SEQ ID NO: 4437 - DNA, 1704 bp, Staphylococcus aureus
atgaaagtcgaagtttataaaggagcgcaaggcaaacataaccttaaagattatgaagaaacatataatacttttgattggaaagacgtagaacaagcattttcttggagtgaaactggaaaaatgaacatggcatatgaatgtatagatcgccatgtagatcaaggatcaggggataaaatagcgttaaattacaaagatgagcacagaaaagaatcgtatacttataaagatatgcaacggttatctaataaagcagcgaatgttttgtctgaacatgcagaagttgacaaaggtgacagagtatttatatttatgtcgcgtacacctgaactatattttgcgttgttaggtgttttaaaaattggtgcaattgttgggccgttatttgaagcatttatggaaaaggcagttgcggatagattagagaacagtgaagctaaagtgttaattactaataaggcattgttacctcgagtacctttagataaattaccaaacttgaaaaaaattgttgtcgtagatgaggatgtagaagacaattacatagacttcattagtttgatggaaactgctagcgatgaatttgacattgaatggttaaagtcggatgatggtttgattttacattatacatcaggttctactgggcaacctaaaggtgtattgcatgttcaacaagcaatgttagttcactatatttctggaaaatatgtattagatttacaagaagatgatgtttattggtgtacagcagatccaggttgggttacaggaacatcttatggtatttttgcaccatggttaaatggcgctacaaattgtatagctggtggtcgcttttcaccagaacagtggtatagtatgattgaagattttaaagtgacgatttggtatacggcaccaacagctttaagaatgttaatgagtgctggtgacgatattgttgagaaatatgacttgtcatcgttgcgttcgattctatcagtaggtgagcctttaaatcctgaagttataaaatgggcgaaaaaagtatacggtttaacggtgttagatacttggtggatgacagaaacaggtggacatatgattgttaactatccaacgatggacgtcaagcttggctcaatgggcaaaccattacctggtattcaagctgcaattatcgatgatgcaggtaatgaattaccaccaaatcgaatgggcaaccttgctataaaaaaaggctggccatcaatgatgtatcgtatctggaagaatccagaaaaatataagtcatattttattggagactggtatgtatctggtgattcggcatataaagatgaagatggttacttctggttccaaggacgtgttgatgatgtaattatgacagctggtgaacgagttggaccatttgaggttgagtctaaattggttgaacacgaagcagttgccgaagcaggaattattggtaaacctgatccggttcgcggtgaaataattaaggcgtttgttgcactgagaaaaggatatgaaccaacagacgaattaaaagaagaaattcgtttatttgttaaagaaggtttgtcggcgcatgcagcaccacgtgaaatcgaatttaaagataaattacctaaaacacgctcaggtaaaattatgagacgtgtattaaaagcttgggaattaaatttagatgcaggggatttaagtacaatggaa

SEQ ID NO: 4438 - DNA, 2613 bp, Staphylococcus aureus
atgaacaaacatcaaccaaaattaaggtctttctattctattagaaaatcaactctaggcgttgcatcggtcattgtcagtacactatttttaattacttctcaacatcaagcacaagcagcagaaaatacaaatacttcagataaaatctcggaaaatcaaaataataatgcaactacgactcagccaccaaaggatacaaatcaaacacaacctgctacacaaccagcaaacactgcgaaaaactatcctgcagcggatgaatcacttaaagatgcaattaaaaatcctgcagtagaaaataaagaacatgacataggtccaagagaacaagttaattttcaattattagataaaaacaatgaaacgcagtactatcactttttcagtatcaaagatccagcagatgtatattacactaaaaagaaagcagaggttgaattagatataaacactgcttcaacatggaaaaagtttgaagtatatgaaaacaatcaaaaattgccagtgagacttgtatcgtatagtcctgttccagaagaccatgcctatattcgattccctgtttcagatggtacgcaagagctgaaaattgtttcttcgactcaaattgatgatggagctgaaacaaattatgattatactaaattagtatttgctaaacctatatataacgatccttcactcgtaaaatcagatacaaatgatgcagtagcaacgaatgatcaatcaagttcagatgcaagtaatcaaacaaatacgaatacatctaatcaaaatacatcaacgaccaacaatgctaataatcaaccgcaggcaacgaccgatatgagtcaacctgcacaaccaaaatcgtcagcgaatgcagatcaagcgtcaagccaaccagctcatgaaacaaattctaatggtaatactaacgataaaacgaatgagtcaagtaatcagtcggatgttaatcaacagtatccaccagcagatgaatcactacaagatgcaattaaaaacccggctatcatcgataaagaacatacagctgataattggcgaccaattgattttcaaatgaaaaatgataaaggtgaaagacagttctatcattatgctagtactgttgaaccagcaactgtcatttttacaaaaacaggaccaataattgaattaggtttaaaaacagcttcaacatggaagaaatttgaagtctatgaaggtgacaaaaagttaccagtcgaattagtatcatatgattctgataaagattatgcctatattcgtttcccagtatctaatggtacgagagaagttaaaattgtgtcatctattgaatatggtgagaacatccatgaagactatgattatacgctaatggtctttgcacagcctattactaataacccagacgactatgtggatgaggaaacatacaatttacaaaaattattagctccgtatcacaaagctaaaacgttagaaagacaagtttatgaattagaaaaattacaagagaaattgccggaaaaatataaggcggaatataaaaagaaattagatcaaactagagtagagttagctgatcaagttaaatcagcagtgacggaatttgaaaatgttacacctacaaatgatcaattaacagatgtacaagaggctcattttgttgtttttgaaagtgaagaaaatagtgagtcagtcatggatggatttgttgaacatccattctatacagcaactttaaatggtcaaaaatatgtagtgatgaaaacaaaggatgacagttactggaaagatttaattgtagaaggtaaacgtgtcacaactgtttctaaagatactaaaaataattctagaacgttgattttcccatatatacctgacaaagcagtttacaatgcgattgttaaagtagttgtggcaaacattggttatgaaggtcaatatcatgtcagaattataaatcaggatatcaagacacaagatgatgacacatcacaaaataacacgagtgaaccgctaaatgtacaaacaggacaagaagataatgttactgcaacggatacagctacaaataacagtattgaaacaactccaagtgaggcaactgataaagtagatttgatagaaccagagtctgacatggttaaagatactgatagtagtgttgacaaagatgcgcatcatgatgttgatcatttatccgatatgtcgggtaacactcacttcgataagtatgatcttaaagaaatggatactcaaattgctaaagacactgataagggtgttgataatagcgttggaatgtcatctaatgtcgatactgataaagactctaataaaaataaagacaaagtcatacagctggatcatattaccgataaaaataaagttaataatactggaactgaaacaaacattgatacaatgaaatatcatcctatcagtactatcaaagttactgacaaaaaaacaactgaacatctgccgaatgatattcataaaactgtagacaaaacagtgaaaacaaaagaaaaggccggcacaccatcgaaagaaaacaaacttagtcaatctaaaatgctaccaaaaactggagaaacaacttcaagccaatcatag

SEQ ID NO: 4439 - DNA, 1245 bp, Staphylococcus aureus
ttaattgaagatttaaaatggagaggtcttatttatcaacaaactgatgaacaaggtattgaagatttattaaataaagaacaagtgacgttatactgcggtgctgatccaacggcagatagcttacacattggtcacttactaccatttttaacattaagaagatttcaagaacatggacatcgtcctatcgttttaattggcggtggtacaggtatgattggtgatccatcaggtaaatcagaagaacgtgtgctacaaacagaagaacaagtagataaaaatatcgaaggtattagtaagcaaatgcataatatttttgaatttggaacagaccatggtgcagtgcttgttaataatagagactggttaggacaaatttcattaattagctttttacgtgactatggtaaacacgtcggcgttaattacatgttaggtaaagattcaatccaaagtcgtttagaacatggtatttcatatacagaattcacatacacgattttacaagctattgatttcggtcatttgaatagagaattgaattgtaagattcaagtaggtggatcagatcaatggggtaatatcacgagtggtattgaattaatgcgtcgtatgtatggtcaaacagacgcatacggtttaactatttcgcttgtaactaaatcagatggtaagaaatttggtaaatctgagtcaggtgctgtttggttagatgctgaaaaaacaagtccttatgaattttatcaattctggattaatcaatcagacgaagatgtaattaaattcttaaaatactttactttcttaggaaaagaagaaattgatcgcttagaacaatctaaaaatgaagcaccgcatttacgtgaagctcaaaaaacattagctgaagaagtaactaaatttattcatggtgaagatgcattaaatgatgcaatccgtatttcacaagcattatttagtggtgatttaaaatcattatcagcgaaagaattaaaagatggatttaaagatgtgcctcaagtgacattatcaaatgacacaacaaatatcgttgaagtccttattgaaacaggcatttctccttctaaacgacaagcgcgtgaagatgttaacaatggtgcgatttatattaatggtgagagacaacaagatgttaattatgctttagcaccagaagataaaattgatggcgaatttacgattattcgtcgcggtaagaaaaaatacttcatggttaactat

SEQ ID NO: 4440 - DNA, 906 bp, Staphylococcus aureus
ttaggtaaatctgatgttgaagtgtttccaatcgcacttgggacgaacgcagtaggtgggcataatttatatccgaacttagatgaagaacaaggaaaagaagttgttcgtcaagccattaatcatggtattaatttattagatacggcatatatttatgggccagaacgttcagaagaattggttggagaagttgttaaagaatatccgcgagagcaaattaaaattgctacgaaagggtctcatgaatttgatgaaaatcaagaagtacatcagaacaatcaaccggaatatttaaaacaacaagttgagaatagtttgaaacgtctacaaactgattatatcgatttatattatattcattttccagatgacaacactccgaaagatcaagcagttgcagcattacaagagcttaaggaacaagggaagattaaagccattggtgtatcaaatttcacattagatcaacttaaagaagcaaataaagatggttacgttgatgttgtacagttagaatataatttattgcatcgcgaaaatgaggcagtattacaatattgtgttgatcaccaaatcacatttattccatatttcccattagcatccggtattttagctggaaaatatgatgagaacactaaatttagtgaccatcgtactacacgtcgtgattttaaaccaggtgtatttgaagaaaatgtgcgtcgcgtaaaagctttggaaagcctagctgcagcacatcaaacttcaattgcgaacattgtattagcattttatttaacgagaccagctattgatgtgattattcctggtgcaaaacgtgcagaacaagtcattgaaaatattaaagctgcagatatcgttttatcagatgatgagattcaatatatcgatgaactgttt

SEQ ID NO: 4441 - DNA, 1017 bp, Staphylococcus aureus
atgagagcagcagttgtaacgaaagatcacaaagtaagtattgaggacaaaaagttaagagctttaaaacctggtgaagcattggtacaaacggaatattgtggcgtttgtcataccgatttacatgttaagaatgctgattttggtgatgttacaggcgttactttaggtcatgaaggtattggtaaagtcatcgaagttgcagaagatgtagaatcattaaaaattggagaccgtgtgtctatcgcttggatgttcgaaagctgtggaagatgtgaatattgtacaacaggtcgtgaaacactttgccgtagtgtgaaaaatgctggttatacagtagatggtgcaatggctgaacaagttattgttactgcagactatgctgtgaaagtacctgaaaaattagatccagcagcagcgtcttctattacatgcgcaggtgtgacaacttataaagctgtaaaagtaagtaatgtaaaacctggacaatggttaggtgtttttggtataggtggtttaggtaacctagctttacaatatgctaaaaacgttatgggggctaaaattgttgccttcgacatcaatgatgataaattagcattcgcgaaagaattaggtgcagatgctattattaattctaaagatgttgatccagttgcagaagttatgaaattaactgataacaaaggattagatgcaacagtggtaacttcagttgctaagacgccatttaaccaagcggttgatgttgtaaaagctggtgcaagagttgttgccgttggtttacctgttgataaaatgaacttagatatcccaagattagtgcttgatggtattgaagtagtaggttcacttgttggtacaagacaagacttacgtgaagcgtttgaatttgctgctgaaaataaagtaacacctaaagttcaattaagaaaattagaagaaatcaatgatatttttgaagaaatggaaaatggtactataactggtagaatggttattaaattttaaaaatat

SEQ ID NO: 4442 - DNA, 1659 bp, Staphylococcus aureus
atgaatattattgatcaagtgaaacaaacattagtagaagaaattgcagcaagtattaacaaagcaggattagcagatgagattcctgatattaaaattgaaattcctaaagatacaaaaaatggagattatgctactaatattgcgatggtactgactaagattgcaaagcgtaatcctcgtgaaattgctcaagcgattgttgataacttagatactgaaaaagcacatgtaaaacaaattgacattgctggtccaggattcattaatttttacttagataatcagtatttaacagcaattattcctgaagcaattgaaaaaggtgatcaatttggacatgtaaatgaatcaaaaggtcaaaatgtattgcttgagtatgtttcagctaaccctacaggagatttacatattggtcatgctagaaatgcagcagtgggtgatgctttagctaatattttaactgcagctggctataatgtaacacgtgaatattatattaatgatgctggtaatcaaattactaacttagcgcgttcgattgaaacacgtttctttgaagctttaggtgacaatagttattcaatgccagaagatggctataatggaaaagatattattgaaataggaaaagatttagcagagaaacaccctgaaattaaagattattctgaagaagcacgtttgaaagaatttagaaaattaggcgtagaatacgaaatggctaaactgaaaaatgatttagcagagttcaatacgcattttgataattggtttagtgaaacatctttatatgaaaaaggcgaaattcttgaagttttagcaaaaatgaaagaattaggttatacgtatgaagctgatggcgctacatggttacgtacaactgattttaaagacgacaaagacagagtattaattaaaaatgacggtacatatacgtatttcttaccagatattgcgtaccacttcgataaagttaaacgtggtaatgacattttaatcgatttatttggtgctgatcatcatggttatattaaccgtttgaaagcatctcttgaaacgtttggtgtagatagtaatcgtttagaaattcaaatcatgcaaatggttcgtttaatggaaaatggtaaagaagtgaagatgagtaaacgtactggtaatgcgattactttaagagaaattatggatgaagttggcgttgacgctgcacgttatttcttaactatgcgtagtcctgatagtcactttgattttgatatggaattagcaaaagagcaatctcaagacaatccagtttactatgctcaatatgcacatgcgcgtatttgttcaattttaaaacaagcgaaagagcaaggaattgaggtagctgctgcgaatgattttacaacgattacaaatgaaaaagcgattgaattgttgaaaaaagtagctgatttcgaacctacaattgaaagtgctgctgagcatagatcagcacatagaattactaattatattcaagatttagcttctcatttccataaattctataatgctgaaaaagtgttaacagatgatattgaaaaaacaaaagcacatgttgctatgattgaagcggtcagaattacattgaaaaatgcattggcaatggtcggtgtaagcgcacctgaatcaatg

SEQ ID NO: 4443 - DNA, 1479 bp, Staphylococcus aureus
ttaagttttcaattgctattttcactgtttgttattgcgcttatcattgcattgataagtggcttgttgtttttagcaccagttatgccaatgagatatattaaattacatttatacatactagtcatgccagtattatttgcagtaattggctttttcggtattcatggtcaacatgtcttaggtccatttaaaatagatcgtttatcttggttattagctggctttgtaatggcgcttggctttattattcaaaagttttcaatgcgatatttactaggtgatcatcattatagacattactttccattgttcactgcgattacgtcgtttgcatctttagcatggatgtctgaagacttaagactgatggcactctgctggggtatgacattattatgtttaacattgctgatgaacgttaatcgtttttggaaagtgccacgtgagtctgcgaaattatcgagcatgacatttttatgtggttggcttgcattcgttggagcaattgtaactatttatattgcgactggcgagtggcgggtaccacaacatatagcgcatccgacatggtcattgttgacgaatgtactgcttgtattagctgtcatgataccggcagcacaatttccttttcatcgatggttgattgaatctgtaacagcaccaacgccagtatcggcaattatgcatgcaggaattgtgaatgcaggtggtgttattctaactcgttttgcgccgatatttgataatggatttgcgttatcattattacttatcctttcaagcatttctgtattgttaggatcaggtattagcttggttcaagttgactataaacgccaattagtgggctctacgatgagtcaaatgggctttatgttagttcaatgcgcacttggtgtatattcagcagcgattatacatttaatattgcacggtatttttaaggcaacattatttttacaatcaggttctatcgtgaagcgattcaatattccaaaacaagcatctgctaaagacgcttatggctggattgtcatgggacgtgtattagctattatcgtggcatttctgttttggatgagtagtgacagaagtgcatatgaagtgttaagtgcactcattctagcatggtcattacttgtatcttggaatcaaatggtagcctttagtaaagggcgtatggcacgtctggttggcatgattttgatttcaattgtgacatttatctacatcatcacacataattatttttacgatgtattacaaaatataacaacacatgcgacaacgccgcctacaattagtgtcatcattagtgttgtcatattaatatttggtagtttattaagtatctgggtagcgcgtcatcgatactctaaggcttttgcggtattgtacgtgtggttagttaatctaggtgaagcacgctcgaaagcgatagaaagtcatccgaattatttgaagaagtattta

SEQ ID NO: 4444 - DNA, 2387 bp, Staphylococcus aureus
ttaatagaaagtgctgtggcacgcggtgaattagacgaaagtgtctttaatcaacttgttactgatatgttacttgaacatcactacaatatcccgcaacactacatcaatctttatattgataacattaaaacattaaaagacgtacctgcatcatatatgaatcattcaaatgttgatgttgttgctgatctactattagaaaaatcaaaacgtgatatggctgaatcatatcatcactatgatgtacgtccgatgagtgatgcaataatagatgaacaaggtatgccacttagcgaacaagtgaatcgtcaaatgattaaatggacgaaactttatatcgatcaatttctatcgagttggacaatgccgaagcgtgagcaaagtttttaccatgcatggttgcatttagcgcaacatgaccatagttttactaaagcacagcgccaagtgattaaaggcttacccaatgatcctaaaatgacgatagagtcagtattaaatcatttttcaatagtgcaggaagactaccaagcttactttgaaggacatcttttggcgttaccgggttgggcaggtatgttgtattaccgttcacaacagcatcactttgaacaacatttgttaacggattatttggccattcggttagttgtcgaacaattgctagttggtgatgagtttaagtcagtcactaaagattgtgaaagtagatcggaaaattggtttaagcaaactgttgcatcatggtgttactacagtgatatgcctagcgatgtattactacaacatgacgtcaatgaaattaaaacgtttattcattttgcagcaactatgaataaaaatgtatttaaaaatttatggttgattgcctgggaaatgacatacgaatctcagttaaaacaaaaaattaaagcaggtcatgagagtttggcgggcgcattagatgcaattcaagtaaatgtttcggaaaatgacaacgctaatcagtcacattcagtatcgttaaatgccacacaagcagttgatgaaaataatagcgagctaaatcaggtgggcacatcaacgaaagcgcaaattgcattttgtatagacgttcgttcagaaccatttcgcagacatatcgaagcagcagggccctttgaaacgattggtattgcaggtttctttggattacctattcaaaaagaagccgtcgacgaacaattcaaacatgattcattacctgtcatggtaccgccggcatatcgcattaaagaatttgcggaccgttacgatatgaatgtttatcgacaacagcaacagacaatgtcatcgatgttttacacatttaaattgatgaaaaataatgtcatgcctagtctgttattgcctgaattaagtggaccatttttaagcttgagtaccattgtcaatacgattatgcctagaaaaagtcgcgcgtctttacagaaaataaaacaaaaatggttgaagaagcctgaaacaaagttaacgattgatcgtgagtttgacagaacatcagacttacctgttggatttactgagcaagagcaaattgatttcgcgttacaagcgttgaaattgatggatttaaccgaagcatttgcgccgttcgttgtgttagcaggtcatgctagtcattctcacaataatccacatcatgcatcacttgaatgtggggcttgtggtggtgcatcaagcggttttaatgctaagttattagcgatgatatgtaatcgtctaaatgtcagacaaggattaaaacaagcaggtgtagtaattccggagaccacggtctttgcagcagcagaacattatacgtctactgatacgttggcatgggtatatgtgccagatacattatcagctttagctctagatgcatatgaatcattgaatgacgctatgccgatgatttctgaacacgcgaatcgcgaacgtttggacaaactgtcaacgattggtcgtgtgaatcatccagtggaagaagcgcagcggtttgcgagtgattggagtgaagtacgtccggaatggggtctggctaaaaatgcatcatttataattggacgacgccaattaacaaaaggcattgatttagaagggcggacatttttacacaattatgattggtgtaaagataaagatggcacattgttaaataccatcatttctggtccggcacttgtggcacaatggattaatttacaatattatgcgtcgacagttgcgccgcatttttacggaagtgggaataaagcgacacaaaccgtcacgtcaggtgttggtgtcatgcaaggtaatgcgagtgatctgatgtatggcttatcatggcaatctgttatggctgctgatcgaacgatgtatcattcgccaattcgtttgct

SEQ ID NO: 4445 - DNA, 513 bp, Staphylococcus aureus
atggctgggataatcaaagagatttcaaaacaagatgctagtgaattagttgaattagcaactagaacattttatgacacgtttggttcttactatgatgacaaagattttgatcaatttttcgaagacaattatactgtagaaaaatttacacaagagattaaccatgtagattcatttcattatttttatcaagaagatggtgcgaatgttggttatataaagatgaatattaatagtgctcaaactgaagaaatgggggagacttatttagaagtgcagcgcatatactttttgaaagactttcaaggtggcggaagaggttcacaattgatagaattggccgaaaaaattgcacaagaacataataaacataaaatttggctaggagtttgggagcataatcctcgtgctcaagcattttataaacgtcatggatttaaagtggttggtgaacatcattttcaaacaggtgatgtaacggatacagatttaattatggaaaaagagtta

SEQ ID NO: 4446 - DNA, 1467 bp, Staphylococcus aureus
atgacaacacaacatagcaaaacagatgtcatcttaattggtggcggtattatgagtgcaacattaggaacattacttaaagaattatcacctgagaaaaatattaaagtgtttgaaaaattagcacaacctggcgaagagagttcaaatgtatggaataatgccggtacagggcattcagcactttgcgagttgaactatacaaaagaaggtaaggatggcacagttgattgtagtaaagcaattaagataaatgagcagtaccaaatttcaaaacagttttgggcatatttagttaaaacaggacaattagataacccagatcgctttattcaagcggtgccacacatgagtttcgtcattggcgaagataatgtagcttttataaaaagtcgtgttgcaacgttaaagaaaagtgttttattcgaaaaaatgaaattatcgcaagatgaagaagaaatgaaatcttgggtaccgttaatgattgaaggtcgtaagtttgatgaaccaattgctttaacttatgatgaaactggtacagatgttaactttggtgcgttaactgcaaagttatttgataatttagagcaacgtggtgtgggaattcaatataagcagaatgtattagacatcaaaaaacagaaatctggggcatggctagttaaagttaaagatttagaaacaaacgaaacgacaacatatgaatctgattttgtatttattggtgctggtggtgcgagtttaccattactccaaaagactggaattaaacaatcaaaacatattggtggtttcccggtaagtggattattcctgcgctgtacaaatcaagaagtgattgatcgtcatcatgctaaagtgtacggaaaagcagcagtgggtgcgccaccaatgtcagtgccgcacttagatacacgttttgtagacggcaagcgttcattgttatttggtccatttgcaggtttctcacctaaatttttaaaaacaggttcacatatggatttaattaaatcggttaaaccaaataatatcgtgacgatgttatctgcaggtatcaaagaaatgagtcttacgaagtatttagtgtcacaattgatgttatctaatgatgagcgtatggatgatttaagagtctttttcccaaatgctaaaaatgaagattgggaagtgattacagcagggcaacgtgtccaagtaatcaaggatactgaggattctaaaggtaacttacaatttggtaccgaagtcattacgtcagatgatggcacattagctgcattacttggtgcatcacctggtgcgtcaacagctgtagatattatgtttgatgttttacagcgatgctatcgtgatgaattcaaagggtgggaaccaaagattaaagaaatggtgccgtcatttggttatcgcttaacagatcatgaggatttatatcacaaaattaatgaagaagtaactaagtattta

SEQ ID NO: 4447 - DNA, 288 bp, Staphylococcus aureus
atgacaaaagtaacacgtgaagaagttgagcatatcgcgaatcttgcaagacttcaaatttctcctgaagaaacggaagaaatggccaacacattagaaagcattttagattttgcaaaacaaaatgatagcgctgatacagaaggcgttgaacctacatatcacgttttagatttacaaaacgttttacgtgaagataaagcaattaaaggtattccgcaagaattagctttgaaaaatgccaaagaaacagaagatggacaatttaaagtgcctacaatcatgaat

SEQ ID NO: 4448 - DNA, 1455 bp, Staphylococcus aureus
atgagcattcgctacgaatcggttgagaatttattaactttaataaaagacaaaaaaatcaaaccatctgatgttgttaaagatatatatgatgcaattgaagagactgatccaacaattaagtcttttctagcgctggataaagaaaatgcaattaaaaaagcgcaagaattggatgaattacaagcaaaagaccaaatggatggcaaattatttggtattccaatgggtataaaagataacattattacaaacggattagaaacaacatgtgcaagtaaaatgttagaaggttttgtgccaatttacgaatctactgtaatggaaaaactacataatgagaatgccgttttaataggtaaattaaatatggatgagtttgcaatgggtggttcaacagaaacatcttatttcaaaaaaacagttaacccatttgaccataaagcagtaccaggtggttcatcaggtggatctgcagcagcagttgcagctggcttagtaccatttagcttaggttcagacacaggtggttcaattagacaaccggctgcatattgtggcgttgtcggtatgaaaccaacatacggtcgtgtatctcgatttggattagttgcttttgcatcttcattagaccaaattggtccattgactcgaaatgtaaaagataatgcaatcgtattagaagctatttctggtgcagatgttaatgactctacaagtgcacctgttgatgatgtagactttacatctgaaattggtaaagatattaaaggattaaaagttgcattacctaaagaatacttaggtgaaggtgtagctgatgacgtaaaagaagcagttcaaaacgctgtagaaactttaaaatctttaggtgctgtcgttgaggaagtatcattgccaaatactaaatttggtattccatcatattacgtgattgcatcatcagaagcttcgtcaaacctttctcgttttgacggtattcgttatggttatcattctaaagaagctcattcattagaagaattatataaaatgtcaagatctgaaggtttcggaaaagaagtaaaacgtcgtattttcttaggtacatttgcattaagttcaggttactacgatgcttactataaaaaatctcaaaaagttagaacattgattaaaaatgactttgataaagtattcgaaaattatgatgtagtagttggtccaacagcgcctacaactgcgtttaatttaggtgaagaaattgatgatccattaacaatgtatgccaatgatttattaacaacaccagtaaacttagctggattacctggtatttctgttccttgtggacaatcaaatggccgaccaatcggtttacagttcattggtaaaccattcgatgaaaaaacgttatatcgtgtcgcttatcaatatgaaacacaatacaatttacatgacgtttatgaaaaatta

SEQ ID NO: 4449 - DNA, 1425 bp, Staphylococcus aureus
atgcattttgaaacagttataggacttgaagttcacgtagagttaaaaacggactcaaaaatgttttctccatcaccagcgcattttggagcagaacctaactcaaatacaaatgttatcgacttagcatatccaggtgtcttaccagttgttaataagcgtgcagtagactgggcaatgcgtgctgcaatggcactaaatatggaaatcgcaacagaatctaagtttgaccgtaagaactatttctatccagataatccaaaggcatatcaaatttctcaatttgatcaaccaattggtgaaaatggatatatcgatatcgaagtcgacggtgaaacaaaacgaattggtattactcgtcttcacatggaagaagatgctggtaagtcaacacataaaggtgagtattcattagttgacttgaaccgtcaaggtacaccgctaattgaaatcgtatctgaaccagatattcgttcacctaaagaagcatatgcatatttagaaaaattacgttcaattattcaatacactggtgtatcagacgttaagatggaagaaggatctttacgttgtgatgctaacatctctttacgtccatatggtcaagaaaaatttggtactaaagccgaattgaaaaacttaaactcatttaactatgtacgtaaaggtttagaatatgaagaaaaacgccaagaagaagaattgttaaatggtggagaaatcggacaagaaacacgtcgatttgatgaatctacaggtaaaacaattttaatgcgtgttaaagaaggttctgatgattaccgttacttcccagagcctgacattgtgcctttatatattgatgatgcttggaaagagcgtgttcgtcagacaattcctgaattaccagatgagcgtaaagctaagtatgtaaatgaattaggtttacctgcatacgatgcacacgtattaacattgactaaagaaatgtcagatttctttgaatcaacaattgaacacggtgcagatgttaaattaacatctaactggttaatgggtggcgtaaacgaatatttaaataaaaatcaagtagaattattagatactaaattaacaccagaaaatttagcaggtatgattaaacttatcgaagacggaacaatgagcagtaaaattgcgaagaaagtcttcccagagttagcagctaaaggtggtaatgctaaacagattatggaagataatggcttagttcaaatttctgatgaagcaacacttctaaaatttgtaaatgaagcattagacaataatgaacaatcagttgaagattacaaaaatggtaaaggcaaagctatgggcttcttagttggtcaaattatgaaagcgtctaaaggtcaagctaatccacaattagtaaatcaactattaaaacaagaattagataaaaga

SEQ ID NO: 4450 - DNA, 882 bp, Staphylococcus aureus
aaacgtgctagaatcatttataacccgacatcaggtaaagagcaatttaaaagagaattacctgatgccttaataaaattagaaaaagcgggatatgaaacgagtgcatatgcaaccgagaaaatcggtgatgccacacttgaagcagaaagagctatgcatgaaaattatgatgtattaatcgctgcaggtggtgacggaacattaaatgaagtagttaatggtatcgcagaaaagcctaatcgtcctaagctaggtgtcattcctatgggtactgttaatgactttggacgtgcattgcatatacctaatgacatcatgggggcacttgatgtcatcattgaaggtcattctactaaagtagatattggtaaaatgaataatcgatactttattaatttagctgcaggcggacaattgacgcaggtctcttatgaaacaccgagtaaattgaaatctattgttggtccatttgcttattacatcaaaggtttcgaaatgttacctcaaatgaaagctgtagatttaagaattgaatatgatggtaatgttttccaaggagaagcattattattctttttaggtttaacaaattcaatggcaggatttgaaaaattagtgccggacgctaagttagatgacggctattttacgttaattatagttgaaaaatcaaaccttgcagaacttggtcatattatgactttagcttcaagaggagaacatactaagcatcctaaagttatttatgaaaaagcaaaggcaattaatatttcatcattcacagacttacaactaaatgtagatggagaatatggtggtaaattaccagcgaatttcttgaatctagaacgtcatatagatgtctttgcacctaatgat

SEQ ID NO: 4451 - DNA, 1203 bp, Staphylococcus aureus
atgagtgaaaaaaagattttgattttatgtcagtatttttatccggaatatgtatcttctgcgacgttaccaacacaattggcagaagatttaattgcgaatcacattaatgtcgatgtcatgtgtggatggccatatgaatatagtaatcataaacaggtttctaaaaccgagatgcatcgtggtattcgcattcgacgtctcaagtattcgaggtttaataacaaaagtaaggttggaaggatcatcaatttctttagtttattttcaaaattcgtgattaatatacctaaaatgttgaaatatgatcagattcttgtttactctaatccaccaatcttgccattaataccagacgtactacacagactgcttaagaaaaaatattcttttgtggtgtatgatatagcacctgataatgcgattaagacaggtgcaacacgtccaggtagcatgattgataaactgatgcgttacattaataaacatgtctacaagaatgctgaaaatgtcattgtccttggtacggaaatgaaaaactatttagtaaatcatcaaatttctaaaaatcctgacaatattcatgtgatccctaactggtatgacatgcgtcagttacaagacaatcgtatctataatgacacatttaaagcttaccgtgagcaatacgacaaaattatattgtatagcggtaatatggggcagttacaggatatggagacacttatctcatttttaaaattaaataaggatcagcctcaaacgttaacaatactttgtggtcatggtaagaaatttgcagatgtcaaaacggcaatagaagaccatcgtattgaaaatgttaaaatgtttgagtttttaacaggtacagactatgctgacgtattaaaaattgcggatgtatgtattgcatcgctgattaaagaaggcgttggtttaggcgtgccgagcaagaattatggctaccttgcagctaagaagccgttggtactcatcatggataagcaatctgatatcgttcaacatgttgaacaatatgatgcgggtatccaaattgataatggcgatgcacatgccatttataacttcatcaacactcactcgagtaaggaattgcacgagatgggtgagcgcgcacatcaactgtttaaagataaatatacgagagaaattaatactatgaagtattacaatctgttgaag

SEQ ID NO: 4452 - DNA, 555 bp, Staphylococcus aureus
atgaagcgattattcgatgtagtgagttcaatatatggtttagtagttttaagtccgattctgttaattacagcattactaattaaaatggaatcacctggaccagccattttcaaacaaaaaagaccgacgattaataatgaattgtttaatatttataagtttagatcaatgaaaatagacacacctaatgttgcaactgatttaatggattcaacatcgtatataacaaagacagggaaggtcattcgcaagacctctattgatgaattgccacaattattgaatgttttaaaaggagaaatgtcaattgtaggtcctagaccagcgctttataatcaatacgaattaatcgaaaaacgtacaaaagcgaacgtgcatacgattagaccaggtgtgacagggctagctcaagtgatggggagagatgatattactgatgatcaaaaagtagcgtatgatcattattacttaacacatcaatctatgatgcttgatatgtatatcatatataaaacaattaaaaatatcgttacttcagaaggtgtgcatcac

SEQ ID NO: 4453 - DNA, 897 bp, Staphylococcus aureus
caaaaaaatatattaaaaagtggtattgcattatctgaattaggtctaggttgcatgagtttaggtacagatttaaaaaaagccgaacaaattatagattgtgctgttgaaaatggtatcacttattttgatacagcagacatgtacgataaaggtataaatgaatcagttgttggtaaggcacttcttaaatatcaacaacgcgatgatattgtcattggtactaaagtaggcaatcgtttaacaaatgatggcagtacaacatgggatccgagtaaatcctatattaaagaggcggttaaaggttcactaaagcgtttaggtattgatcatatcgatttatatcaacttcatggcggaaccattgatgacccattagacgaaacaataagcgcatttgatgaattgaaacaagaaggaattatacgtgcttacggtatttcttctattcgcccaaatgtaattgattattatttaaaacatagtcaaatcgaaacgattatgtctcaattcaatttgattgataatcgtccagaatcattattagatgcaatccacaacaatgatgttaaagtattggcaagaggacctgtgtctaaaggattattaacttcaaacagtgttaatgtgctcgacaataaatttaaagatggtatttttgattattctcatgatgaattgggtgaaacaatagcctctattaaagaaattgaaagtaatttatctgcattgacatttagttatttaacatcacatgacgtgcttggttccatcattgtgggtgcaagtagcgtcgaccaattaaaagaaaatattgaaaactatcatactaaagttagtttagatcagattaaaacagcaagagctcgtgtaaaggatttggaatataccaatcat

SEQ ID NO: 4454 - DNA, 1461 bp, Staphylococcus aureus
aacaaacacatcccttgtttaatcacaatctttggtgcaactggtgacttaagccatcgtaagttgtttccatcaatattccatctctaccaacaagacaatttagatgaacatattgccatcatcggtattggacgtcgtgacattactaatgatgatttccgtaatcaagtaaaatcatcaattcaaaagcacgtaaaagatacaaacaaaattgacgcgtttatggaacatgtcttctatcatagacatgatgttagtaatgaagaaagctatcaagaattattagattttagtaatgaattagatagccaatttgaattaaaaggtaatcgactattctatttagcaatggcaccacaattctttggcgttatttctgattatctaaaatcttctggtcttactgatacaaaaggatttaaacgccttgttatcgaaaaaccattcggtagtgatttaaaatcagccgaagcattaaacaatcaaattcgtaaatcatttaaagaagaagaaatttatcgtattgaccactatttaggaaaagacatggttcaaaatatcgaggtattacgttttgcgaatgcgatgtttgaaccattatggaataacaaatatatttcaaacatccaagttacatcttctgaaatactaggtgttgaagatcgtggtggttattatgaatcaagtggtgcgctaaaagatatggtgcaaaaccacatgttacaaatggttgcattattagctatggaagcacctattagtttaaatagtgaagatatccgtgctgagaaagtaaaagtacttaaatcactgcgtcatttccaatctgaagatgttaaaaagaactttgttcgtggtcaatatggcgaaggctatatcgatggtaaacaagttaaagcataccgtgatgaagatcgcgttgcagatgactctaacacacctacctttgtttcaggtaaattaacaattgataactttagatgggctggcgtaccattctatattcgtactggtaaacgtatgaaatctaaaacaattcaagttgtcgttgaatttaaagaagtaccaatgaacttatactatgaaactgataaactgttagattcaaacctattagtaatcaatattcaacctaatgaaggtgtatctttacatctaaatgctaagaaaaatacacaaggtatcgaaactgaacctgttcaattgtcttattcaatgagcgctcaagataaaatgaatactgtagatgcatatgaaaatctattattcgattgtcttaaaggtgatgccactaactttacgcactgggaagaattaaaatcaacatggaaatttgttgatgcaattcaagatgaatggaatatggttgatccagaattccctaactatgaatcaggtactaatggtccattagaaagtgatttattacttgctcgtgatggtaaccattggtgggac

SEQ ID NO: 4455 - DNA, 1638 bp, Staphylococcus aureus
atgaataagcaatggtggaaagaagcagtagcatatcaagtatatccaagaagttttaatgatagtaatcacgatggtattggggatttacctggaatgattgataaattggactacttaaaagatttaggtatcgatgtcatttggctcagtccaatgtttaaatcacctaatgatgataatggttatgatattagtgactaccaagagattatggatgaatttggaacgatggaagactttgatcgtttattaaaaggtgttcatgatagaggtatgaagcttattttagatttagttgtgaatcatacatctgatgaacatccttggtttatagaatccaaatctagtaaagacaatcccaaacgtgattggtacatttggcaagatccaaagccagatggctctgaacctaacaactgggaaagtatatttaatggatctacatgggaatatgatgctaatactgagcaatattatttccatttattcagtaaaaaacaacctgatttgaattggggtaatccggaagttagagatgctgtattcgaaatgatgaactggtggtttgataaaggcattgatggatttagagtagatgcaattacgcatattaagaagacgtttgaagcgggtgacttacctgtacctgagggtaaaacatatgccccagcatttgatgtagatatgaatcagccaggtatacaaacttggttacaagagatgaaagatcgctcattaagtaagtatgacattatgactgttggtgaagcgaatggtgtaagccctgatgatgctgatgactgggtcggggaagaaaatggtaaatttaatatgatattccaatttgaacatttgggactgtggaatagtggtgattctcattttgatgtaaattcgtataaatctgtattaaatagatggcaaaaacaacttgaaaataaaggttggaatgcgttgtttattgaaaatcatgaccaaccacgacgtgtatcgacgtggggtgacgatgacaagtattggtatgaatcagcaacaagtcatgcagctgtttatttcttgcaacaaggtacgccattcatttatcaaggtcaagaaattggtatgacgaattatccatttgaaagtattgaaacatttaacgatgttgctgttaaaaatgactatcaaattgtgaaagctcaaggtggagatgtagacgctttacttgcgaaatataaagatgagaaccgagataattctcgcacaccaatgcaatgggatgatacgttaaatggaggatttacaaatggtgaaccgtggttcccagtgaatccgaattataaaactatcaatgttgcactacaattagaagatgagcattcagtattacaattttataaagatttaattcaattaagaaaatctaatgatgtatacgtatatggtcaatttgatttagtagatgctgaaaattcacaagtttttgcatacatgagaacattaaatgaaaagcaagttcttatagtaggtaatcttactaaccacgaagcagaattaactgtaccatttgatgtaagtcatggagaagtgaagctatttaattatgatgccaaagttaatttaaaacagttgcgtccatatgaagcatgtgttatc

SEQ ID NO: 4456 - DNA, 1023 bp, Staphylococcus aureus
atggttacgattaaagatgttgcactaaaagccggtgtttctccttcgacagtttcaagagttataaaaggaaatcaacgtattagtgaagcgacaatttcaaaagtgaagaaagttatggaagaattgaattattttcctaataccgctgctagaactttaattactaaccaaacatataaaattggtttagtgttaaaagggtctgaggagcctattcgactgaatccattctacatcaatgtattgctaggaatttctgaaacgtgtaaccagcatggctatggtacacaaacgacagtctcaaataatatgaatgatttaatggatgaagtttataaaatgattaaacaacgaatggttgatgcgtttatactgctctattcaaaagaaaatgatccgattaaacaaatgttaattgatgaaagtatgccatttattgtgattggtaagcctacatcggatatagatcatcaatttacacatatagataatgataatatattagcttctgaaaatttgacacgacatgttattgaacaaggtgtagatgaattaatatttattacagaaaaaggaaattttgaagtttcgaaagacaggattcaaggatttgaaacgatagcttctcaaaataaaattaattatcaaattattgagactagtaatgaaagagaagttatttttaattacatgcaaaatctacatacgcgtttgaaggacccaaatattaaacaggcaatcatttcgttagatgctatgttacatttagcgattttaagtgtcctatatgaacttaatattgaaattccgaaagatgtaatgacagcaacgttcaatgattcttatttaaccgaaattgcgtcaccacctcaaaccagtattgacatcaagcctcgaatgttagggcaacaagccgggtctgctattttaaatatattaaaaaacaaagcacaggatgttattgaactggtcattatagatacagaattaaaaataagaaaatcaacacagcgatagcaa

SEQ ID NO: 4457 - DNA, 1029 bp, Staphylococcus aureus
tcaatggaaccaatattagaaatgattaaaacattaacaggtattaatagtccttcaggagacacagaagaagcaattcaatttgtcgaaaaatatgcaaaagacttaggttatcaaacaacactaacaaataaaggtgcgttattaataacagtgccaggcaaaaatgatgaagtacaacgctgtattactgctcatgttgatactttaggtgcaatggttaaagaaattaaagaagatgggcgcttagcaatagaattaattggaggattcacgtataacgcgattgagggtgaatattgccaaattaaaactgatgctggccaaatatatacaggaaccatttgtctgcatgaaacaagtgttcatgtatatagaaataatcatgaaatacctagagaccaaaagcatatggaaataagaattgatgaagtaactacatcagaagaagatacaaagagtttaggtatttcagtaggtgattttgttagctttgatccacgtacagttatcacgtcatcaggttttattaaatctcgtcatttagatgataaagctagcgtagcgatgatactacaattactaaagaaattaaaagaagagcaaataatattaccacatacaacacaattttatatttctaataacgaagaaataggttacggtgcaaatgcatcaattgattcgaaaatcaaagaatatattgcattagatatgggtgcgttgggagacggtcaagcatcggatgaatatacagtttctatttgtgccaaagatgcttcaggtccatatcataagcaattgaaatcacacctagttaatctttgcaaaataaataatattccatataaagtagacatatatccatattatggttcagatgcttcagcagctttacatgctggtgcggatatcagacatggtttatttggggctggcattgaatcatctcatgcaatggaacgaacacatattgattctattaaagcgacagagaaattattatatgcatattgcttatcaccaatt

SEQ ID NO: 4458 - DNA, 606 bp, Staphylococcus aureus
tttataacttttgagggcccagaaggctcaggtaaaacaactgtaattaatgaagtttatcatagattagtaaaagattatgatgtcattatgactagagaaccaggtggtgttcctactggtgaagaaatacgtaaaattgtattagaaggcaatgatatggacattagaactgaagcaatgttatttgctgcatctagaagagaacatcttgtattaaaggtcataccagctttaaaagaaggtaaggttgtgttgtgtgatcgctatatcgatagttcattagcttatcaaggttatgctagagggattggcgttgaagaagtaagagcattaaacgaatttgcaataaatggattatatccagacttgacgatttatttgaatgttagtgctgaagtaggccgcgaacgtattattaaaaattcaagagatcaaaatagattagatcaagaagatttaaagtttcacgaaaaagtaattgaaggttaccaagaaatcattcataatgaatcacaacggttcaaaagcgttaatgcagatcaacctcttgaaaatgttgttgaagacacgtatcaaactatcatcaaatatttagaaaagata

SEQ ID NO: 4459 - DNA, 651 bp, Staphylococcus aureus
atggctgtattatatttagtgggcacaccaattggtaatttagcagatattacttatagagcagttgatgtattgaaacgtgttgatatgattgcttgtgaagacactagagtaactagtaagctgtgtaatcattatgatattccaactccattaaagtcatatcacgaacataacaaggataagcagactgcttttatcattgaacagttagaattaggtcttgacgttgcgctcgtatctgatgctggattgcccttaattagtgatcctggatacgaattagtagtggcagccagagaagctaatattaaagtagagactgtgcctggacctaatgctgggctgacggctttgatggctagtggattaccttcatatgtatatacatttttaggatttttgccacgaaaagagaaagaaaaaagtgctgtattagagcaacgtatgtatgaaaatagcacattaattatatacgaatcaccgcatcgtgtgacagatacattaaaaacaattgcaaagatagatgcaacacgacaagtatcactagggcgtgaattgactaagaagttcgaacaaattgtaactgatgatgtaacacaattacaagcattgattcagcaaggcgatgtaccattgaaaggcgaattc

SEQ ID NO: 4460 - DNA, 768 bp, Staphylococcus aureus
atgttaatcgatacacatgtccatttaaatgatgagcaatacgatgatgatttgagtgaagtgattacacgtgctagagaagcaggtgttgatcgtatgtttgtagttggttttaacaaatcgacaattgaacgcgcgatgaaattaatcgatgagtatgattttttatatggcattatcggttggcatccagttgacgcaattgattttacagaagaacacttggaatggattgaatctttagctcagcatccaaaagtgattggtattggtgaaatgggattagattatcactgggataaatctcctacagatgttcaaaaggaagtttttagaaagcaaattgctttagctaagcgtttgaagttaccaattatcattcataaccgtgaagcaacacaagactgtatcgatatcttattggaggagcatgctgaagaggtaggcgggattatgcatagctttagtggttctccagaaattgcagatattgtaactaataagctgaatttttatatttcattaggtggacctgtgacatttaaaaatgctaaacagcctaaagaagttgctaagcatgtgtcaatggagcgattgcttgttgaaaccgatgcaccgtatctttcgccacatccgtatagagggaagcgaaatgaaccggcgagagtaactttagtagctgaacaaattgctgaattaaaaggcttatcttatgaagaagtgtgcgaacaaacaactaaaaatgcagagaaattgtttaatttaaat

SEQ ID NO: 4461 - DNA, 528 bp, Staphylococcus aureus
atgaaaatcaatgagtttatagttgtagaaggacgagatgatactgagcgtgttaaacgagctgttgaatgtgatacgattgaaacgaatggtagtgccatcaacgaacaaactttagaagtaattagaaatgctcaacaaagtcgaggcgttattgtattaacagatccagattttccaggagataaaattagaagtacaattactgaacatgtcaaaggtgttaaacacgcgtatattgatagagaaaaagctaaaaataaaaaagggaaaattggtgttgaacatgccgacttaattgatattaaagaagcgttaatgcatgttagttcaccctttgatgaagcttatgaatcaattgataaatctgtgcttatagagttggggttaatcgttgggaaagatgcaaggcgccgtagagaaattttaagtagaaaattgcgaatcggccattccaatggtaagcagttattgaaaaagttaaatgcatttggttataccgaagcggatgtaaggcaagctttagaa

SEQ ID NO: 4462 - DNA, 846 bp, Staphylococcus aureus
aataaagatattgcaacaccatcaagaacgcgagcgttgttagataaatatggctttaattttaaaaaaagtttaggacagaactttttaatagatgtgaatatcattaataatatcattgatgcaagtgatattgatgcacaaactggggtgattgaaattggtccaggtatggggtcattgacagaacaattggccagacatgctaaaagagtattggcatttgaaattgatcaacgattaataccggtattaaatgatacattatcaccttatgataatgtgacggtgattaatgaagatattttaaaagcgaatattaaaaaagctgttgaaaatcatttacaagattgcgaaaaaataatggttgttgcaaacctgccgtactatattacgacgccaattttattaaatttaatgcaacaagatataccaattgatggctacgtggtgatgatgcaaaaagaagtgggcgaacgcttaaatgctgaagtaggttcaaaagcatatggttcattatcaattgtcgtacaatactatacagagactagtaaagtattaacggtacctaaatctgtatttatgccaccacctaatgttgattcaatagttgtaaaactgatgcagagaactgaaccgttagtaacagtagataacgaggaagcattctttaagttagcaaaagcagcatttgcacaaagaagaaagacaattaataacaactatcaaaattattttaaagatggtaaacaacacaaagaagtgattttacaatggttagaacaagcgggtattgatccaagacgtcgcggtgaaacgctatctattcaagattttgctaaattg

SEQ ID NO: 4463 - DNA, 2403 bp, Staphylococcus aureus
gtgagtttgttacatattgcggtgatattaccgttaatattcgcactcattattcctatcctgtatagattttttaaacgtatacatttaggatggttcgtattacctgtccctatcgtcatatttatttatatgcttacattaattaaaacgacgatgtcaggtaatactgtaatgaaaaccttaaattggatgcctcattttggtatgaactttgatttatatcttgatggcttaggtttactctttagtttgcttatttcaggaatcggcagtttagtagtattatattcaatcggctacttaagtaagtcagaacaactagggaatttttattgttatttattactatttatgggtgcaatgttaggtgtcgtactttcagataatgttattattctatatttattctgggagctaacgtcattttctagttttttacttatttcattctggcgcgaacgacaagcatctatatatggtgctcaaaaatcgctcataatcacagtatttggtggtctatcattattaggtggtatcatcttactcgctataccaacgcaatcatttagcattcagtacatgattcaacatgcttctgaaattcaaaatagcccattcttcatttttgcgatgattttaatcatgattggtgcttttacaaaatctgctcagtttccattttatatttggctaccagatgcaatggaagcacctacaccagtcagtgcttatcttcattcagcaacaatggttaaagcagggttatatttaatcgctcgaatgacaccaatcttcgcagcatcgcaaggttggatatggactgtcacactcgttggtttaattacgttattctgggcttcgctaaacgcaacaaaacaacaagacttgaaaggtatactggcattttcaacagtatcccaattaggtatgattatggcgatgcttggaatcggtgccattagttatcactatcaaggcgatgatagcaaaatatatgctgctgcatttacggctgcaatattccatttaatcaaccatgcaacatttaaaggtgccctatttatgattacaggtgcagtggatcattctactggtacacgtgatgttaagaaattaggtggcttactaacaattatgcctatttcatttacaatcactgttattacagcattaagtatggctggtgtaccaccgttcaatggtttcttatcaaaagaatcatttttagaaacaacatttacagcaagccaagcaaatttattcagtgttgatacattaggctacctattcccaatcattggtatagtgggcagtgtcttcacatttgtatattcaattaaatttataatgcatatatttttcggacaatataaacctgaacaattacctaaaaaagcacacgaagtatcaatattaatgcttttatcaccagctattttagctacattagtaattgtatttggtttattccctggcattttaactaattcgattattgaaccagctacatcttcgattaatcatacggtaattgatgatgttgaattccatatgttccatggattaacgcctgcctttttatcaacattagtgatttatattttaggtattttactaattgtgacatttagttattgggtgaaattgttgcaacgacaacctggtaaactaacattcaattattggtacaacagaagtgcaaatgttattccaaactactctgaaaagatgacgaatagctatgttaccgattattcacgtaataatttagttatcatttttggtgcattaattttattaacatttgtcactgtattctcagtacctttcaacattaattttaaagacgttagtccgattagaattttcgaagtttgtatcgtaattttattattaagtgctgcctttttaattcttttcgctaaatcaagattatttagcatcattatgttaagtgcagttggatatgctgtgtctgtattgtttatattctttaaagcacccgacttagcattgacacagtttgtcgttgaatctatttcaacagcattgttcttattatgcttctaccacttaccaaatttaaatcgttataatgaaaagcgctcattccagcttactaatgctttaattgctggtggtgttggtttgtccgtcattattatcggtttaattgcatacggaaatagacattttgaatcgatatctaagttttatcaagagcacgtttatgatttagctcacggtaaaaacatggtaaacgttatacttgttgatttccgtggtatggatactttattcgagtcatctgtgcttggtatcgcaggattagctgtatatacaatgattaaattacgtaaaaagcgtcaaacgcaaggtaacgaggtgaaaaatcatgaa

SEQ ID NO: 4464 - DNA, 420 bp, Staphylococcus aureus
agacaacaaaatgatctaattttgcaatttgctgcagttattatctttttcatggtaatggtctttggtttttcacttttcttagcaggacattatacacctggtggcggtttcgtcggcggattattattcgcaagttcacttgtaatcattacgattgcatttgatatagaaacaatgcgtaaaattttcccattagattttaaaatcttgataggtatcggattagttttttgtattgcgacgcctatcgcaagttggtttttaggtaaaaatttctttacgcatgtcacatttgatataccgttatttatattagaacctgttcatatgacaacagcagtattctttgatttcggtgttttatgtgcagtagttggtactgtcatgacaattattatttcgattggagagaacgaa

SEQ ID NO: 4465 - DNA, 2157 bp, Staphylococcus aureus
agcttgagtggcttatctaaagtatcagcattcattcatcgcgctgatattggcggcgttttaaatgtatcagagcttaacttgataaaaagattaattcaagtacaaaatcaatttaagacattttataatcaattggttgaagaagatgaaggtgttaaatacccaatattagatgacaagatgaatcaattacctgtgttaaccgatctttttcaacaaataaatgaaacatgtgatacgtacgatttatatgataatgcgagttatgaattgcaagggattagaagtaaaatttctagcacgaatcaacgtattagacaaaatttggaccgtattgttaaaagccaagcaaatcagaaaaaattatcagatgctattgtaacagttaggaatgaaagaaacgttatacctgtcaaagctgaatatcgacaagattttaatgggattgtacatgatcaatctgcttcaggacaaacattgtatattgagccatcatcagttgttgaaatgaataatcaaattagtcgattacgtcatgatgaagcaattgaaaaagaacgcattttaacgcaactaactggttatgtggctgcggacaaagatgcactacttgtggcagaacaagtcatgggtcagttagattttttaatcgcaaaagcgagatatagtagaagtattaaaggaacaaagccgatatttaaagaggaacgtactgtatatttacctaaagcataccatccattattaaatcgtgagactgttgtagctaataccatcgaatttatggaagatattgaaacggtaattattacaggaccgaatactggtggtaaaacagtaacattaaaaacattaggtttaattattgttatggctcaatcaggattgttgattccaacacttgatggtagtcagttgagtgtatttaaaaatgtatattgcgatgtcggagatgaacaatcaatagaacaatcattatcaactttttcatctcatatgacgaatatagttgagattttaaagcatgcagacaaacatagtttagttttatttgatgaattaggtgcaggtacagatccaagtgaaggtgctgctttagcaatgagcattttagaccatgttagaaaaattggttctctagtaatggcaacgacgcactatcctgaacttaaagcatatagttataatcgagaaggcgttatgaatgcgagtgtagaatttgatgtagatactttgagtccaacgtataagttattaatgggtgtgccaggtcgttcaaatgcttttgacatttctaaaaagttaggtcttagtttgaatattattaataaggctaagacgatgattggtactgatgaaaaagaaataaatgaaatgattgaatcattagagcgtaattacaaacgtgtagagacacagaggttagaactggatcgtcttgtaaaagaagcggagcaagtgcatgatgatttatctaagcagtatcaacaattccaaaattatgaaaagtctctaatagaggaagcgaaagaaaaagcaaatcaaaagattaaagctgcaacaaaagaagctgacgatattattaaagatttaagacaattgcgtgaacaaaaaggtgcagatgttaaagaacatgaattgattgataagaagaaacgattagatgatcattatgaagcgaaatctataaagcaaaatgtacaaaagcaaaaatacgataaaattgttgctggtgatgaagtaaaagtattatcttacggtcaaaagggtgaagttttagaaattgtcaatgatgaagaagcaattgttcaaatgggaattattaaaatgaagttacctattgaagatttagagaaaaaacaaaaagaaaaagttaagccaacgaaaatggttacacgtcaaaatcgtcaaacaattaaaactgaacttgacttacgaggctatcgttatgaggatgctttaattgaactagatcaatatttagatcaagccgttttaagtaattacgaacaagtttatatcattcatggtaaaggtacaggtgcacttcaaaaaggtgtacaacaacatttgaaaaagcataaaagtgttagtgactttagaggtggtatgccaagcgaaggtggatttggcgttaccgttgcaactctaaaa

SEQ ID NO: 4466 - DNA, 606 bp, Staphylococcus aureus
atgagtcattattatgatgaagatccaagtgtaattagcaatgaacaacgtattcaatatcaattaaatcatcataaaattgatttaataactgataacggagtgttttcgaaagataaagtagattatggttcagatgttcttgttcaaactttttttaaaacgcatccacctggtccaagtaagcgaattgccgatgttggttgtggttacggaccaattggtttgatgattgctaaagtattaccacatcattcaattacgatgttagatgttaatcacagagcgctagccttagttgaaaaaaaccaaaaattaaacggtattgataatgtgatcgtaaaggaaagtgatgctttgtctgctgtggaagacaaaagttttgattttattttaaccaatccaccaataagagcagggaaagaaaccgtgcatcgtatattcgagcaagcattacatagattagactcgaatggtgaactattcgttgtaattcagaagaagcaaggtatgccatctgcaaagaaaagaatgaatgaactttttggaaatgtagaagtggtaaataaagataaaggatattacattctgagaagtataaaagct

SEQ ID NO: 4467 - DNA, 3537 bp, Staphylococcus aureus
ttggcaggtcaagttgtccaatatggaagacatcgtaaacgtagaaactacgcgagaatttcagaagtattagaattaccaaacttaatagaaattcaaactaaatcttacgagtggttcctaagagaaggtttaatcgaaatgtttagagacatttctccaattgaagattttactggtaatttgtcattagagtttgtggattaccgtttaggagaaccaaaatatgatttagaagaatctaaaaaccgtgacgctacttatgctgcacctcttcgtgtaaaagtgcgtctaatcattaaagaaacaggagaagttaaagaacaagaagtctttatgggtgatttcccattaatgactgatacaggtacgttcgttatcaatggtgcagaacgtgtaatcgtatctcaattagttcgttcaccatccgtttatttcaatgaaaaaatcgataaaaatggtcgtgaaaactatgatgcaacaattattccaaaccgtggtgcatggttagaatatgaaacagatgctaaagatgttgtatacgtgcgtattgatagaacacgtaaactaccattaacagtattgttacgtgcattaggtttctcaagtgaccaagaaattgttgaccttttaggtgacaatgaatatttacgtaatactttagagaaagacggcactgaaaacactgaacaagcgttattagaaatctatgaacgtttacgtccaggtgaaccaccaactgttgaaaatgctaaaagtctattgtattcacgtttctttgatccaaaacgctatgacttagcaagcgtgggtcgttataaaacaaacaaaaaattacatttaaaacatcgtttattcaatcaaaaattagctgagccaattgtgaatactgaaactggtgaaattgtagttgaagaaggtacagtgcttgatcgtcgtaaaatcgacgaaatcatggatgtacttgaatcaaacgcaaacagcgaagtgtttgaattgcatggtagcgttatagacgagccagtagaaattcaatcaattaaagtatatgttcctaacgatgaagaaggtcgtacgacaactgtaattggtaatgctttccctgactcagaagttaaatgtattacaccagcagatatcatcgcttcaatgagttacttctttaacttattaagtggtattggatatacagatgatattgaccatttaggtaaccgtcgtttacgttctgtaggtgaattactacaaaaccaattccgtatcggtttatcaagaatggaaagagttgtacgtgaaagaatgtcaattcaagatactgagtctatcacacctcaacaattaattaatattcgacctgttattgcatctattaaagaattctttggtagctctcaattatcacaattcatggaccaagcaaatccattagctgagttaacgcataaacgtcgtctatcagcattaggacctggtggtttaacacgtgaacgtgctcaaatggaagtacgtgacgttcactactctcactatggccgtatgtgtccaattgaaacacctgagggaccaaacattggattgattaactcattatcaagttatgcacgtgtaaatgaattcggctttattgaaacaccatatcgtaaagttgatttagatacacatgctatcactgatcaaattgactatttaacagctgacgaagaagatagctatgttgtagcacaagcaaactctaaattagatgaaaatggtcgtttcatggatgatgaagttgtatgtcgtttccgtggtaacaatacagttatggctaaagaaaaaatggattatatggatgtatcgccgaaacaagttgtttcagcagcgacagcatgtattccattcttagaaaatgatgactcaaaccgtgcattgatgggtgcgaacatgcaacgtcaagcagtgcctttgatgaatccagaagcaccatttgttggtacaggtatggaacacgttgcagcacgtgattctggtgcagctattacagctaagcacagaggtcgtgttgaacatgttgaatctaatgaaattcttgtacgtcgtctagttgaagagaacggcgttgagcatgaaggtgaattagatcgctatccattagctaaatttaaacgttcaaactcaggtacatgttacaaccaacgtccaatcgttgcagttggagatgttgttgagtataacgagattttagcagatggaccatctatggaattaggagaaatggcattaggtagaaacgtagtagttggtttcatgacttgggacggttacaactatgaggatgccgttatcatgagtgaaagacttgtgaaagatgacgtgtatacttctattcatattgaagagtatgaatcagaagcacgtgatactaagttaggacctgaagaaatcacaagagatattcctaatgtttctgaaagtgcacttaagaacttagacgatcgtggtatcgtttatattggtgcagaagtaaaagatggagatattttagttggtaaagtaacgcctaaaggtgtaactgagttaactgccgaagaaagattgttacatgcaatctttggtgaaaaagcacgtgaagttagagatacttcattacgtgtacctcacggcgctggcggtatcgttcttgatgtaaaagtattcaatcgcgaagaaggcgacgatacattatcacctggtgtaaaccaattagtacgtgtatatatcgttcaaaaacgtaaaattcatgttggtgataagatgtgtggtcgacatggtaacaaaggtgtcatttctaagattgttcctgaagaagatatgccttacttaccagacggacgtccgatcgatatcatgttaaaccctcttggtgtaccatctcgtatgaacatcggacaagtattagagctacacttaggtatggctgctaaaaatcttggtattcacgttgcatcaccagtatttgacggtgcaaacgatgacgatgtatggtcaacaattgaagaagctggtatggctcgtgatggtaaaactgtactttatgatggacgtacaggtgaaccattcgataaccgtatttcagtaggtgtaatgtacatgttgaaacttgcgcacatggttgatgataaattacatgcgcgttcaactggaccatattcacttgttacacaacaaccacttggcggtaaagcgcaattcggtggacaacgtttcggtgagatggaggtatgggcacttgaagcatatggtgctgcatacacattacaagaaatcttaacttacaaatccgatgatacagtaggacgtgtgaaaacatacgaggctattgttaaaggtgaaaacatctctagaccaagtgttccagaatcattccgagtattgatgaaagaattacaaagtttaggtttagatgtaaaagttatggatgagcaagataatgaaatcgaaatgacagacgttgatgacgatgatgttgtagaacgcaaagtagatttacaacaaaatgatgctcctgaaacacaaaaa

SEQ ID NO: 4468 - DNA, 426 bp, Staphylococcus aureus
gtttaccgtatgcaaggggtagaaatcgacgataaacacgttgaggttatggttcgacaaatgttacgtaaagttagaattatcgaagcaggtgatacgaagttattaccaggttcattagttgatattcataactttacagatgcaaatagagaagcatttaaacaccgtaagcgccctgcaacagctaaaccagtattacttggtattactaaagcatcacttgaaacagaaagtttcttatctgcagcatcattccaagaaacaacaagagttcttacagatgcagcaattaaaggtaagcgtgatgacttattaggtcttaaagaaaacgtaattattggtaagttaattccagctggtactggtatgagacgttatagcgacgtaaaatacgaaaaaacagctaaaccagttgcagaagtt

SEQ ID NO: 4469 - DNA, 411 bp, Staphylococcus aureus
atgccaactattaaccaattagtacgtaaaccaagacaaagcaaaatcaaaaaatcagattctccagctttaaataaaggtttcaacagtaaaaagaaaaaatttactgacttaaactcaccacaaaaacgtggtgtatgtactcgtgtaggtacaatgacacctaaaaaacctaactcagcgttacgtaaatatgcacgtgtgcgtttatcaaacaacatcgaaattaacgcatacatccctggtatcggacataacttacaagaacacagtgttgtacttgtacgtggtggacgtgtaaaagacttaccaggtgtgcgttaccatattgtacgtggagcacttgatacttcaggtgttgacggacgtagacaaggtcgttcattatacggaactaagaaacctaaaaac

SEQ ID NO: 4470 - DNA, 264 bp, Staphylococcus aureus
atggaacaaaattcatatgtaatcatcgacgagactggtattcacgctagaccagcaacaatgttagtacaaacagcttcaaaattcgattctgatattcaattagaatataacggtaagaaagttaacttaaaatcaatcatgggtgttatgagccttggtgttggtaaagatgctgaaattacaatttatgctgacggtagtgatgaatctgacgccattcaagcaatcagtgacgtcttatcaaaagaaggattgactaaa

SEQ ID NO: 4471 - DNA, 1716 bp, Staphylococcus aureus
atgtctaaattaattaaaggtattgccgcatctgatggtgtcgcaattgctaaagcttatttattagttgagccagacttaacattcgacaaaaatgaaaaagtcactgatgttgaaggagaagttgcaaagttcaatagcgctatcgaagcttctaaagttgagttaactaaaattagaaataatgcagaggttcaactaggtgctgataaagctgctatctttgatgcacatttattagttttagatgaccctgaattaattcaaccaatccaagataagattaaaaatgaaaacgctaatgctgctacagcattaacggatgtaacaacacaatttgttacaatttttgaatctatggataacgaatacatgaaagaacgtgcggctgatattcgcgacgtttctaaacgtgtgttatcacatattttaggtgtagaattacctaatccgagtatgatcgatgaaagcgttgttattgtagggaatgacttaacgccatctgatactgctcaattaaataaagaattcgtacaaggttttgctacaaacattggcggaagaacaagtcactctgcgattatgagtcgttctttagaaattccagcaattgttggtacaaaatcaattactcaagaagttaaacaaggcgacatgattatcgtagatggattaaatggtgatgtaatcgttaatccaactgaagatgagttaatcgcttatcaagataaacgtgagcgttattttgctgacaagaaagaattacaaaaactacgtgatgctgatactgttacagttgatggtgttcacgcagagcttgctgcaaatattggtacacctaatgatttgccaggtgttattgaaaatggtgcacaaggtatcggcttatatagaactgagtttttatatatgggtcgtgaccaaatgcctacagaagaagagcaatttgaagcttataaagaagtattagaagcaatgaacggtaaacgtgttgttgtacgtactttagatataggtggagataaagaattatcatacttaaacttgcctgaagaaatgaatccattcttaggttaccgtgcgattcgtttatgccttgcgcaacaagatatttttagaccgcaactacgtgcattattacgtgcatcagtttatggtaagttaaatatcatgttcccaatggttgcaacaattaacgaatttagagaagctaaagctatattattagaagaaaaagaaaaccttaaaaatgaaggtcatgacatttcagatgatatagaattaggaatcatggtagagatacctgcaacagcagcattagctgatgtctttgctaaagaagtagatttcttcagtatcggtacaaatgatttaattcaatacacattagctgctgaccgtatgtcagagcgtgtatcatatctataccaaccatataacccttcaatcttacgtttagttaaacaagttattgaagcgtcacataaagaaggtaaatggacaggtatgtgtggtgaaatggctggagatgaaacagctattccattattacttggtttaggtttagatgagttctctatgagtgcaacgtctattctgaaagcaagaagacaaattaatggtttaagtaaaaatgaaatgactgaacttgctaaccgtgcagtcgactgtgcaacgcaagaagaagttattgaattagttaacaactatgtaaaa

SEQ ID NO: 4472 - DNA, 1668 bp, Staphylococcus aureus
atgaaacaattacatccaaatgaagtaggtgtatatgcacttggaggtctaggtgaaatcggtaaaaatacttatgcagttgagtataaagacgaaattgtcattatcgatgcaggtatcaaattccctgatgataacttattagggattgattatgttatacctgactacacatatctagttcaaaaccaagataaaattgttggcctatttataacacatggtcacgaagaccatataggcggtgtgcccttcctattaaaacaacttaatatacctatttatggtggtcctttagcattaggtttaatccgtaataaacttgaagaacatcatttattacgtactgctaaactaaatgaaatcaatgaggacagtgtgataaaatctaagcactttacgatttctttctacttaactacgcatagtattcctgaaacttatggcgtcatcgtagatacacctgaaggaaaagtagttcataccggtgactttaaatttgattttacacctgtaggcaaaccagcaaacattgctaaaatggctcaattaggcgaagaaggtgttctatgtttactttcagactcaacaaattcacttgtgcctgattttactttaagcgaacgtgaagttggtcaaaacgtagataagatcttccgtaactgtaaaggtcgtattatatttgctaccttcgcttctaatatttaccgagttcaacaagcagttgaagctgctatcaaaaataaccgtaaaattgttacgttcggtcgttcgatggaaaacaatattaaaatcggtatggaacttggttatattaaagcaccacctgaaacatttattgagcctaataaaattaataccgtaccgaagcatgagttattgatactatgtactggttctcaaggtgaaccaatggcagcattatctagaattgctaatggtactcataagcaaattaaaattatacctgaagataccgttgtatttagttcatcacctatcccaggtaatacaaaaagtattaacagaactattaattccttgtataaagctggtgcagatgttatccacagcaagatttctaacatccatacttcagggcatggttctcaaggtgatcaacaattaatgcttcgattaatcaagccgaaatatttcttacctattcatggtgaatatcgtatgttaaaagcacacggtgagactggtgttgaatgcggcgttgaagaagataatgtcttcatctttgatatcggagatgtcttagctttaacacacgattcagcacgtaaagctggtcgcattccatctggtaatgtacttgttgatggtagtggtatcggtgatatcggtaatgttgtaataagagaccgtaagctattatctgaagaaggtttagttatcgttgttgttagtattgattttaatacaaataaattactttctggtccagacattatttctcgaggatttgtatatatgagagaatcaggtcaattaatttatgatgcacaacgcaaaatcaaaactgatgttattagtaagttaaatcaaaataaagatattcaatggcatcagattaaatcttctatcattgaaacattacaaccttatttatttgaaaaaacagctagaaaaccaatgattttaccagtcattatgaaggta

SEQ ID NO: 4473 - DNA, 1110 bp, Staphylococcus aureus
atggctcctaagttacaagcccaattcgatgcagtaaaagttttaaatgatactcaatcgaaatttgaaatggttcaaattttggatgagaatggtaacgtcgtaaatgaagacttagtacctgatcttacggatgaacaattagtagaattaatggaaagaatggtatggactcgtatccttgatcaacgttctatctcattaaacagacaaggacgtttaggtttctatgcaccaactgctggtcaagaagcatcacaattagcgtcacaatacgctttagaaaaagaagattacattttaccgggatacagagatgttcctcaaattatttggcatggtttaccattaactgaagctttcttattctcaagaggtcacttcaaaggaaatcaattccctgaaggcgttaatgcattaagcccacaaattattatcggtgcacaatacattcaagctgctggtgttgcatttgcacttaaaaagcgtggtaaaaatgcagttgcaatcactcacactggtgacggtggttcttcacaaggtgatttctatgaaggtattaactttgcagcagcttataaagcacctgcaattttcgttattcaaaacaataactatgcaatttcaacaccaagaagcaagcaaactgctgctgaaacattagctcaaaaagcaattgctgtaggtattcctggtatccaagttgatggtatggatgcgttagctgtatatcaagcaactaaagaagcacgtgaccgcgcagttgcaggtgaaggtccaacattaattgaaactatgacatatcgttatggtcctcatacaatggctggtgacgatccaactcgttacagaacttcagacgaagatgctgaatgggagaaaaaagacccattagtacgtttccgtaaattccttgaaaacaaaggtttatggaatgaagacaaagaaaatgaagttattgaacgtgcaaaagctgatattaaagcagcaattaaagaggctgataacactgaaaaacaaactgttacttctctaatggaaattatgtatgaagatatgcctcaaaacttagcagaacaatatgaaatttacaaagagaaggagtcgaag

SEQ ID NO: 4474 - DNA, 975 bp, Staphylococcus aureus
atggcacaaatgacaatggttcaagcgattaatgatgcgcttaaaactgaacttaaaaatgaccaagatgttttaatttttggtgaagacgttggtgttaacggcggtgttttccgtgttactgaaggactacaaaaagaatttggtgaagatagagtattcgatacacctttagctgaatcaggtattggcggtttagcaatgggtcttgcagttgaaggattccgtccggttatggaagtacaattcttaggtttcgtattcgaagtatttgatgcgattgctggacaaattgcacgtactcgtttccgttcaggcggtactaaaactgcgcctgtaacaattcgtagcccatttggtggtggcgtacacacacctgaattgcacgcagataatttagaaggtattttagctcaatctccaggtctaaaggttgttattccttcaggcccatacgatgcgaaaggtttattaatttcttctattagaagtaatgacccagtcgtatacttagagcatatgaaattgtatcgttcattccgtgaagaagtacctgaagaagaatatacaattgacattggtaaggctaatgtgaaaaaagaaggtaatgacatttcaatcatcacatacggtgcaatggttcaagaatcaatgaaagctgcagaagaacttgaaaaagatggttattctgttgaagtaattgacttacgtactgttcaaccaatcgatgttgacacaattgtagcttcagttgaaaaaactggtcgtgcagttgtagttcaagaagcacaacgtcaagctggtgttggtgcagcagttgtagctgaattaagtgaacgtgcaatcctttcattagaagcacctattggaagagttgcagcagcagatacaatttatccattcactcaagctgaaaatgtttggttaccaaacaaaaatgacatcatcgaaaaagcaaaagaaactttagaattt

SEQ ID NO: 4475 - DNA, 1404 bp, Staphylococcus aureus
atggtagttggagatttcccaattgaaacagatactatagtaatcggagcaggtcctggtggatacgttgcagcaattcgtgcagctcaattaggacaaaaagtaacaatcgttgagaaaggtaatcttggtggtgtttgcttaaacgtaggatgtattccttcaaaagcattactacatgcttctcaccgttttgttgaagcacaacattctgaaaacttaggtgttattgctgaaagtgtttctttaaacttccaaaaagttcaagaattcaaatcatcagttgttaataaattaactggtggtgttgaaggcttacttaaaggtaacaaagttaacatcgttaaaggtgaagcatatttcgtagataacaatagcttacgtgttatggacgaaaagagcgcacaaacatacaactttaaaaatgcaatcattgcaacaggttcaagaccaattgaaattcctaatttcaaattcggtaaacgtgttatcgactcaacaggtgctttaaacttacaagaagtaccaggtaaattagttgtagttggtggaggatacattggatcagaattaggtacagcatttgctaactttggttcagaagtaacaatccttgaaggtgctaaagatatcttaggtggcttcgaaaaacaaatgacacaacctgttaaaaaaggtatgaaagaaaaaggtgttgaaatcgttactgaagctatggctaaatcagctgaagaaacagataacggagttaaagttacttatgaagctaaaggcgaagagaaaacaatcgaagctgattatgtattagtaactgtaggtcgtcgtccaaacacagacgaattaggcctagaagaattaggtgttaaattcgctgaccgtggattattagaagttgataaacaaagccgtacgtctatcagcaatatctatgcaattggtgatatcgttccaggtttaccacttgcgcacaaagctagctatgaagctaaagttgctgctgaagcaattgatggtcaagctgctgaagttgattacattggtatgccagcagtatgctttactgaaccagaattagctacagttggttattcagaagcgcaagctaaagaagaaggtttagcaattaaagcttctaaattcccatatgcagcaaatggtcgtgcattatcattagatgatactaacggatttgttaaacttattacacttaaagaagatgatactttaatcggtgctcaagtagttggtactggtgcatcagatattatctctgaattaggtttagcaattgaagctggtatgaatgctgaagatatcgcattaacaatccatgcacatccaacattaggtgagatgactatggaagcagcggaaaaagctatcggatacccaatccatacaatg

SEQ ID NO: 4476 - DNA, 261 bp, Staphylococcus aureus
gtgagcgaaagaaacgatcgtaaagtttatgtaggtaaagttgtttcagacaaaatggacaagactattacagtacttgttgaaacttacaaaacacacaaattatacggtaaacgagtaaaatactctaaaaaatacaaaactcatgatgaaaacaattcagctaaattaggagacattgttaaaattcaagaaactcgtcctttatcagcaacaaaacgttttcgtttagtagagattgttgaagagtcagtaattatt

SEQ ID NO: 4477 - DNA, 366 bp, Staphylococcus aureus
atgatccaacaagaaacacgcttgaaagtagcagacaactctggtgctcgtgaagttcttacaatcaaagtattaggtggatctggtcgtaaaacagctaacatcggcgatgttatcgtatgtactgttaaaaatgcaacaccaggtggcgttgttaaaaaaggtgacgttgtcaaagctgtaatcgtacgtactaaatcaggtgttcgtcgtaatgacggttcatatatcaaatttgatgaaaatgcatgtgttatcatccgtgatgacaaaggcccacgtggtactcgtatcttcggacctgttgctcgtgaattacgtgaaggtaacttcatgaaaatcgtatcattagcaccagaagtactt

SEQ ID NO: 4478 - DNA, 297 bp, Staphylococcus aureus
atgcatatcaaaaaaggtgacaacgttaaagttatcgcaggtaaagacaaaggtaaagaaggtaaagtaatcgctactctacctaaaaaagaccgtgtcgttgtggaaggtgttaacattatgaaaaaacaccaaaaaccaactcaattaaatcctgaaggtggaatcttagaaacagaggcagcaatccatgtttctaatgtacaattattggaccctaaaacaaacgaaccaactcgtgtaggttacaaatttgttgatggtaaaaaagttcgtatcgctaaaaaatctggcgaa

SEQ ID NO: 4479 - DNA, 537 bp, Staphylococcus aureus
ttgaaccgtttaaaagaaaagtttaacactgaagttactgaaaacttaatgaaaaaattcaattatagttcagtaatggaagtaccaaaaatagataaaatcgttgtgaacatgggtgtaggtgacgcagtacaaaattctaaagtattagacaatgctgttgaagaattagaattgatcactggtcaaaaaccattagtaactaaagctaaaaaatcaatcgcgactttccgtttacgtgaaggtatgccaatcggtgcgaaagtaacacttcgcggtgaaagaatgtatgaattcttagacaaattaatttcagtatcattaccacgtgtacgtgacttccaaggtgtttctaaaaaagcatttgacggacgcggtaactacactttaggtgttaaagaacaattaattttcccagaaatcgactatgataaagtaagtaaagttagaggaatggatattgttatcgtaacgactgctaacactgatgaagaagctcgtgaattgttagctaacttcggtatgccattccgtaaa

SEQ ID NO: 4480 - DNA, 183 bp, Staphylococcus aureus
gtggctaaaacttcaatggttgctaagcaacaaaaaaaacaaaaatatgcagttcgtgaatacactcgttgtgaacgttgtggccgtccacattctgtatatcgtaaatttaaattatgccgtatttgtttccgtgaattagcttacaaaggccaaatccctggcgttcgtaaagctagctgg

SEQ ID NO: 4481 - DNA, 396 bp, Staphylococcus aureus
atgacaatgacagatccaatcgcagatatgcttactcgtgtaagaaacgcaaacatggtgcgtcacgagaagttagaattacctgcatcaaatattaaaaaagaaattgctgaaatcttaaagagtgaaggtttcattaaaaatgttgaatacgtagaagatgataaacaaggtgtacttcgtttattcttaaaatatggtcaaaacgatgagcgtgttatcacaggattaaaacgtatttcaaaaccaggtttacgtgtttatgcaaaagctagcgaaatgcctaaagtattaaatggtttaggtattgcattagtatcaacttctgaaggtgtaatcactgacaaagaagcaagaaaacgtaatgttggcggagaaattatcgcatacgtttgg

SEQ ID NO: 4482 - DNA, 357 bp, Staphylococcus aureus
atgatcagtaaaattgataaaaataaagtgcgtttaaaaagacatgctcgtgttcgtactaacttatcaggtacagctgaaaagccacgtttaaacgtatatcgttcaaacaagcatatctacgctcaaattattgatgataataaaggcgtaacattagctcaagcttcttcaaaagacagcgacattgctactacagcaactaaagttgaattagcaactaaagtcggtgaagcaattgctaaaaaagctgctgacaaaggcattaaagaaatcgtatttgaccgtggaggatatttatatcacggacgtgttaaagcattagctgaagcagcaagagaaagcggattagaattt

SEQ ID NO: 4483 - DNA, 492 bp, Staphylococcus aureus
atggctcgtagagaagaagagacgaaagaatttgaagaacgcgttgttacaatcaaccgtgtagcaaaagttgtaaaaggtggtcgtcgtttccgtttcactgcattagttgtagttggagacaaaaatggtcgtgtaggtttcggtactggtaaagctcaagaggtaccagaagcaatcaaaaaagctgttgaagcagctaaaaaagatttagtagttgttccacgtgttgaaggtacaactccacacacaattactggccgttacggttcaggaagcgtatttatgaaaccggctgcacctggtacaggagttatcgctggtggtcctgttcgtgccgtacttgaattagcaggtatcactgatatcttaagtaaatcattaggatcaaacacaccaatcaacatggttcgtgctacaatcgatggtttacaaaaccttaaaaatgctgaagatgttgcgaaattacgtggcaaaacagtagaagaatta

SEQ ID NO: 4484 - DNA, 177 bp, Staphylococcus aureus
atggctaaattacaaattaccctcactcgtagtgttattggtcgtcctgaaacacaacgtaaaactgttgaagctttaggtcttaaaaagactaacagttcagtagttgttgaagataaccctgctattcgtgggcaaatcaacaaagttaagcacttagtaacagtagaagaaaaa

SEQ ID NO: 4485 - DNA, 438 bp, Staphylococcus aureus
atgaaattacatgagttaaaaccggcagaaggttcacgtaaagaacgcaatcgtgttggacgtggtgttgcgacaggtaacggtaaaacaagtggtcgcggacacaaaggtcaaaaagctcgttcaggcggtggtgtaagaccaggattcgaaggtggtcaattaccattattccgtcgtttaccaaaacgtggttttactaacataaatcgtaaagaatatgctattgttaacttagaccaacttaataaatttgaagatggtactgaagtaactccagctttattagtagaatctggtgttgttaagaatgaaaaatctggtatcaaaatactaggtaatggttcacttgataagaaattgacagtgaaagctcataaattctcagcttcagcagcagaagctattgatgctaaaggtggagcacacgaggtgatc

SEQ ID NO: 4486 - DNA, 1305 bp, Staphylococcus aureus
atgattcaaacccttgtgaacttctttagaacaaaagaggttcgtaacaagattttcttcacactagcaatgttagtaatttttaaaatagggacttatataccagctccaggagtaaatcctgcagcttttgataatccccaaggttctcaaggtgccactgagttattaaatacttttggtggcggagccttgaaacgattttctatttttgcaatgggtattgtaccctacatcactgcatcaatcgtaatgcaattattacaaatggatattgtccctaaattctcagaatgggcaaaacaaggtgaagtaggtagaagaaagttaaataacgttactcgttatttagcaatttctttagcatttatccaatctataggtatggcattccaatttaataattatctcaaaggtgcgctgattatcaatcagtcaattatgagttatttattaatagcactagttttgacagcaggaactgctttcttaatatggcttggtgatcaaatcactcagttcggtgttggtaatggtatttctattatcatatttgcgggtattttatcaacgttgccagccagtctaattcaatttggacaaactgcgttcgttgggcaagaagatacatcattagcatggttgaaagtattaggacttttagtgtcactgatactattaactgtaggtgctatttatgtacttgaagccgttcgtaaaattccgattcaatatgctaagaaacaaactgctcaaagattaggttcacaggcaacttatctacctttaaaagtgaactcagccggtgttattcctgtaatctttgcaatggcgttcttcttactgcctagaacattaacgttgttctatccagataaagaatgggcacaaaacattgcgaatgctgcaaatccttcaagtaatgttggtatggttgtatatattgtactaattatactattcacatacttctatgcatttgtacaagttaatccggaaaaaatggctgataaccttaagaaacaaggtagctatgttccaggtattagacctggtgaacaaaccaaaaaatatattactaaagttttatatcgtttaacttttgtaggttctatcttcttagccgttatttcaattctaccgatattagcaactaagtttatgggattaccacaatcaattcagattggtggtacaagtttacttatcgttattggtgtagcgattgaaacaatgaaatctttagaagcgcaagtatctcaaaaagaatataaaggctttggtggtagataattttaggagggc

SEQ ID NO: 4487 - DNA, 645 bp, Staphylococcus aureus
atgaatatcattttgatgggtttacctggcgcaggtaaaggaactcaagcaagtgaaattgtcaagaaattcccaataccccacatttcaactggtgacatgttcagaaaagctataaaagaagaaactgaattaggtaaagaagctaagtcttatatggaccgtggcgaattagttcctgatgaagtgactgtaggtatcgttaaggaaagaatttctgaagacgatgcaaaaaaaggctttttattagatggcttcccaagaacaatcgagcaagctgaggcattaaataatattatgtctgagcttgacagaaacattgatgctgtcatcaatatcgaagttccggaagaagaattaatgaaccgtcttacaggtcgtcgaatctgtgagtcatgtggtacaacgtatcatcttgtatttaatcctccgaaggtcgaaggtatttgtgatatcgatggtggtaaattgtatcaacgagaagatgataatcctgaaacggtagctaatcgtttgagtgttaatattaaacaatctaaacctattttagatttctatgatcaaaaaggtgtattgaaaaatattgatggttcaaaagatattagcgacgttaccaaagatgtcattgatattttagatcatttg

SEQ ID NO: 4488 - DNA, 216 bp, Staphylococcus aureus
atggctaaacaagatgtaattgaattagaaggtactgtattagatactttaccgaacgcaatgtttaaagtagaattagaaaatggtcatgagattttagctcacgtaagtggtaaaatcagaatgaattacattcgtattctacctggcgacaaagtaactgttgagatgtctccgtacgatttaacacgcggaagaattacttatcgttataaa

SEQ ID NO: 4489 - DNA, 111 bp, Staphylococcus aureus
atgaaagtaagaccatcagtaaaacctatttgcgaaaaatgtaaagtcattaaacgtaaaggtaaagtaatggtaatttgtgaaaatccaaaacacaaacaaagacaaggt

SEQ ID NO: 4490 - DNA, 363 bp, Staphylococcus aureus
atggcacgtattgcaggagtagatattccacgtgaaaaacgcgtagttatctcattaacttatatatacggtatcggtacgtcaactgctcaaaaaattcttgaagaagctaacgtatcagctgatactcgtgtgaaagatttaactgatgacgaattaggtcgcatccgtgaagttgtagacggttataaagtcgaaggtgacttacgtcgtgaaactaacttaaatatcaaacgtttaatggaaatttcatcataccgtggtatccgtcaccgtcgtggtttaccagttcgtggtcaaaaaacgaaaaacaacgcgcgtactcgcaaaggaccagttaaaacggtagctaacaagaaaaaa

SEQ ID NO: 4491 - DNA, 384 bp, Staphylococcus aureus
gcacgtaaacaagtatctcgtaaacgtagagtgaaaaagaatattgaaaatggtgtagcacacatccgttcaacattcaacaacactattgtaactatcactgatgagttcggtaatgctttatcatggtcatcagctggtgcattaggattcaaaggatctaaaaaatcaacaccatttgcagcacaaatggcttctgaaactgcatctaaatcagctatggagcatggtttaaaaacagttgaagtaacagttaaaggacctggtccaggtcgtgaatcagctattcgtgcattacaatctgcaggtttagaagtaactgcgatcagagacgttactccagtacctcataacggttgtcgtccaccaaaacgtcgtcgtgta

SEQ ID NO: 4492 - DNA, 942 bp, Staphylococcus aureus
atgatagaaatcgaaaaacctagaattgagacaattgaaattagtgaagatgctaaattcggtaagttcgttgttgaaccactagaacgtggctacggtactacactaggaaactccttacgtcgtatcctactatcttcattaccaggtgcagccgttaagtatattgaaattgagggagttttacatgaattctcagcagtagacaatgtagttgaagatgtttctacaattattatgaacattaaacaattagcattgaaaatttactctgaagaagataaaactttagaaattgatgtacgtgatgaaggcgaagtaacagcaagcgacattacacatgacagtgatgttgaaattttaaacccagagcttaaaattgcaacagtatctaaaggtggtcacttaaaaattcgtctagttgctaacaagggtagaggttacgcattagcagaacaaaataatactagtgatttaccaattggtgtaatccctgttgattcattgtattcacctgttgaacgtgtgaactatactgttgaaaatacacgtgtaggtcaaagcagtgattttgataaattaacattggatgtttggactaatggttcaatcacaccacaagaatcagtttcattagcagcaaaaataatgactgaacacttgaatatcttcgttggtcttactgatgaagcgcaaaacgctgaaatcatgattgaaaaagaagaagatcaaaaagaaaaagtattagaaatgtctattgaagaattagacttatctgtacgttcatataactgcttaaaacgcgcaggaatcaattctgttcaagagttagctgacaaatctgaagctgacatgatgaaagtgcgtaatttaggtcgtaaatctttagaagaagttaaatacaaattagaagatttaggattaggattaagaaaagaagat

SEQ ID NO: 4493 - DNA, 366 bp, Staphylococcus aureus
atgggttacagaaaattaggtcgtacttctgatcaacgtaaagctatgttacgtgacttagctacatcacttattattagtgaacgtattgaaactacagaagctcgtgcaaaagaagttcgcagtgttgttgagaaattaatcactttaggtaaaaaaggagatttagcttctcgtcgtaatgcagctaaaactttacgtaatgttgaaatcttaaacgaagatgaaactacacaaactgcacttcaaaaattatttggtgaaatcgcagagcgttacacagaacgtcaaggtggttacactcgtatccttaaacaaggccctcgtcgcggtgacggtgctgaatcagtaattatcgaattagta

SEQ ID NO: 4494 - DNA, 822 bp, Staphylococcus aureus
gataagaattcagttattgtatttaaaaatgtttcatttcaatatcaaagtgatgcatccttcacattgaaagatgtttcttttaatatacctaaaggtcagtggacatctattgttggtcataacggttctgggaaatctacaattgccaagttaatgattggcatagagaaagttaaatctggagaaattttttataataatcaagctataacagatgataattttgaaaagttaagaaaagacataggaattgtatttcagaatccggataatcaatttgttggttcaattgtaaaatacgatgtggcatttggactcgaaaatcatgcggttccacatgacgaaatgcatagaagagtcagcgaagcacttaaacaagttgatatgttagaacgtgcagattatgaacctaatgcattatctgggggacagaagcagcgtgtggctatagcaagtgtattagcacttaacccctctgtcattatattagatgaggcgacttctatgttagatcctgatgcacgtcaaaatttattggatttagtgagaaaagttaaatcagaacataatattacaatcatttctattacgcatgatttatctgaggcgatggaagcagatcatgttatcgttatgaataaagggactgtctataaagaaggcacagcgattgaaatttttgaccatgcagaagagttaacaacaataggtctagatttgccattcccaatcaaaataaatcaaatgctgggacaccaaacatcattcttaacttatgaagggctggtggaccaactatgactatacgctttgacaatg

SEQ ID NO: 4495 - DNA, 819 bp, Staphylococcus aureus
acaccataccagcatcaagctattcatgatgttaatacagaatttgaacaaggtaaatattacgccatcgttggacaaacgggtagtggtaaatcaacattgatacaaaatattaatgcactgttaaagccgactactgggacagttacagttgatgacattactattacacataagaccaaagataaatatattagacctgtaagaaaaagaattggaatggtatttcaattccccgaatctcaattatttgaggacacagtagagcgtgaaatgatatttggacctaaaaactttaaaatgaatttagatgaagccaaaaactatgcccatcgtctgttgatggatttaggcttttcaagagatgtaatgtcacaatcaccatttcaaatgtcaggtggacaaatgcgtaaaatagcgattgtatctatattggcaatgaatcctgatattatcgtggttgatgaacctacagcaggacttgatccacaaagtaaacgacaagtaatgcgattactaaagtcactacaaacagatgaaaataagacaattatcctaatttcacatgatatgaatgaagtcgcgcgttatgcagatgaagtcatcgttatgaaagaaggtagtatcgtgtcgcaaacatcaccaaaagagctcttcaaagataaagaaaaattggcggattggcatattggtttgccagaaattgttcagttacaatatgactttgaacaaaaacatcaaacaaaattaaaagatattgccttaactgaagaagcatttgtaagcttgtataaggagtggcaacatgaaaaataaatt

SEQ ID NO: 4496 - DNA, 435 bp, Staphylococcus aureus
atgcgtcaaacatttatggcaaatgaatcaaacattgagcgcaaatggtatgttatcgatgctgaaggccaaacattaggtcgtttatcatcagaagtagcatctatcttacgcggtaaaaataaagtaacttacacaccacacgttgatactggtgattatgtaatcgttattaatgcatcaaaaatcgaatttactggtaacaaagaaactgacaaagtttactaccgtcactcaaatcacccaggtggtatcaaatcaatcactgctggtgaattaagaagaactaacccagaacgtttaattgaaaactcaattaaaggtatgttaccaagcactcgtttaggcgaaaaacaaggtaaaaaattatttgtatatggtggcgctgaacatccacacgctgcacaacaaccagaaaactacgaattacgtggt

SEQ ID NO: 4497 - DNA, 390 bp, Staphylococcus aureus
ttggcacaagttgaatatagaggcacaggccgtcgtaaaaactcagtagcacgtgtacgtttagtaccaggtgaaggtaacatcacagttaataaccgtgacgtacgcgaatacttaccattcgaatcattaattttagacttaaaccaaccatttgatgtaactgaaactaaaggtaactatgatgttttagttaacgtacatggtggtggtttcactggacaagctcaagctatccgtcacggaatcgctcgtgcattattagaagcagatcctgaatacagaggttctttaaaacgcgctggattacttactcgtgacccacgtatgaaagaacgtaaaaaaccaggtcttaaagcagctcgtcgttcacctcaattctcaaaacgt

SEQ ID NO: 4498 - DNA, 426 bp, Staphylococcus aureus
caagatgttgtaaaagaattgaatcaacaagtagcaaactggacagtagcttatacaaagctacataatttccactggtatgtgaaaggacctaacttcttctcattacacgttaaatttgaagaattatataatgaagcaagtcaatatgtagacgaattagctgaaagaattttagcggtaggaggaaaccctgtaggtacattaactgaatgcgtagagcaatcaattgttaaagaagctgcgaaaggttactctgcagaacaaatggttgaagaattatctcaagatttcactaatatctcaaaacaattagaaaaagcgattgaaattgctggtaatgctggcgatgatgtatcagaagatatgtttataggtatgcaaacatcagtagataaacataattggatgtttaaatcttactta

SEQ ID NO: 4499 - DNA, 1128 bp, Staphylococcus aureus
agtgaaaaacaacaaattctcgattatatagaaacgaataaatatagttatatcgaaatcagtcatagaattcatgaacgtcctgaacttggtaatgaagaaatatttgcgtctcgaactttaatagatcgtttgaaagaacatgattttgaaattgaaaccgagattgctgggcatgcaactgggtttatagcgacatatgattcgggtcttgacggcccagctataggttttttagcagaatacgatgcattgccaggattaggtcatgcttgtggtcataatatcattggaactgcaagtgtgcttggtgcaattggtttgaagcaagtgattgaccaaattggtggtaaagtagtcgttctcggatgtccagctgaagaaggtggggaaaatggtagcgctaaagcttcttatgtcaaggctggtgtgattgatcaaatagacattgccttaatgattcatccgggaaatgaaacttataaaacgattgatactttggcagtggatgttttagatgttaaattttacggaaaaagtgctcatgcctctgaaaatgcagatgaagcgttaaatgcattagacgctatgattagttattttaatggtgtagcacaactacgacaacatattaaaaaaggtcaacgtgtgcatggtgtgattttagatggcgggaaagcagctaatattattccagactatacacatgctcgtttttatactagagcaatgacgcgtaaagaattggatatattaacagaaaaagtaaatcaaatcgcacgtggagctgcgatacagactggttgtgattatgaatttggtccaattcaaaacggtgtgaatgaattcattaaaacgccgaaattagatgatttatttgctaaatatgctgaagaagttggtgaagcagttattgatgatgattttggttatggctctacggatacagggaacgtaagtcatgttgtgccaacaatacatcctcatattaaaataggatcacgtaatttagtaggacatacgcatagatttagagaagcagctgcgagtgtacatggtgatgaagcattaattaaaggtgctaaaataatggcgttgatggggttagagttaattacaaatcaagac

SEQ ID NO: 4500 - DNA, 855 bp, Staphylococcus aureus
atgcctttagtttcaatgaaagaaatgttaattgatgcaaaagaaaatggttatgcggtaggtcaatacaatattaataacctagaattcactcaagcaattttagaagcgtcacaagaagaaaatgcacctgtaattttaggtgtttctgaaggtgctgctcgttacatgagcggtttctacacaattgttaaaatggttgaagggttaatgcatgacttaaacatcactattcctgtagcaatccatttagaccatggttcaagctttgaaaaatgtaaagaagctatcgatgctggtttcacatcagtaatgatcgatgcttcacacagcccattcgaagaaaacgtagcaacaactaaaaaagttgttgaatacgctcatgaaaaaggtgtttctgtagaagctgaattaggtactgttggcggacaagaagatgatgttgtagcagacggtatcatttatgctgatcctaaagaatgtcaagaactagttgaaaaaactggtatcgatgcattagcgccagcattaggttcagttcatggtccatacaaaggtgaaccaaaattaggatttaaagaaatggaagaaatcggtttatctacaggtttaccattagtattacacggtggtactggtatcccgactaaagatatccaaaaagcaattccatttggtacagctaaaattaacgtaaatactgaaaaccaaatcgcttcagcaaaagcggttcgtgacgttttaaacaacgacaaagaagtttacgatcctcgtaaatacttaggaccagctcgtgaagctatcaaagaaacagttaaaggtaaaattaaagagttcggtacttcaaaccgcgct

SEQ ID NO: 4501 - DNA, 867 bp, Staphylococcus aureus
aagcataatgacaaaattataccagttattttagccgcaatttcagcgatttccattttaacaacactaggtatattaatcacattgcttttagaaaccatcacttttttcaccagaattccaataactgaatttctattttctactacttggaatcctaccggttcagaccctaagtttggtatctgggcattgataatagggactttaaaaatcacagttattgcgactatatttgcagttccagtcgggcttggtgcagcaatttatttaagtgaatatgcaagtgaccgtgcacgacgcataattaaaccgatattagaaattttagcaggaataccaacaattgtgtttggtttctttgcattaacctttgttacaccagtattaagatctttcataccaggtcttggagagtttaatgctataagtcccggcttagttgtcggtattatgattgtccctctcatcacaagtttgagtgaggatgcaatggcatctgtaccaaataaaattcgagaaggtgcctatggacttggagcaactaaattagaagtagcaactaaagtcgtacttcctgcagcaacatcaggtattgtagcttcaatcgttctcgcgatttcaagagcaattggagaaacgatgattgtatcattagcggcaggtagttcaccaacagcttcattaagtttaacaagttcgattcaaacaatgactggatatattgttgagatagcgacaggtgatgcaacatttggatcaaatatttattacagtatttatgctgtaggattcacattatttatctttaccttaatcatgaatttactttctcaatggatttctaagcgttttagggaggagttt

SEQ ID NO: 4502 - DNA, 1605 bp, Staphylococcus aureus
atgttacaagtaactgatgtgagtttacgttttggagatcgtaaactatttgaagatgtaaatattaaatttacagaaggtaattgttatggattaattggtgcgaatggtgcaggtaaatcaacattcttaaaaatattatctggtgaattagattctcaaacaggacatgtttcattaggtaaaaatgaacgtctagctgttttaaaacaggaccactatgcttatgaagatgaacgcgtgcttgatgttgtaattaaaggtcacgaacgtctttatgaggttatgaaagaaaaagatgaaatctatatgaagccagatttcagtgatgaagatggtatccgtgctgctgaacttgaaggtgaatttgcagaaatgaatggttggaatgctgaagctgatgcagctaaccttttatccggtttaggtatcgatccaactttacacgataaaaaaatggctgaattagaaaacaaccaaaaaattaaagtattattagcgcaaagtttattcggtgaaccagacgtactattactggatgagcctactaacggtctggatattccagcaattagttggttagaagatttcttaattaactttgataatactgttatcgtagtatcacatgaccgtcatttcttaaataatgtatgtactcatatcgctgatttagactttggtaaaattaaagtttatgttggtaactatgatttttggtatcaatctagtcagttagcacaaaagatggctcaagaacaaaacaagaaaaaagaagaaaaaatgaaagagttacaggactttattgctcgtttctcagctaacgcttctaaatctaaacaagcaacaagtcgtaaaaaacaacttgagaaaattgaattagatgatattcaaccatcatcaagaagatatcctttcgttaaattcacgcctgagcgtgagattggtaacgacttattaatcgttcaaaatctctctaaaacaattgacggcgaaaaagtattagataatgtatcattcacaatgaatccaaatgataaagcgattttaattggagatagtgaaattgcaaaaacaacattacttaaaatattagctggcgaaatggaaccagacgaaggttcatttaaatggggtgttactacatcattaagttacttccctaaagataactcagagttctttgagggtgtaaatatgaatctcgttgattggttaagacaatatgctcctgaagatgaacaaacagaaacatttttacgtggtttcttaggtcgtatgttatttagtggtgaagaagttaagaaaaaagctagtgtgctttcaggtggagaaaaagtacgttgtatgctaagtaaaatgatgttatcaagtgcgaatgtacttttacttgacgaacctactaaccacttagacttagaaagtattactgctgtcaatgatggtcttaaatcatttaaaggttctatcatctttacttcttatgacttcgaatttatcaacacgattgcaaaccgtgttatcgatttaaataaacaaggcggcgtttcaaaagaaattccatatgaagaatacttgcaagaaatcggcgttttaaaataaata

SEQ ID NO: 4503 - DNA, 966 bp, Staphylococcus aureus
aaattagcagttgtgggtgcaacaggattagtaggaacaaaaatgttagagacattaaatcgtaaaaatattcctttcgatgaattagtattattttcatcagcacgttctgcagggcaagaagttgaatttcaaggaaaaacatatacagttcaagaattaactgatgctcgtgcaagtgaacatttcgattatgtattaatgagtgctggtggcggtacaagcgaacactttgccccactctttgaaaaagctggtgcaatcgttatagacaattcaagtcagtggcgtatggcagaagatattgatttaatcgttccggaagtcaatgaacctacatttacaagaggtatcattgccaatccaaactgctctacgattcaatctgttgtacctctaaaagtattacaagatgcctatggattaaaacgagtggcatatacaacatatcaggcggtatcaggttcagggatgaaaggtaaaaaagatttagctgagggcattaacggtaagacacctgaagcatatccacatccaatttataataatgtattaccgcatattgatgtgtttttagaaaatggatatacaaaagaagagcaaaagatgattgatgaaactagaaagattttaaatgtaccagacttaaaagtaacagcaacatgtgcacgtgttcctgttcaagatagtcatagtgttgaaattgatgtaacgcttgaaaaagaagcgactgcagaagatattaaagcattatttgatcaagatgaccgtgttgttttagtagacaatccagagaacaatgaatatccaatggcaatcaattctactaataaagatgaagtatttgttggccgtatacgtagagatgattcattagaaaatactttccatgtatggtgtacatcagacaatttattaaaaggtgctgcattaaatgctgtacaagtattggaacaagttatgcgt

SEQ ID NO: 4504 - DNA, 1830 bp, Staphylococcus aureus
atgagtaaaattattggtatagacttaggtacaacaaattcatgtgtaacagtattagaaggcgatgagccaaaagtaattcaaaatcctgaaggttcacgtacaacaccatctgttgtagctttcaaaaatggagaaactcaagttggtgaagtagctaaacgtcaagctattacaaacccaaatactgttcaatctattaaacgtcatatgggtactgattataaagtagatattgaaggtaaatcatacacaccacaagaaatctcagctatgattttacaaaacttaaaaaatacagctgaaagctatttaggtgagaaagttgacaaagctgtaattacagtacctgcatactttaacgacgctgaacgtcaagcaactaaagatgctggtaaaattgctggtttagaagttgagcgtatcattaatgaaccaacagctgcagcattagcatatggtttagacaaaactgataaagatgaaaaagttcttgtttttgacttaggtggcggtacatttgatgtatctatcctagaattaggtgacggtgtattcgaagtactatcaacagccggtgacaacaaacttggcggcgatgattttgaccaagtaattattgactacctagttgcagaattcaaaaaagaaaatggcgtagacttatctcaagataaaatggcattacaacgtttgaaagatgctgctgaaaaagctaaaaaagacttatcaggtgtatcacaaactcaaatctcattaccatttatctcagctggtgaaaacggtccgttacacttagaagtaaacttaactcgttctaaatttgaggaattatcagattcattaattagaagaacaatggaacctacacgccaagcaatgaaagacgctggcttaacaaactcagatatcgatgaagttatcttagttggtggatcaactcgtattccagcggtacaagaagctgtcaaaaaagaaatcggtaaagaacctaacaaaggtgtaaacccggacgaagtagtggcaatgggagctgcaatccaaggtggcgttatcacaggtgacgttaaagacgtagtattattagacgtaacaccactatctttaggtattgaaattttaggtggacgtatgaatacgttaattgaacgtaacactacgattcctacatctaaatctcaaatctattcaactgcagttgataatcaaccatcagtagatgtacacgtattacaaggtgaacgtccaatggctgcggataataaaacacttggtagattccaattgactgatattccaccagctgaacgtggtaaacctcaaattgaagtaacgtttgatatcgataaaaacggtattgtaaatgtaactgcaaaagacttaggtacaaataaagaacaaagaattacaattcaatcaagttcttcattatcagacgaagaaatcgaccgtatggtaaaagatgctgaagttaacgctgaagcagataaaaaacgtcgtgaagaagtagacttaagaaacgaagctgacagcctagtattccaagttgaaaaaactttaactgatttaggcgaaaatatcggtgaagaagataaaaaatctgctgaagagaaaaaagacgctcttaaaactgctttagaaggtcaagatatagaagatattaaatctaaaaaagaagaacttgaaaaagtgattcaagaattatcagcaaaagtatatgagcaagcggctcaacagcaacaacaagcacaaggtgctaatgctggtcaaaacaacgatagtactgtagaagatgctgaatttaaagaagtaaaagacgacgacaaaaaa

SEQ ID NO: 4505 - DNA, 699 bp, Staphylococcus aureus
atgagtgtcggtattctaatttttgtcatatcagtgatcatttctatcattactactatgcgcgaaaatagtcataaagatagacaaaatcaaaagccacctcaaaaaacatctaccgataatgaaccaaaaaaaggtggcttttttgaagaaattgagcgaacgtttaaagaaataagtgaagaattaaatgaagaagaaaagaaatcatcgaaacgaaaatatgatgatacgttaccacctttattcgatgaacttccaaaggaagagcctaaatcgaaacctgttgtagaacctatggcacctaaaaaacaacaagaaacaaaaccgatgacagagaaaccaattacagtgcctaaagcagaaccggtggaacagaaacatagaccttctagacaagataattctgaggaaattagacgtcaattagaaaaatcacttagagatgatattaaaacgattcgtactgacattgatagagaaaaagaaaagcaaattgctaaaatggaaaaacgtgctagagatattattgaggataaatacttatctgaacgtacaaaacgtttgaaattaaagcagttgcttaattctcaaaatgtcgaaaaagatttgactaaatcagcgttccaatttgataaagatgaagtaatcaatggtatgatatggtcagaaattttagctaaaccaaaacaattataa

SEQ ID NO: 4506 - DNA, 882 bp, Staphylococcus aureus
aaatcaggatttgtttcaattataggtagaccaaatgtagggaagtcaacatttgttaatagagtgattggccataaaatagcaatcatgtccgataaagctcaaacaactagaaataaaattcaaggtgtaatgacaagagatgatgcacaaattatattcattgatacgccaggtattcataaacctaaacacaaattaggtgactatatgatgaaagtcgctaaaaatacattatctgagatagatgcaatcatgtttatggttaatgccaatgaggaaattggacgaggcgatgaatatattatagaaatgttgaaaaatgttaagacaccagtatttttagtattaaataaaatagatttagtgcatccagatgaattaatgccaaagattgaagaatatcaaagttatatggactttacagagattgtacctatttcagcattagaagggctaaatgtagatcattttattgatgtattaaagacgtatttacccgaaggacctaaatattatccagatgatcaaatttcagaccatcctgaacaatttgtagtgggtgaaatcattcgtgaaaaaatccttcatcttacaagtgaagaaatccctcatgcgattggtgttaatgtggaccgtatggttaaagaaagcgaagatcgtgttcatatcgaagcaactatatatgttgaaagagattcgcaaaaaggaattgtcattggaaaaggcggtaaaaagttaaaagaagtaggaaaacgtgcgagacgtgatatagaaatgcttctaggttctaaagtttacttagaattatgggtcaaagttcaaagagactggcgaaacaaagttaactttattcgccaaattggttatgttgaagaccaa

SEQ ID NO: 4507 - DNA, 1386 bp, Staphylococcus aureus
atggcaaaagatatggatacaattgtttcattagcaaaacacagaggttttgtgttccctggtagtgatatttacggtggtttatcaaacacatgggattatggtcctttaggtgttgaattaaagaataatgttaaaaaagcttggtggcaaaaattcattacacaatcaccgtttaacgttggtatcgatgctgcaatcttaatgaatccaaaagtatgggaagcttcaggacacttaaacaacttcaacgacccaatgattgataataaagatagtaaaattcgatatcgcgctgataaattaattgaagattatatgcaagatgttaaaggtgatgaaaacttcattgccgatggtttaagttttgaacaaatgaaaaaaattattgacgatgaaggtattgtttgtcctgtaagtaaaactgctaactggactgaaattcgccaattcaatttaatgtttaaaacattccaaggtgtaactgaagattctacaaatgaaattttcttacgtcctgaaacagcacaaggtatttttgtaaactataaaaacgtgcaacgttcaatgcgtaaaaaattaccatttggtatcggtcaaattggtaaatcattccgtaatgaaatcacaccaggtaacttcattttcagaacaagagaatttgaacaaatggaacttgaattcttctgtaaacctggtgaagaaatcgaatggcaaaattattggaaaacttttgcaagtgactggttaacaagcttaaatatgagcagtgaaaatatgcgtttacgtgatcatgatgaagatgaattatctcattactcaaatgcaacaactgatattgaatataaattcccatttggttggggtgagttatggggtatcgcaagtcgtacagacttcgacttacgtaaacatgctgaacactctggtgaagatttcagataccatgatccagaaacgaacgaaaaatatattccatattgtatcgagccatcacttggtgcagatcgtgtaacattagctttcttatgtgatgcatatgatgaagaaggcgttgaaggtagtaaagatgcacgtacagttttacacttccatcctgcattagcaccatataaagcagcgattttacctttaagtaagaaattatctggcgaagcgattaagatttttgagcaattaagttctaaattctcaatcgatttcgatgaatcacaatctatcggtaagagataccgtcgtcaagatgaaatcggtacaccttattgtgtaacattcgactttgattcattagaagataatcaagttacagtacgtgacagagattcaatggaacaagttcgtatgccaatctcagagttagaagctttcttaactgaaaaaacaaaa

SEQ ID NO: 4508 - DNA, 744 bp, Staphylococcus aureus
ataaataaaaagaacactataaataattataatgaagaattagactcgtctaatatacctgaacatatcgctattattatggatggtaatgggcgatgggctaagaagcgaaaaatgcctagaattaaaggtcattacgaaggtatgcaaacaataaaaaaaattactagggtagctagtgatattggtgttaagtacttaactttatatgccttttccactgaaaattggtcaagacctgaaagtgaagtaaattatattatgaatttgcctgtcaatttcttaaagacatttttaccggaactaattgaaaaaaatgtcaaagttgaaacaattggatttactgataagttgccaaaatcaacgatagaagcaataaataatgctaaagaaaagacagctaataataccggcttaaaattaatatttgcaattaattatggtggcagagcagaacttgttcatagtattaaaaatatgtttgacgagcttcatcaacaaggtttgaatagtgatatcatagatgaaacatatataaacaatcatttaatgacaaaagactatcctgatccagagttgttaattcgtacttcaggagaacaaagaataagtaatttcttgatttggcaagtttcgtatagtgaatttatctttaatcaaaaattatggcctgactttgacgaagatgaattaattaaatgtattaaaatttatcagtcacgtcaaagacgctttggcggattg

SEQ ID NO: 4509 - DNA, 771 bp, Staphylococcus aureus
atgaaagttagaatgctgacagctattattgccttaatcgtattcttgcctatcttgttaaaaggcggccttgtgttaatgatatttgctaatatattagcattgattgcattaaaagaattgttgaatatgaatatgattaaatttgtttcagttcctggtttaattagtgcagttggtcttatcatcattatgttgccacaacatgcagggccatgggtacaagtaattcaattaaaaagtttaattgcaatgagctttattgtattaagttatactgtcttatctaaaaacagatttagttttatggatgctgcattttgcttaatgtctgtggcgtatgtaggcattggttttatgttcttttatgaaacgagatcagaaggattacattacatattatatgcctttttaattgtttggcttacagatacaggggcttacttatttggtaaaatgatgggtaaacataagctttggccagtaataagcccgaataaaacaatcgaaggattcataggtggcttgttctgtagtttgatagtgcctcttgcaatgttatattttgtagatttcaatatgaatgtatggatattacttggagtgacattgattttaagtttatttggtcaattaggtgatttagtggaatcaggatttaagcgtcatttcggcgttaaagactcaggtcgaatactacctggacacggtggtattttagaccgatttgacagctttatgtttgtgttaccattattaaatattttatta

SEQ ID NO: 4510 - DNA, 1686 bp, Staphylococcus aureus
atgaagcaatccaaagtttttataccaacgatgcgtgacgtgccatcagaagcagaagcacaaagtcatcgtttattattgaaatcgggtttgataaaacaaagtacaagtgggatttatagttatttaccgctagcaacacgtgtgttaaataatattactgcaattgtgcgacaagaaatggaacgtatcgattctgttgaaattttaatgccagcgttacaacaagctgaattatgggaagaatcaggacgttggggtgcatatggcccagaattaatgcgtttacaagatagacatggaagacaatttgcattaggtccaacacatgaagaattagttacatcaatagtaagaaatgaattgaaatcatacaaacaattaccgatgacattattccaaattcaatctaaattccgtgatgaaaagagaccacgttttggtttacttcgtggtcgtgaatttattatgaaagatgcgtattcattccatgctgacgaggaatcattagatcaaacgtatcaagatatgtatcaagcgtatagccgtatttttgagagagttggcattaacgcaagaccagtagttgcagattcaggtgctattggcggtagccatacacatgaatttatggcattaagtgctatcggtgaggatacaatcgtttacagtaaagaaagtgactatgctgctaatatcgaaaaagcagaagtcgtttacgaaccaaatcataagcatactactgtgcgatctttagaaaaaattgaaacaccaaatgttaagactgcgcaagaattggcagacttcttaggtagaccagtagatgaaatcgttaaaacgatgattttcaaagttgatggcgaatatattatggttttagtgcgtggacatcatgaaattaatgacattaaattaaaatcttatttcggcacagataatattgaattagcaacacaagacgagattgttaatttagttggtgcaaatcctggttcactaggtcctgtaattgataaagaaatcaaaatttatgcagataattttgtgcaagatttaaataatttagttgtcggtgctaacgaagatggttatcacttaattaatgtaaatgtaggtagagacttcaacgttgatgaatacggcgatttccgttttattttagaaggcgaaaagttaagtgatggttcaggcgttgcacattttgctgaaggtattgaagttggtcaagtattcaaattgggtactaagtattcagaatcaatgaatgctacattcttagataaccaaggaaaagcccaacctttaattatgggttgttacggaattggaatttctagaacgctaagtgcgattgttgaacaaaatcacgatgataatggaattgtttggcctaaatcagttactccgtttgatttacatttaatttctattaatcctaagaaagatgatcaacgagaactagcagatgcactatatgctgaatttaatactaaatttgatgtattgtacgatgatcgtcaggaacgtgcaggtgtcaaatttaatgatgccgatttaattggtttaccactgcgaattgttgttggtaaacgtgcatcggaaggtattgtagaagttaaagaacgtttaacaggtgatagcgaagaagtccacattgatgacttaatgactgtcattacaaataaa

SEQ ID NO: 4511 - DNA, 4308 bp, Staphylococcus aureus
atgacagagcaacaaaaatttaaagtgcttgctgatcaaattaaaatttcaaatcaattagatgctgaaattttaaattcaggtgaactgacacgtatagatgtttctaacaaaaacagaacatgggaatttcatattacattaccacaattcttagctcatgaagattatttattatttatacatgcaatagagcaagagtttaaagatatcgccaacgttacatgtcgttttacggtaacaaatggcacgaatcaagatgaacatgcaattaaatactttgggcactgtattgaccaaacagctttatctcctaaagttaaaggtcaattgaaacagaaaaagcttattatgtctggaaaagtattaaaagtaatggtatcaaatgacattgaacgtaatcattttgacaaggcttgcaatggaagtcttatcaaagcgtttagaaattgtggctttgatatcgataaaatcatattcgaaacaaatgataatgatcaagaacaaaacttagcttctttagaagcacatattcaagaagaagacgaacaaagtgcacgattggcaacagagaaacttgaaaaaatgaaagctgaaaaagcgaaacaacaagataacaacgaaagtgctgtcgataagtgtcaaattggtaagccgattcaaattgaaaatattaaaccaattgaatctattattgaggaagagtttaaagttgcaatagagggtgtcatttttgatattaacttaaaagaacttaaaagtggtcgtcatatcgtagaaattaaagtgactgactatacggactctttagttttaaaaatgtttactcgtaaaaacaaagatgatttagaacattttaaagcgctaagtgttggtaaatgggttagggctcaaggtcgtattgaagaagatacatttattagagatttagttatgatgatgtctgatattgaagagattaaaaaagcgacaaaaaaagataaggctgaagaaaagcgtgtagaattccacttgcatactgcaatgagtcaaatggatggtataccaaatattggtgcatatgttaaacaggcagcagactggggacatccagccattgcggttacagaccataatgttgtgcaagcatttccagatgctcacgcagcagcggaaaaacatggtattaaaatgatatacggtatggaaggtatgttagttgatgatggtgttccgattgcatacaaaccacaagatgtcgtattaaaagatgctacttatgttgtattcgacgttgagacaactggtttatcaaatcagtatgataaaatcatcgagcttgcagctgtgaaagttcataacggcgaaatcatcgataagtttgaaaggttcagtaatccgcatgaacgattatcggaaacgattatcaatttgacgcatattactgatgatatgttagtagatgcccctgagattgaagaagtacttacagaatttaaagaatgggttggcgatgcgatattcgtagcacataatgcttcgtttgatatgggcttcatcgacacgggatatgaacgtcttggatttggaccatctacgaatggtgttatcgatacattagaattatctcgtacgattaatactgaatatggtaaacatggtttaaatttcttagctaaaaaatacggtgtagaattaacgcaacatcaccgtgccatttatgatacagaggcaacagcttacattttcataaaaatggttcaacaaatgaaagaattagacgtattaaatcataacgaaatcaacaaaaaactcagtaatgaagatgcatataaacgtgcaagacctagtcatgtcacattaattgtacaaaaccaacaaggtcttaaaaatctatttaaaattgtaagtgcatcattggtgaagtatttctaccgtacgcctcgaattccacgttcattgttagatgaatatcgtgagggattattggtaggtacagcgtgtgatgaaggtgaattatttacggcagttatgcagaaggaccagagccaagttgaaaaaattgccaaatattatgatttcattgaaattcaaccaccggcactttatcaagatttaattgatagagagcttattagagatactgaaacattacatgaaatttatcaacgtttaatacatgcaggtgacacagcgggtattcctgttattgcgacaggaaatgcacactatttgtttgaacatgatggtatcgcacgtaaaattttaatagcatcacaacccggcaatccacttaatcgctcaactttaccggaagcacattttagaactacagatgaaatgttaaacgagtttcattttttaggtgaagaaaaagcgcatgaaattgttgtgaaaaatacaaacgaattagcagatcgaattgaacgtgttgttcctattaaagatgaattatacacaccgcgtatggaaggtgctaacgaagaaattagagaactaagttatgcaaatgcacgtaaactgtatggtgaagacctgcctcaaatcgtaattgatcgattagaaaaagaattaaaaagtattatcggtaatggatttgcggtaatttacttaatttcgcaacgtttagttaaaaaatcattagatgatggatacttagttggttcccgtggttcagtaggttctagttttgtagcgacaatgactgagattactgaagtaaacccgttaccgccacactatatttgtccgaactgtaaaacgagtgaatttttcaatgatggttcagtaggatcaggattcgatttgcctgataagacgtgtgaaacttgtggagcgccacttattaaagaaggacaagatattccgtttgaaacatttttaggatttaaaggagataaagttcctgatatcgacttaaactttagtggtgaatatcaaccgaatgcccataactacacaaaagtattatttggtgaggataaagtattccgtgcaggtacaattggtactgttgctgaaaagactgcttttggttatgttaaaggctatttgaatgatcaaggcatccacaaaagaggcgctgaaatagatcgactcgttaaaggatgtacaggtgttaaacgtacaactggacagcatccagggggtattattgtagtacctgattacatggatatttatgattttacgccgatacaatatcctgccgatgatcaaaattcagcatggatgacgacacattttgatttccattctattcatgataatgtattaaaacttgatatacttggacacgatgatccaacaatgattcgtatgcttcaagatttatcaggaattgatccaaaaacaatacctgtagatgataaagaagtaatgcagatttttagtacacctgaaagtttgggtgttactgaagatgaaattttatgtaaaacaggtacatttggggtaccagaattcggtacaggatttgtgcgtcaaatgttagaagatacaaagccaacaacattttctgaattagttcaaatctcaggattatctcatgggacagatgtgtggttaggtaatgctcaagaattaattaaaacaggtatatgtgatttatcaagtgtaattggttgtcgtgatgatatcatggtttatttaatgtatgctggtttagaaccatcaatggcttttaaaataatggagtcagtacgtaaaggtaaaggtttaactgaagaaatgattgaaacgatgaaagaaaatgaagtgccggattggtatttagattcatgtcttaaaattaagtacatgttccctaaagcccatgcagcagcatacgttttaatggcagtacgtatcgcatatttcaaagtacatcatccactttattactatgcatcttactttacaattcgtgcgtcagattttgatttaatcacgatgattaaagataaaacaagcatacgaaatactgtaaaagacatgtattctcgctatatggatctaggtaaaaaagaaaaagacgtattaactgttttggaaattatgaatgaaatggcgcatcgaggttatcgaatgcaaccgattagtttagaaaagagtcaagcgttcgaatttataattgaaggcgatacacttattccgccgttcatatcagtgcctgggcttggtgaaaacgttgcgaaacgaattgttgaagctcgtgacgatggaccatttttatcaaaagaagatttaaacaaaaaagctggtttatctcagaaaattattgagtatttagatgagttaggctcattaccgaatttaccagataaagctcaactttcgatattcgatatg

SEQ ID NO: 4512 - DNA, 396 bp, Staphylococcus aureus
atgattaaatgtgtctgtttagttgaagaaacagctgataaaatattgcttgttcaagtaaggaatcgcgaaaagtattatttcccaggtggtaaaatagaagaaggggaatcacaagtacacgcgctgttaagagaagtaaaagaagaattaaatttaacattaacaatggatgaaattgaatatatcgggacaattgtaggtcctgcatatccacaacaggatatgttaactgagttaaatggatttcgcgcattaaccaaaatcgattgggaaaacgtaactatcaataatgaaattacggatatacgctggattgataaagataatgatgcgttgattgcgcctgctgtcaaagtttggattgaaacgtatggtggtaaacatgacaaataa

SEQ ID NO: 4513 - DNA, 4473 bp, Staphylococcus aureus
aaaggcttatatgactatcgtgaggaacatgatgcgtgtggtattggtttttatgcgaatatggacaataaaaggtctcacgacatcattgataaatcgcttgaaatgttgcgacgcttagatcacaggggcggggtcggcgcagatggcatcactggtgatggcgcaggtattatgactgaaataccttttgcatttttcaaacaacatgtaacggactttgatatcccaggtgaaggtgaatatgccgtgggattatttttttccaaagaacgcgttttaggttctgaacatgaagcagtttttaaaaaatattttgaaggcgaagggttatcaattcttggttatcgtaatgtaccagttaataaagatgccattgctaaacatgtagcagatacgatgccagtcattcaacaagtgtttattgatattagggacattgaagatgttgaaaagcgtttgtttttagcgagaaaacaattagagttctattcgactcagtgcgatttagaattatattttacgagcttatcacgcaaaacaattgtatataaaggttggttacgatcagaccaaattaaaaaactctatacagatttatcagatgatttatatcaatcaaagctagggttagtgcattcgagatttagtacgaatacattcccgagttggaaaagggcgcatcctaaccgtatgttaatgcataatggtgagattaacacaataaaaggtaatgtgaactggatgcgagcacgccaacataaattaatcgaaacattatttggcgaggatcaacataaagtgtttcaaattgtcgatgaggatggtagtgactctgccattgtagataatgcgctagagttcttatcgttagccatggagccagaaaaggcagcgatgctactcatacctgaaccttggctatataatgaagcgaatgatgcaaatgtacgtgcgttttatgaattttatagttatttaatggaaccgtgggatggtcctacaatgatttcgttctgtaacggtgacaaacttggcgcgcttacagatagaaatggattacgtccaggtcgttatacgattactaaagataactttattgtcttttcatctgaagtgggtgttgtggacgtacctgaaagtaatgttgcttttaaaggtcaattgaatcctggaaagttattgcttgttgattttaaacagaataaagtcattgaaaataatgatttaaaaggtgcgattgctggagaattaccatataaagcttggattgataaccataaagttgattttgattttgaaaatatacagtatcaagattcgcaatggaaagatgaaacgttatttaaattacaacgtcaatttgcatacacgaaagaagagattcataagtatattcaggaacttgtagaaggtaagaaggatcctatcggtgcaatgggatatgatgcgccaattgcagtgttgaacgagcgaccagaatcactatttaattactttaaacagttgtttgcacaagttacgaatccaccaattgatgcgtatcgtgaaaaaatcgtaacgagtgaactttcttatttaggtggcgaaggtaacttattagcacctgacgaaacggttttagatcgaattcaattgaagagaccggtattgaatgaatcacacttagcagcgattgatcaggagcattttaaattaacatatttatcaacggtatatgaaggggatttggaagatgcgttagaagcattaggccgagaagcagtggatgctgtaaagcaaggcgctcaaattctagtgttagatgatagtggattagttgatggcaatggctttgcaatgccgatgttactcgcaataagtcatgtgcatcaattacttattaaagcagatttacgtatgtctacaagtttagtcgctaaatctggtgagacacgagaagtgcatcatgttgcttgtttactagcatatggcgcgaatgcaattgtgccatacctagcgcaacgtacagttgaacaactgacattgacagaagggttacaaggcaccgttgtcgataatgttaagacatatacggatgtattgtcggaaggtgtcattaaagtaatggcgaagatgggaatttcgacagtgcaaagttatcaaggtgcacaaatatttgaagcgattggcttgtctcatgatgtgattgatcgttattttactggaacacagtctaagttatctggtatttcgattgatcaaatcgatgctgaaaataaagcacgtcaacaaagtgatgataattatcttgcatcaggtagtacattccaatggagacaacaaggtcaacatcatgcttttaatccggaatctattttcttattgcagcacgcatgtaaagaaaatgactatgcgcaatttaaagcatactctgaagcggtgaacaaaaatagaacagatcacattagacatttacttgaatttaaagcatgtacaccgattgacatcgaccaagttgaaccggtaagtgacattgtcaaacgttttaatacaggggcgatgagttatggatcgatttcagcggaagcacatgaaacgttagcacaagccatgaaccaattaggtggaaagagtaatagtggtgaaggtggcgaagatgcaaaacgttatgaagtacaagttgatggaagcaacaaagtaagtgcgattaaacaagtcgcttctgggcgttttggtgtaactagtgattatttacaacatgccaaagaaattcaaattaaagttgcgcaaggtgcaaagcctggtgaaggtggtcaattacctggtactaaggtatatccgtggattgcgaagacaagagggtcaacgccaggtatcggtctgatttcaccaccgccacatcatgatatttattcaatagaagatttagcgcaactgatacatgatttgaaaaatgcgaataaagatgcagatatcgcggtaaaattagtttcgaaaacaggtgttggtaccattgcgtctggggtggcaaaagcatttgcagataaaattgtcatcagtggttacgatggtggtacaggggcttcacctaaaacgagtattcagcatgccggtgttccttgggagattggtttagcagaaacacatcaaacattaaaactaaatgacttaagaagtcgtgttaagttagaaacagacggtaagttattaactggtaaagatgtagcgtacgcatgtgcgcttggagcggaagaatttggatttgcaactgcaccattagtggtgttgggctgtattatgatgcgtgtatgccataaagatacatgtccagtaggagttgcaactcaaaacaaagatttacgtgctttatatagaggtaaagcacatcatgttgttaattttatgcattttattgcacaagaattaagagaaattttagcatctttaggtttgaaacgtgtagaagacttagttggaagaactgatttattacaacgatcatcaacattaaaagcgaatagcaaagcggctagtattgatgttgaaaaactgttatgtcctttcgatgggccaaacacaaaagaaattcaacaaaatcataatcttgagcatggatttgatttaacaaatttatatgagataacgaagccatatattgctaaaggacgtcgctatacaggtagctttacagtaaataatgaacaacgtgatgtaggggttattacaggtagtgagatttcgaaacaatatggagaagcaggacttcctgaaaatacaattaatgtttatacgaatggtcatgctggccaaagtcttgcagcatatgcaccgaaaggcttaatgattcatcatactggagatgcgaatgactatgttggtaaaggattatctggtggtacggtcattgtcaaagcaccttttgaagaacgacaaaatgaaattattgctggtaacgtctcattctatggtgcgacaggtggtaaggcatttattaacggtagtgcaggagaaagattctgtattagaaatagtggtgtagatgttgtcgttgaaggtatcggcgaccatggattagagtacatgactggtggacatgtcattaatttaggtgatgtaggtaagaacttcggtcaaggtatgagtggtggtattgcttacgttatcccgtctgatgtagaagcttttgttgaaaataatcaactagatacgctttcgtttacaaagattaaacaccaagaagaaaaagcattcattaagcaaatgctggaagaacatgtgtcacatacgaatagtacgagagcgattcatgtgttaaaacactttgatcgcattgaagatgtcgtcgttaaagttattcctaaagattatcaattaatgatgcaaaaaattcatttgcacaaatcattacatgacaatgaagatgaagcgatgttagctgcattttacgatgacagcaaaacaatcgacgctaaacataaaccagccgttgtg

SEQ ID NO: 4514 - DNA, 1443 bp, Staphylococcus aureus
atgggtgaatttaaaggatttatgaagtatgacaaacagtacttaggtgaattatcactggtagaccgtttgaagcatcataaagcatatcaacaacgatttactaaagaagatgcctctatccaaggtgcacgatgtatggattgtggaacgccgttttgtcaaaccggacaacagtatggtagggaaacaataggttgtccaattggaaactacattcctgaatggaacgacttagtgtatcatcaagattttaaaactgcttatgaacgcttaagcgaaacaaataactttcctgactttacagggcgtgtatgtcctgcaccatgtgaaagtgcttgtgtgatgaagattaatagagaatcgattgcgattaaaggtattgaacgcacaattattgatgaagcttttgaaaatggttgggtagcgccgaaagttccgagtcgccgtagagatgaaaaagtggcaatcgttggaagcggtccagcaggattaactgctgctgaagaacttaatctactaggatatcaagtaactatttatgaacgtgctagagaatcaggcggtttattaatgtatggtattccgaatatgaaacttgataaagatgtggttcgacgtcgtattaagttaatggaagaagcgggcattactttcattaatggtgttgaagtaggcgttgatattgataaagcaacgttagaatctgagtatgatgccattatattatgtactggtgcacaaaaaggtagagatttacctttagaaggacgcatgggtgatggtatacatttcgctatggattatttaactgaacaaacgcaactgttaaatggagaaattgatgatataacaataactgcaaaagataagaatgtcattatcattggtgctggtgatacaggggcagactgtgtagcgacagcattaagagaaaattgtaaatcgattgttcaatttaataaatatacgaaattgccagaagcaattacgtttacagaaaatgcatcatggcctttagcaatgccggtgtttaaaatggactatgcgcaccaagagtacgaagctaagtttggtaaggaaccacgtgcatatggtgttcaaacaatgcgttacgatgttgacgataaaggacacatacgtggtttgtatactcaaattttagagcaaggcgaaaatggtatggtcatgaaagaaggacctgaaagattttggcctgctgaccttgtattattatcaatcggcttcgaaggtacagaaccaacagtaccgaatgcttttaacattaaaacggatagaaatcgaatcgtggcggatgatacaaactatcaaactaataatgaaaaggtatttgctgctggagatgctagacgtggtcaaagtttagttgtatgggcaattaaagaaggtagaggcgtagcgaaagcagtagatcagtattta

SEQ ID NO: 4515 - DNA, 1590 bp, Staphylococcus aureus
atgtcagtagacacatacactgaaacaactaaaattgacaaattactgaaaaaaccaacgtcacattttcaactttcgacgacacaactttataataaaatcttagacaataacgaaggggtattaacagaacttggtgctgttaatgcaagtactggaaaatatactggtcgttcacctaaagacaaattttttgtctctgaaccttcatatagagataacattgactggggagaaattaatcaacctatcgatgaagaaactttcttgaagttataccataaagtactagactatttagataaaaaagatgaattatacgtatttaaaggctacgctggtagcgataaagatacaatgttaaaacttacagtcatcaatgaattagcatggcataatttatttgctaaaaatatgtttattagacctgaatcaaaagaagaagctacaaagattaaacctaacttcactatcgtttctgccccacattttaaagcagatccagaagttgatggtactaaatctgaaacttttgtcattatttcatttaaacacaaagtcattttaatcggcggtactgaatacgctggtgaaatgaaaaaaggtatcttctctgtaatgaattatctcttaccgatgcaagatattatgagcatgcattgctcagcaaacgttggtgaaaaaggcgatgttgcattattctttggtctatctggcactggtaaaacaaccttatcggctgacccacaccgtaaactaatcggtgatgatgaacacggctggaataaaaacggggtctttaatatcgaaggtggctgctatgcaaaagcaattaatctttccaaagaaaaagaaccacagatttttgacgcaatcaaatatggtgcaatcctagagaacactgtagttgcagaagatggttcagtggactttgaagacaatcgttatacagaaaacacgcgtgccgcttatccaattaatcacattgacaatattgtagtaccatcaaaagcagcacatccaaatacaattattttcttaactgcggatgcatttggtgttattccaccgatttcaaagttaaataaagaccaagcaatgtatcatttcttgagtggtttcacttctaaattagctggtacagagcgtggtgtgacagaacctgaaccatcattctcaacatgtttcggcgcaccgttcttcccgttacaccctactgtttacgctgatttattaggtgaacttatcgatttacatgatgttgatgtttatcttgttaatactggatggactggcggaaaatatggtgtaggacgtagaatcagcttacattacacacgtcaaatggtaaaccaagcgatttctggcaaattgaaaaatgcagaatatacaaaagatagtacgtttggtttaagtattcctgtagaaattgaagatgtaccgaaaacaattttaaatccaattaatgcttggagcgacaaagataaatataaagcacaagcagaagatttaattcaacgttttgaaaagaacttcgaaaaatttggtgaaaaagttgaacatattgctgaaaaaggtagtttcaacaaa

SEQ ID NO: 4516 - DNA, 1191 bp, Staphylococcus aureus
atgttaaataacaaacgattatttacttcagagtctgttacagaaggacacccagataaaatcgctgaccaagtgtcagatgcaatattagatgctattttaaaagacgacccaaatgcacgtgtagcttgtgaaacaactgttacaacaggtatggcattgatcgccggcgaaatttctacaacaacatatgttgatattccgaaagttgttagagaaacaatcaaagaaattggatacacaagagcaaaatatggttatgattatgaaacaatggcaattttaactgcgattgatgaacaatcacctgacattgcacaaggcgtggataaagcattagagtatcgtgataaagatagcgaagaagaaattgaagcaacaggtgcaggtgaccaaggtttaatgtttggttacgcaacgaatgaaacagaaacgtatatgcctctagcaatttatttatcacatcaattggcaaaacgtttatctgatgtgcgtaaagatggtacgttaaattatttacgaccagacggtaaagttcaggtcactgttgaatatgatgaaaatgataacccagtacgtattgatacgattgtcgtatcaacacaacatgctgaggatgtgacacttgaacaaattcaagaagacatcaaagctcatgtcatttatccaactgttccagaaaacttgattaatgaacaaactaaattctacatcaatcctacaggacgctttgtaatcggtggacctcaaggtgatgcaggattaacaggacgtaaaatcattgttgatacgtacggtggctatgcacgtcatggtggcggatgcttcagtggtaaagatcctacaaaagtagaccgttcagctgcatacgctgcacgttatgtggctaaaaatattgttgcagcaggtttagcagatcaatgtgaagtacaattggcatatgcgattggtgttgcagaaccagtgtcaattgcaattgatacatttggaacaggtaaagtttctgaaggacaacttgtcgaagcagttagaaaacactttgacctaagacctgcaggtattattaaaatgcttgatttgaaacaaccgatttacaaacaaactgctgcttatggtcattttggacgtacagatgtcttattcccatgggaaaaattagacaaagtggaagaattaaaagacgcagtaaaa

SEQ ID NO: 4517 - DNA, 816 bp, Staphylococcus aureus
acattttataatggaaacacgatgccacaaattggtttagggacatttcgtgtggacaatgatgaaaattgcatggaaagtgttaagtatgccattgaacaaggatatcgtagtattgataccgcaaaagtttatgggaatgaagaacaagtaggtgctggcattcgtgccggattggaatcaactggtattgctagagaagacttatttattacttcaaaattatattttgaggattttggtcgtgaaaatgtagcagctgcttacgaagctagtttatctagattaggtttaaaatacttagatttgtatctagtacattggccaggtacgaacgaagccgtaatggttgatacatggaaaggtatggaagatttatataaaaataataaagttaaaaatataggtgtcagcaattttgaacctgaacatttggaagctttgttggcacaagtgtcaataaaacctgtaattaatcaggttgaatatcatccatatttaacgcaacataaattgaaattatatttggcagcacaacatatcgtgatggaatcttggtcaccattgatgaatgcacaaattttaaatgatgagacaattaaagacattgctcaagaattaggaaagtcacctgcccaagttgttttaagatggaatgtgcagcatggtgtggttacaatccctaaatcggtgacaccaaacagaatctctgaaaacttccaaatatttgacttcgaattatcagatgaacaaatgacgcgaattgatagtttaaatcaagataagagaattggacctgatccaaaaacttttgaa

SEQ ID NO: 4518 - DNA, 3111 bp, Staphylococcus aureus
tatttaaatattcatacggcttatgatttgttaaattcaagcttaaaaatagaagatgccgtaagacttgctgtgtctgaaaatgttgaagcacttgccataactgacaccaatgtattgtatggttttcctaaattttatgatgcatgtatagcaaataacattaaaccgatttttggtatgacaatatatgtgacaaacggtttaaacactattgaaaccgttgttttagcaaaagataataatgggttgaaggatttatatcaactttcatcgaaaataaaaatgaattcaatggaaaatgtttcatttgaactattgcaacaattttcatcgaatttgattatcatttttaaaaatgttgcagacgaacatcgtgacattgttcaagtttttgattcgcatgaagatacgtatttagatcatcgaagtgttttagttcagggtgtaaagcacgtatggattcaaaatgtttgttaccaaacatgtcaagatgccgatacgatttctgcattagcagctattagagacaatacaaaattagacttaattcatgatcaagaagattttggtgcacattttttaactgaaaaggaaattaagcaattagaaattaatcaagaatatttaacgcaggttgatgttatagctcaaaagtgtaatgcagaattaaaatatcatcaatctctacttcctcaatatcagacacctaatgatgaatcagctaaaaaatatttgtggcgtgtcttagttacacaattaaaaaaattagaacttaattatgacgtctatttagagcgattgaaatatgagtataaagttattactaatatgggttttgaagattatttcttaatagtaagtgatttaatccattatgcgaaaacgaatgatgtgatggtaggtccaggtcgtggttcttcagctggctcactggtcagttatttactaggtattacaacgattgatcctattaaattcaatctattatttgaacgttttttaaacccagaacgtgtaacaatgcctgatatagatattgactttgaagatacacgccgagaaagggttattcagtacgtccaagaaaaatatggcgagctacatgtatctggaattgtgactttcggtcatctgcttgcaagagcggttgctagagatgttggacgaattatggggtttgatgaagttacattaaatgaaatttcaagtttaatcccacataaattaggaattacacttgatgaagcatatcaaattgacgattttaaaaagtttgtacatcgaaaccatcgacatgaacgctggttcagtatttgtaaaaagttagaaggtttaccaagacatacatctacacatgcggcaggaattattattaatgaccatccattatatgaatatgcccctttaacgaaaggggatacaggattattaacgcaatggacaatgactgaagccgaacgtattggtttattaaaaatagattttctagggttgagaaacttatcgattattcatcaaatcttgacacaagtcaaaaaagatttaggtattaatattgatatcgaaaaaattccgtttgatgatcaaaaagtgtttgatttgttgtcgcaaggagatacgactggcatattccaattagagtctgacggtgtaagaagtgtattaaaaaaattaaagccggaacactttgaagatattgttgctgtaacttctttgtatagaccaggtccaatggaagaaattccaacttatattacaagaagacatgatccaagcaaagttcaatatttacatccacatttagaacctatattaaaaaatacttacggtgttattatttatcaagagcaaattatgcaaatagcgagcgcatttgcaaacttcagttatggtgaagcggatattttaagaagagcaatgagtaaaaaaaatagagctgttcttgaaagtgagcgtcaacattttatagaaggtgcaaagcaaaatggttatcacgaagacattagtaagcaaatatttgatttgattctgaaatttgctgattatggttttcctagagcacatgctgtcagctattctaaaattgcatacattatgagctttttaaaagtccattatccaaattatttttacgcaaatattttaagtaatgttattggaagtgagaagaaaactgctcaaatgatagaagaagcaaaaaaacaaggtatcactatattgccaccgaacattaacgaaagtcattggttttataaaccttcccaagaaggcatttatttatcaattggtacaattaaaggtgtaggttatcaaagtgtgaaagtgattgttgatgaacgttatcagaacggcaaatttaaagatttctttgattttgctagacgtataccgaagagagtcaaaacgagaaagttacttgaagcactgattttagtgggagcgtttgatgcttttggtaaaacacgttcaacgttgttgcaagctattgatcaagtgttggatggtgatttaaacattgaacaagatggttttttatttgatattttaacgccaaaacagatgtatgaagataaagaagaattgcctgatgcacttattagtcagtatgaaaaagaatatttaggattttatgtttcgcaacacccagtagataaaaagtttgttgccaaacaatatttaacaatatttaaattgagtaacgcgcagaataataagcctatattagttcagtttgataaagttaaacaaattcgaactaaaaatggtcaaaatatggcattcgtcacattaaatgatggcatcgaaactttagatggtgtgattttccctaatcagtttaaaaagtacgaagcgttgttatcacataatgacttgtttatagtcagcgggaaatttgaccatagaaagcaacaacgtcaactaattataaatgagattcaaacattagccacttttgaagaacaaaaattagcatttgccaaacaaattataattagaaataaatcacatatagatatgtttgaagagatgattaaagctacgaaagagaatgctaatgatgttgtgttatccttttatgatgaaacgattaaacaaatgactacttta

SEQ ID NO: 4519 - DNA, 1182 bp, Staphylococcus aureus
atggcaaaagaaaaatttgatcgttctaaagaacatgccaatatcggtactatcggtcacgttgaccatggtaaaacaacattaacagcagcaatcgctactgtattagcaaaaaatggtgactcagttgcacaatcatatgacatgattgacaacgctccagaagaaaaagaacgtggtatcacaatcaatacttctcacattgagtaccaaactgacaaacgtcactacgctcacgttgactgcccaggacacgctgactatgttaaaaacatgatcactggtgctgctcaaatggacggcggtatcttagtagtatctgctgctgacggtccaatgccacaaactcgtgaacacattcttttatcacgtaacgttggtgtaccagcattagtagtattcttaaacaaagttgacatggttgacgatgaagaattattagaattagtagaaatggaagttcgtgacttattaagcgaatatgacttcccaggtgacgatgtacctgtaatcgctggttcagcattaaaagctttagaaggcgatgctcaatacgaagaaaaaatcttagaattaatggaagctgtagatacttacattccaactccagaacgtgattctgacaaaccattcatgatgccagttgaggacgtattctcaatcactggtcgtggtactgttgctacaggccgtgttgaacgtggtcaaatcaaagttggtgaagaagttgaaatcatcggtttacatgacacatctaaaacaactgttacaggtgttgaaatgttccgtaaattattagactacgctgaagctggtgacaacattggtgcattattacgtggtgttgctcgtgaagacgtacaacgtggtcaagtattagctgctcctggttcaattacaccacatactgaattcaaagcagaagtatacgtattatcaaaagacgaaggtggacgtcacactccattcttctcaaactatcgtccacaattctatttccgtactactgacgtaactggtgttgttcacttaccagaaggtactgaaatggtaatgcctggtgataacgttgaaatgacagtagaattaatcgctccaatcgcgattgaagacggtactcgtttctcaatccgtgaaggtggacgtactgtaggatcaggcgttgttactgaaatcattaaa

SEQ ID NO: 4520 - DNA, 1155 bp, Staphylococcus aureus
gagtttttagaggaaaatataaattatctaaaagaaaatggtttgtataatgaaatagatacaattgaaggtgcaaacggaccagaaatcaaaatcaatgggaaatcatacattaacttatcttcaaataattatttaggactagcaacaaatgaagatttgaaatcggctgcaaaagcagctattgattcacatggtgtaggtgcaggcgctgttcgtacaataaatggtacattagatttacacgacgaattagaagaaacactagcaaaatttaaaggaacagaagctgcaatagcttatcaatcaggatttaattgtaatatggctgctatttcggctgttatgaataaaaatgatgctattttatcagatgagcttaatcatgcatcaattattgatggatgtcgcttatctaaagctaaaattattcgagttaaccattcagacatggatgatttacgtgcgaaagcaaaagaagcagttgaatcaggtcaatacaataaagtgatgtatatcactgatggcgtttttagtatggatggtgatgtggctaaattacctgaaattgtagaaattgcagaagaatttggtttattaacttatgttgacgacgctcatggttcaggtgttatgggtaaaggcgctggtacggttaaacattttggtttacaagataaaatcgatttccaaataggtacgctttctaaagcaattggtgtcgttggcggttatgtagcaggtacaaaagagttaatagattggttaaaagcacaatcacgaccattcttattctctacatcattagcacctggggatactaaagcaataactgaagcagttaaaaagttaatggcttcaactgaattacatgataaattatgggacaatgcacaatatttaaaaaacggattgtcaaaattaggatatgatacaggtgagtcagaaactccaattacaccagtaattattggtgatgaaaaaacaactcaagaatttagtaagcgtttaaaagacgaaggtgtctatgtgaaatctatcgtttttccaacagtaccaagaggtacaggacgtgtaagaaatatgcctacagctgcacatacaaaagacatgttagatgaagcaattgcggcttatgaaaaagtaggaaaagaa

SEQ ID NO: 4521 - DNA, 846 bp, Staphylococcus aureus
gaattaagtaagcaaccaacgccagataaagcagaagataacgcatttttcccatcaccatattcccttagtcaatatacagcacctaaaacagattttgatggtgttgaacacaaaggtgcctataaagatggtaaatggaaagtattgatgattgctgctgaagagagatatgtattattggaaaatggaaaaatgttctctacgggtaatcatcctgttgaaatgttattacctttacatcatttaatggaagcaggttttgacgttgatgttgcgacattatctggttatccagctaaattagaattatgggctatgccaactgaagacgaggcagttataagcacttataataaattgaaagaaaaattaaaacagccaaaaaaattagcagatgtgattaaaaatgaattaggacctgattcagactatttatctgtctttatcccaggtggacatgctgcagttgttggtatttctgaaagcgaagacgttcaacaaacattagattgggcattagaaaatgaccgatttatagttacattatgtcatggaccagcagcactactttcagcagggcttaacagagaaaaatctccattagaaggatactctgtttgtgtcttccctgactcattagatgaaggtgcaaatattgaaataggttatttacctggacgcttgaaatggttagttgctgatttattaactaaacaaggattaaaagtagtcaacgacgatatgacaggaagaacgttaaaagatcgcaaattattaacaggtgacagtcctttagcttcaaatgagttaggaaaattagcagttaatgaaatgttaaatgca

SEQ ID NO: 4522 - DNA, 348 bp, Staphylococcus aureus
ttgaaagcaaaaggctatcaactaggtattgttacgagtgatactaaaaaaggcgtagaacaatttttagcacataccaatgctacctcgttgttcgatttgatcatttctaccgaagcggatgcctatgagaagccaaatcctaaagtattatcgcctttatttgagaaatataatgtagatcctcagaaagtagctatagtaggagacactgctaatgatatgaagacagcaagtaatgcaaatttaggtatggcaataggtgtattaacaggtattgcaacaaaagaagaattacatgaagctgatattattttaaatagtgcggcagatattttagaagcttta

SEQ ID NO: 4523 - DNA, 2796 bp, Staphylococcus aureus
atgaataataaaaagacagcaacaaatagaaaaggcatgataccaaatcgattaaacaaattttcgataagaaagtattctgtaggtactgcttcaattttagtggggacaacattgatttttgggttaagtggtcatgaagctaaagcggcagaacatacgaatggagaattaaatcaatcaaaaaatgaaacgacagctccaagtgagaataaaacaactgaaaaagttgatagtcgtcaacaaaataatattgaacaaagtacaacgtcagaccaaccaaaagtaaatgagtctgataatacttcagttaaagaaactactgaagaacctcaaaatacaacttctacacaaccaactaaacaaaataacgatgcgatggcaaataaagataatttagcggctcaaaatatttcaacgcaggctaaagatgtttcaactacgcctaaaacaacaactattaaaccaagaacattaaaccgcatggcagtgaatactgttgcagctccacaacaaggaacaaatgttaatgataaagtacattttacgaacattgatattgcgattgataaaggacatgttaataaaacaacaggaaatactgaattttgggcaacttcaagtgatgttttaaaattaaaagcgaattacacaatcgatgattctgttaaagagggtgatacatttacttttaaatatggtcaatattttcgtccaggttctgtaagattaccttcacaaactcaaaatttatataatgcccaaggtaatattattgcaaaaggtatttatgatagtgaaacaagcacaacaacatatacttttacgaattatgtagatcaatatacaaatattagcggtagctttgaacaagtcgcatttgcgaaacgtgaaaatgcaacgactgataaaactgcttatccaatggaagttacattaggaaacgataaatatagtaaaaacgtcattgtcgattatggtaatcaaaaaggtcaacaacttatttcgagtacaaattatattaataatgaagatttgtcacgtaatatgactgtttatgtaaatcaacctaaaaagacctatacaaaagaaacatttgtaacaaatttaactggttataaatttaatccagatgctaaaaactttaaaatttatgaagtaactaaccaaaatcagtttgtggatagtttcaccccagatacttcaaaacttacagatgtcactgataaatttaaaattacatacagtaatgataataagacggcgacagtagatttattgaatggtcaatctagtagtgataaacagtacatcattcaacaagtagcatatccagataatagttcaacagataatgggaaaattgattatactttagaaacacaaaatggtaagagtagttggtcgaacagttattcaaatgtgaatggctcatcaactgcaaatggcgaccaaaagaaatataatctaggtgactatgtatgggaagatacaaataaagatggtaaacaagatgccaatgaaaaagggattaaaggtgtttatgtcattcttaaagatagtaacggtaaagaattagatcgtactactactgatgaaaatggtaaatatcagttcacaggtttgggaaatgggacttacagtgtagaattttcaacgctagcaggttacacaccaaccactgcaaatgcaggaactgatgatgctgttgattcagatggactaactacaacaggtgtcattaaagacgctgacaacatgacattagacagtggtttctataaaacaccaaaatacagtttaggtgattatgtttggtacgacagtaataaagacggcaaacaagattcaactgaaaaaggtatcaaagatgttaaagttactttattaaatgaaaaaggcgaagtaattggaacaactaaaacagatgaaaatggtaaatatcgtttcgataatttagatagcggtaaatataaagttatttttgaaaagcctgctggcttaacacaaacaggtacaaatacaactgaagatgataaagatgcagatggtggcgaagttgacgtaacaattacggatcatgatgatttcacacttgataatggctactacgaagaagaaacatcagacagcgactcagattcagatagcgattcagactcagacagcgactcagattcagatagcgattcagactcagatagcgactcagattcagacagtgattcagattcagacagcgactcagactcagatagcgactcagactcagatagcgactcagattcagatagcgactcagattcagacagtgattcagattcagacagcgattcagattcagatagcgactcagactcagatagcgactcagactcagacagcgattcagactcggatagcgactcagattcagatagtgactcagattcagacagtgactcagattcaggtagtgactcagattcagacagcgattcagactcagacagcgattcagactcagatagcgactcagattcagacagcgattcagattcagatagcgactcagattcagacagcgattcagattcagatagtgactcagactcagacagtgattccgattcagatgtaggtaaacatactccggctaaaccaatgagtacagttaaagaccatcacaataaagcgaaagcattaccggaaacaggtagtgaaaataataattcaaataatggcacattattcggtggattattcgcggcattaggatcattattactattcggtcgtcgtaaaaaacaaaataaa

SEQ ID NO: 4524 - DNA, 1125 bp, Staphylococcus aureus
atgcataaaaaatatttattgctattttttctgttattatcagttgcattgttatttagctgttccaagcaaaatgagaaagctcaaaataaatctgttaatccaaatgagtatgcaaagcataaatcgaaaatggatgaacattgggaaacatatcacggccaagtttatcatgtgttttatcatccattaattacagacccaaaagttgcgtttacaggagatacacaccaagctaagggcaacaatgattggatgattactgtaagtgaatttaaaaaatcattgaacgaattatataaaaataattacatcatcgttaatccacatgatgtatacgacttatcatctcatcatgtaaaagccaaaaaaataaaattgccgaaaggtaaaaagccactaatcatctcaattgatgatatgaattactatagttacatgagacaccatggttatgctgaccgcttagtacttgataaaaataagcatgttgtatctgaaacgacagactcaaaaggccatgctacttattctgatgacaatgatatcgtgccaattttaaataaatttgtaaaagagcatccagatttttctttaaatggtgaaaaaggtgttgttgctttaaccggttatgagggcgtattaggttatcgcacgaatgaattaacgagtaaagattatacaaagaataaaaaggcagctgaggaagttgttcgcgcaatgaaacgggatggatggtcatttgcgagtcattcatatggtcacattaattttgaaaaaacatctttagatggtattaaacgtgatactaaaagatggaaaaatgaagttgaaccaattgtaggtaaaacagatatgtttgtatttccacatggcgcacaggatagacatacacaagcgtatgattatttggtagatgaagcagagtttaagtttattgcaggtgtcggtccaaacaattttacagatatatcagcaacgaacgtttaccaagatagggttgcgattgatggtctaaacttatttgaatttaaatataaactcaaaccattttttaatcctgaaaatgtatatagtaaacaagatagacaattctttaaaggtaatcgggattatgaagaatag

SEQ ID NO: 4525 - DNA, 498 bp, Staphylococcus aureus
gaacatcaaaacgttaaattgaatcgtacagttaaagcagccgtactaacggtatcagatactagagactttgatacagataaaggtggtcaatgcgtgcgccaattgttacaagcagatgacgttgaagtgagtgacgcacattatacaattgtgaaagatgaaaaagtagccatcacgacgcaggtgaagaagtggttagaagaagatattgatgtcatcattacgactggtggaacgggtattgcacaacgtgatgtgacgattgaagcagtaaaaccacttttaactaaagagatagaaggctttggggaattgtttagatatttgagttatgttgaagatgttggcacgcgtgcattattgtctcgtgctgtagcaggtacagttaatgataaattgatattttcgattccaggatcaacaggcgcagttaaattagcattagaaaagctcattaaaccagaattaaatcatctgattcatgagcttacaaaa

SEQ ID NO: 4526 - DNA, 1257 bp, Staphylococcus aureus
atggtagtagaaaaaagaaacccaatcccagttaaagaagcaattcaacgtatcgttaatcagcagagttcaatgccggcaattacggtagcacttgaaaaaagtctaaatcatatcttagcagaagatattgtagctacttatgatataccaaggtttgataaatcaccttatgatggttttgcaattcgcagtgttgattcacaaggggcaagtggtcagaatcgcattgagtttaaagtgattgatcatattggtgcaggttcagtttctgataaattagttggggatcacgaagcggtgcgtattatgactggagcacaaatacctaatggcgcagatgctgttgttatgtttgaacaaacgattgaactagaagatatatttacaattcgtaaaccattttcaaaaaatgaaaatatatctttaaaaggtgaagaaacaacgacaggcgatgttgttctaaaaaaaggacaagtaattaatccaggtgctattgcggtccttgcaacatatggctatgcagaggttaaagttattaagcaaccaagcgtcgctgttattgcaacaggaagcgaattattagatgttaatgatgtattagaagatggaaaaattcgcaactctaatggtccaatgattcgtgccttagcagaaaaattaggtcttgaagttggtatttacaaaacacaacaagatgatttagatagtggtatacaagtcgttaaagaagctatggaaaaacatgatatcgttattacaacgggcggagtttctgttggagattttgactatttacctgagatttataaggctgtaaaggcggaagtgttatttaataaagtagcaatgcgtcctggtagcgtaacaacggttgcatttgcagatggaaaatatttgtttggattatctggaaatccatcagcttgttttacaggatttgaactatttgtgaaaccagctgttaaacatatgtgtggcgcactagaagtcttcccgcaaataattaaagcaacattaatggaagattttaccaaggcaaacccattcacacgatttatacgtgctaaagcaacgttaacaagtgctggagctactgtagtaccttcaggattcaataaatcaggtgcggttgtagcgattgcacatgctaactgtatggtcatgttaccaggagggtcacgtggttttaaagcgggtcatacagtagatattatattgactgaatctgacgctgctgaagaggaacttctttta

SEQ ID NO: 4527 - DNA, 495 bp, Staphylococcus aureus
ttaatcattgatggatacaatatgataggacaatcaccaactctaagcgccattgcaaaagagaatttagaagaagctagaatgcaattaatagatgcaattgcaaattataatgctgttatttcagatgaaattatttgtgttttcgatgcttatgaccaatcgggtgttgaaagagaatacatgtatcatggtgttaaaacgatttttaccaaggaaaaagaaacagctgatagtttcatagaacgttatgtctatgaactttatgacaagcacactaagcatattacagttgtaacaagtgatatgagtgagcaacatgctatctttggatcaggtgcatatagaatatcatctcgcgaaatgtggagagatttaaaagaaaatgaaattgatgtgagtaaatcattagatgatataagtgaaaacaagccaagaactcgaattccgttatcttctgaaatccttgcagaatttgaaaaaatacgaagagga

SEQ ID NO: 4528 - DNA, 627 bp, Staphylococcus aureus
ttgttaaaaagaatgagagacgatataaaaatggtatttgagcaggatccagcggcacgttcaacattagaagtcattacaacgtatgcaggtttacatgcagtttggagtcatttgattgcacataagttatacaaccaaaaaaaatatgttgcagcacgcgcgatatctcaaatttcaagatttttcacaggtatagaaatccatccaggtgctaaaattggaaagcgtctatttatagatcatggtatgggcgttgtaataggagaaacatgtacaattggtgataatgtgacaatctatcaaggcgtgacacttggtgggacagggaaagaaagagggaaaagacacccagatataggagacaatgttttaatagcagcgggtgcgaaagttttaggaaatattaaaataaattcaaatgtaaatattggtgcaaattcagttgttttacaatcagttccaagttattcaacggttgttggtataccaggacatattgttaagcaagatggtgttcgagttggaaaaacatttgatcatcgccatctacctgatccaatttatgaacaaattaagcatttagaacgacaacttgaaaagactaggaatggagagattcaagat

SEQ ID NO: 4529 - DNA, 1443 bp, Staphylococcus aureus
atgagcgatcgtataagagtaagatatgcaccaagtccaactggttatcttcatattggtaatgcaagaacagcattattcaattacttgtatgctaaacattataacggagattttgtgattcgaattgaagatactgataaaaaacgtaatttagaagatggagaaacatcacaatttgataatcttaaatggttaggattagattgggatgaatctgtagataaagacaatggctacggaccatatcgtcaatctgaacgtcaacatatctaccaaccattaatagatcagttactagcagaagataaagcatataaatgctatatgacagaagaagaattagaagctgaacgtgaagcgcaaatcgctcgtggtgaaatgcctcgctatggtggtcaacatgcgcatttgactgaagaacaacgtcaacaatttgaagcagaaggacgccaaccatcaattcgtttccgagtacctcaaaaccaaacgtattcttttgatgatatggtaaaagggaatatttcatttgattcaaatggtattggtgactgggttatcgttaaaaaagatggcattccaacgtacaattttgcagtagctatagatgattattacatggaaatttcagatgttattcgtggtgatgatcatatttcaaacacgcctaaacaaattatgatttatgaagcatttggctgggagccacctcgttttggtcatatgtcattaattgttaatgaagaacgtaaaaagttaagtaaacgtgatgggcaaattttacaatttattgagcaatatcgtgacttaggttatttacctgaagcgttatttaattttattgcgttattaggttggtctcctgaaggtgaagaagaaatcttttctaaagaagaatttatcaaaatctttgatgaaaagcgtttgtcaaaatcaccagcatttttcgataagcaaaaattagcatgggttaataaccaatatatgaaacaaaaagatactgaaacagtattccaattagcattacctcatttaattaaagcgaatttgattcctgaggtgccgtcagaagaggatttatcttggggacgcaaattaattgcgctttatcaaaaagaaatgagttatgccggtgaaattgttcctttatcagaaatgttctttaaagaaatgccagctcttggtgaagaagaacaacaagtgatcaatggagagcaagtaccagagttaatgacgcacttattcagtaaattagaagcacttgaaccatttgaagcggctgaaattaaaaagacaattaaagaagttcaaaaagaaacaggaataaaaggcaagcaattatttatgcctattcgtgttgctgtaacaggccaaatgcatggtcctgaattaccaaatacaattgaagtacttggaaaagaaaaagtgctaaaccgtttaaaa

SEQ ID NO: 4530 - DNA, 1356 bp, Staphylococcus aureus
ttggccaagaaaaaagtgatttttgaatgtatggcttgtggttatcaatctcctaaatggatggggaaatgtcctaattgtggcgcttggaatcaaatggaggaaattgttgaaaaagcagccaatcctaaacatggagtgaaaaccaaggaattaacaggtaaagtacaaaaattaaatagtattaaacatgaaacaacgccgagagtgttaacagattcagcagaattcaaccgtgtattaggtggaggtattgtgagcggatcgttagtacttattggtggggatccaggtattggtaagtcaacgttacttttacaaatttgtgcatcgttatctcaaaagaaaaaagtactatatattactggagaagaatcgcttagtcagactaaattacgtgcagagcgattagatgaagattcaagtgaattgcaagtattagctgaaacagatcttgaagttatttatcaaacagtaaaagaagaacaacctgatttattagtagtggattcgattcaaacaatatatcatcctgaaatcagctctgcgccaggttctgtttcacaagttcgtgaaagtacacaaagtttaatgaatattgctaaacaaatgaacattgcaacttttatagtgggtcatgtaacgaaagaaggtcaaattgctggcccaagattgctagaacacatggttgatactgtgctttattttgaaggcgatgaacaccacgcatatcgaattttgcgagctgttaaaaaccgttttggttcaacgaatgaaatgggaatcttcgaaatgaagcaaagtggattaaaaggtgtaaataatccatctgaaatgtttttagaagaacgttcaacaaatgttccaggttcaacaattgttgcaaccatggagggaaccagaccacttttaatagaagttcaagcgctggtaactccaacgacttttaacaatccgagacgaatggcaacagggattgatcataatcgattaagtttgttgatggctgttttggaaaagaaagaaaattatctattacaacaacaagatgcttatatcaaagtagctggcggtgtgaagttaacggagccagcagttgatttaagtgtaattgtagcaactgcgtctagctttaaagataaagctgtcgacggattagattgctatattggagaagttggtttaacgggtgaggtacgtcgtgtatctcggatagaacaacgcgtgcaagaggctgcaaaactaggtttcaaacgtgtaattattcctaaaaataatataggcggatggacatatcctgaaggtatacaagtaataggtgtaactactgtacatgaagcattgtcatttgctctt

SEQ ID NO: 4531 - DNA, 2430 bp, Staphylococcus aureus
atgttatttggtagattaactgaacgtgcacagcgcgtattagcacatgcacaagaagaagcaattcgtttaaatcattcaaatataggaacagaacacctattattggggttaatgaaagaacctgaaggaattgctgcaaaagtattagaaagttttaatatcactgaagataaagtaattgaagaagttgaaaaattaattggacatggtcaagatcatgttggtacattgcattatacacctagagctaaaaaagtcattgaattatcgatggatgaagctagaaaattacatcacaattttgttggaacggaacatattttattaggcttgattcgtgaaaatgaaggtgttgcagcaagagtttttgcaaatctagatttaaatattactaaagcacgtgcacaagttgtgaaagctttaggaaaccctgaaatgagtaataaaaatgcacaagctagtaagtcaaataatactccaactttagatagtttagctcgtgacttaacagtcattgccaaagacggtacattagatcctgttataggacgtgatagagaaattacacgtgtaattgaagtgttaagtagacgtacgaaaaacaatcctgtacttattggagaaccaggtgttggtaaaactgctattgctgaaggtttagcgcaagccatagtgaataatgaggtgccagagacattaaaagataagcgtgttatgtctttagatatgggaacagtagttgcaggtactaaatatcgtggtgaatttgaagagcgtctgaaaaaggttatggaagaaatccaacaagcaggtaatgtcatcctatttattgatgagttgcatactttagttggtgctggtggtgctgaaggtgctatcgatgcttcgaatattttgaaaccggcattagcacgtggtgaattacaatgtattggtgctactacattagatgaatatcgcaaaaatattgaaaaagacgcggctttagaacgtcgtttccaacctgtacaagttgatgaaccttcagtagtagatacagtcgctattttaaaaggattaagagatcgttacgaagcacaccatcgtattaatatttcagacgaagctattgaagcagctgttaaattaagtaacagatacgtttcagatcgtttcttaccagataaagcaattgatttaattgatgaagcaagttctaaagtaagacttaagagtcatacgacacctaataatttaaaagaaattgaacaagaaattgaaaaagttaaaaatgaaaaagatgccgcagtacatgctcaagagtttgaaaatgctgctaatctgcgtgataaacaaacaaaacttgaaaagcaatatgaagaagctaaaaatgaatggaagaacgcacaaaatggcatgtcaacttcattgtcagaagaagatattgctgaagtcattgcaggatggacaggtatcccattaactaaaatcaatgaaacagaatctgaaaaacttcttagtctagaagatacattacatgagagagttattgggcaaaaagatgctgttaattcaatcagtaaagcggttagacgtgcccgtgcagggttaaaagatcctaaacgaccaattggtagctttatcttccttggaccaactggtgttggtaaaactgaattagctagagctttagctgaatcaatgttcggcgatgatgatgcgatgatccgtgtagacatgagtgaatttatggaaaaacacgcagtgagccgattagttggtgctcctccaggatatgttggtcatgatgatggtggacaattaactgaaaaagttagacgtaaaccatattctgtaattttatttgatgaaattgaaaaagcacatccagatgtatttaatattctattacaagttttagatgacggacatttgacagatacaaaaggacgtacagttgatttcagaaatacaattatcataatgacatcaaacgttggagcacaagaattacaagatcaacgatttgctggattcggtggttcaagtgatggacaagattatgaaacaattcgaaaaacgatgttaaaagaattaaaaaattcattccgtccagaatttttaaaccgtgtagatgatatcattgtattccataaactaacaaaagaagaattaaaagagattgtaacaatgatggttaataaattaacaaatcgattatccgaacaaaacataaatattattgttactgataaagcgaaagacaaaatcgcagaagaaggatatgatccagaatatggtgcaagaccattaattagagcgatacaaaaaactatcgaagataatttaagtgaattaatattagatggtaatcaaattgaaggtaagaaagttacagtagatcatgatggtaaagagtttaaatatgacattgctgaacaaacttca

SEQ ID NO: 4532 - DNA, 1011 bp, Staphylococcus aureus
atgacgcataatattcatgataatatcagccaatggatgaaaagtaatgaagaaacaccaattgttatgtcttctagaattcggttagcgcgtaatttagaaaatcatgtgcatccactaatgtatgctactgaaaatgatggatttagagttataaatgaggtacaagatgccttgccaaattttgaattaatgcgtcttgatcaaatggatcaacaaagtaaaatgaaaatggttgcaaagcatttgattagtcctgaactaataaaacaaccagcagccgcagtattagtgaatgatgatgaatctttaagtgtcatgataaatgaagaggaccatattcgtattcaagctatgggaactgacacgacattacaggctttatataatcaagcttcatcaattgatgatgaattagatcgaagccttgatataagttatgatgaacaacttggttatttaactacatgtcctaccaatataggtactggtatgagagcaagcgtgatgctacatttaccaggtctatctattatgaaaagaatgacacggattgctcaaaccattaatcgttttggatatacaatcagaggtatttacggtgaaggttcgcaagtttatggacatacttatcaagtatccaaccaacttacacttggtaaatctgagttagaaatcatagaaacattaacagaagttgttaatcaaatcattcatgaagaaaaacaaatacgacaaaagttagacacttataatcaattagaaacacaagaccgtgtttttcgctcgctaggtattttacaaaactgtagaatgataactatggaagaggcttcttatagattaagcgaagttaaacttggtatagatttaaattacattgaattacaaaactttaaatttaatgaattgatggtagctatacagtcaccatttttattagatgaagaagatgacaaatctgtaaaagaaaaacgagcagatatactaagagaacatataaagtaggag

SEQ ID NO: 4533 - DNA, 546 bp, Staphylococcus aureus
gtgctttgtgaaaattgtcaacttaatgaagcggaattaaaagttaaagttacaagtaaaaataaaacagaagaaaaaatggtgtgtcaaacttgtgctgaggggcaccatccgtggaatcaagctaatgaacaacctgaatatcaagaacatcaagataatttcgaagaagcatttgttgttaagcaaattttacaacatttagctacgaaacatggcattaattttcaagaagtagcgtttaaagaagaaaaacgttgcccatcatgtcatatgactttgaaagatattgcacatgttggtaaatttgggtgtgctaattgttatgcaacatttaaagatgacatcattgatatcgtccgcagagttcaaggtggacaatttgagcacgttggaaagacaccacattcttcacataaaaagatagctttaaagcgaaaaatcgaagaaaagaatgaatatttgaaaaaacttattgaaatccaagattttgaggaagcagccattgttagagatgaaattaaagcactaaaagctgagagtgag

SEQ ID NO: 4534 - DNA, 546 bp, Staphylococcus aureus
atgaaaataggtgtattagcattacaaggtgcagtacgtgaacatattagacatattgaattaagtggtcatgaaggtattgcagttaaaaaagttgaacaattagaagaaatcgagggcttaatattacctggtggcgagtctacaacgttacgtcgattaatgaatttatatggatttaaagaggctttacaaaattcaactttacctatgtttggtacatgcgcaggattaatagttctagcgcaagatatagttggtgaagaaggataccttaacaagttgaatattactgtacaacgaaactcattcggtagacaagttgacagctttgaaacagaattagatattaaaggtatcgctacagatattgaaggtgtctttataagagcgccacatattgaaaaagtaggtcaaggcgtagatatcctatgtaaggttaatgagaaaattgtagctgtccagcaaggtaaatatttaggcgtatcattccatcctgaattaacagatgactatagagtaactgattactttattaatcatatt

SEQ ID NO: 4535 - DNA, 870 bp, Staphylococcus aureus
ggatcagacagagtcaaaagaggtatggccgaaatgcaaaaaggcggcgttatcatggatgtcgttaatgctgagcaagcaagaattgcggaagaagcaggtgcggtagcagtcatggctttagagcgtgtaccttctgatattagagcagctggtggcgttgcacgtatggcaaatcctaaaattgtagaagaagtaatgaatgctgtttcaattcctgtaatggctaaagcacgtattggtcatattacagaagcaagagtattagaagctatgggtgttgactatattgatgaatcagaagtattaacaccagcagatgaggaatatcacttaagaaaagatcaatttacagtgccatttgtatgtggttgtcgtaatttaggtgaagctgcacgaagaatcggtgaaggtgctgctatgttacgtactaaaggtgaaccaggtacaggtaatattgttgaagctgtaagacatatgagacaagttaattctgaagttagtcgattgactgtaatgaatgatgatgagattatgacttttgcgaaagatatcggtgcgccttatgaaattttaaaacaaattaaagacaatggtcgtttaccggtagttaactttgcagctggtggcgttgcgactcctcaagatgctgctttaatgatggaattaggtgccgacggtgtattcgttggatcaggtatttttaaatcagaagatccagaaaaatttgctaaagcaattgttcaagcaacaacacattaccaagactatgaactaattggaagattagcaagtgaccttggcactgctatgaaaggtttagatatcaatcaattatcattagaagaacgtatgcaagagcgtggttgg

SEQ ID NO: 4536 - DNA, 1635 bp, Staphylococcus aureus
agaaaaattcaagcaaaaaaaggtttgagtattgagtgtaaaggttgggaacaagaagcagtacttagaatgttatacaacaatttagacccagaagttgctgaaagaccagaagatttagttgtttatggtggtattggaaaagcagctcgtaattgggaagcttttgaagcaatagagaaaacgttacgagaattagaatcagatgagacaatgttagtacaatcaggaaagccagttgctgtatttaaaacacatgaagaagcgccacgtgtattaatttcaaattcagtattagtacctgaatgggcaaactgggatcattttaatgaattagataaaaaaggtttaatcatgtatggacagatgacagccggtagttggatatatattggttctcaaggtattgtgcaaggtacttatgagacatttgccgagctaggtaatcaacactttaatggagatttagcaggcactgttacactgacagcaggtttaggtggtatgggtggtgcgcaaccgttagcaattactatgaatcatggggtagcaatttgcgtggatgttgatgaaacacgtgttgataagcgaattgatacgaaatactgtgatgttaaaacagctgatttagatgaagcattaaaattagcagaagaggcgaaagaacgtggagaaggattatcaatcgggttagttggaaatgctgtagacatccatcaagcgattctagaaaaaggatttaaaattgacattattactgaccaaacaagtgcacatgatccgctaaatggatatgtgccacaaggatactctgtagaagaagcgaaagtattgcgtgaaaaagatccgaaaaaatatgttgaactgtcacaagcttcaatggcaaagcatgttgaattaatgcttgaattccaaaaacgtggcgctgtagcatttgattatggtaacaatattcgacaagtagccttcaataacggagtgaaaaatgcttttgacttcccaggttttgtaccagcttacattagaccattattctgtgaaggtaaagggccattccgctttgctgcgttgagtggtgattcaaaagatatcgagcgtgcggatgaagaaatgcgcaaacttttcccagaaaatgaaaagttattaagatggcttgatttagctgaagaaaaaatttcatatcaaggactaccatcacgtattgcttggttaggctatggagaaagagcgaaaatgggcctagctttaaatcgtcttgtacgtgacggtgaaatttcagcaccaattgttattggacgagaccatttagatgctggttcagttgctagtcctaaccgtgaaacagaaagtatgaaagatggtagtgacgcggttggtgattgggctgtattgaatgcactaattaacacagctgcaggtggttcatggatttcattccatcacggtggcggtgttggcatgggatattcacttcatgcgggtatggttgttgtagcagatggatcagagcgtgctgaaagaagattggaacgcgtattgactactgatccaggcatgggtgttgcccgacatgttgatgctggctatgacatcgctattcaaacagctaaagaaaaaggtattcatattccaatg

SEQ ID NO: 4537 - DNA, 858 bp, Staphylococcus aureus
caagatcctagaacaaaatttaaaacaacggattatgaaaaacaagaacaagaggtaccgggtttacaatctgaaatgacgccagcacctgattgtggcgaaacgtcttaccaaggtcatcaacgcttacaaggctataaaatgttagttacaggtggtgactcagcaatagggcgtgcagcagcgattgcgtatgctaaagaaggtgcagatgtagcgattaactatcttccgagtgaagaacaagatgcacaagaagtacgccaagtgattgaagaaagtggtcaaaaggcagtgttaattcctggtgatataagagatgagcagttcaactatgaccttgttgaacaagcatatcaacaattaggtggcttagataatgttaccttagttgctggacatcaacagtatcatgatgatattcatggatttacaactgaggcatttacagaaacgtttgaaacgaatgtctatccgctattttggacaattcaaaaagctttggaatatttaaaaccgggtgcgtcaattacgacgacatcatctgtacaaggttataatcctagtcctattcttcatgattatgccgcttcaaaagcagcaattatttcattaactaaaagtttttcagaagaattaggaccaaaaggaattagagtgaactgtgtagcgcctggtccattctggtcgccattacaaatttctggtggacaacctcaaagtaaaattccaacatttggtcaaaaaacacctttaggtcgtgcaggtcaaccagttgagttatgtggaacttatgtgctattagcatcagaagaatcaagttatacaactggacaagtgttcggtgttagcggtgga

SEQ ID NO: 4538 - DNA, 1095 bp, Staphylococcus aureus
atggctttaacagcaggtatcgttggcttaccaaacgttggtaaatcaacattatttaatgcaattacaaaggcgggtgccttggcagcaaactatccgttcgcaactatagacccaaacgtgggtattgtagaagtgccagatgcaagactacttaaattagaagaaatggttcaacctaaaaaaacattacctactacatttgaatttacagatattgccggaattgttaaaggtgcttctaaaggtgaaggtttaggtaataaattcttatcacatattagagaagtagatgcaatttgtcaggttgttcgtgcttttgacgatgataatgtaacacatgtagctggtcgagttgatccaattgatgacatcgaagttatcaatatggaattagtacttgcagacttagaatcagttgaaaaacgcttacctagaattgaaaaattggcacgtcaaaaagataagactgctgaaatggaagtgcgtattttaacaactattaaagaagctttagaaaatggtaaacccgctcgtagtattgactttaatgaagaagatcaaaaatgggtgaatcaagcgcaattactgacttctaaaaaaatgctttatatcgctaatgttggtgaagatgaaattggtgatgatgataatgataaagtaaaagcgattcgtgaatatgcagcgcaagaagactctgaagtgattgttattagtgcaaaaattgaagaagaaattgctacattagatgatgaagataaagaaatgttcttagaagatttaggtatcgaagaaccaggattagatcgattaattagaacaacttatgaattattaggattatcaacatattttactgctggtgtgcaagaagtacgtgcttggacatttaaacaaggtatgactgcacctcaatgtgctggtatcattcatactgattttgaacgtggatttatccgtgccgaagtaacaagttatgacgactatgtgcaatatggtggcgaaagtggcgctaaagaagcgggcagacaacgattagaaggtaaagaatatattatgcaagatggcgatatcgttcatttcagatttaatgta

SEQ ID NO: 4539 - DNA, 735 bp, Staphylococcus aureus
aaattagcgatgataattatatatattatcgttgcattaatcgtaattaaaatacttgataaaatgattgctcaaggatttaaaatacaaaacaagagtaaaaagggtaataaaaaacgttcgaaaacattaatatcattggtgcaaaatgttgttaaatatatcgtgtggtttatagttatcactaccattttaagtaaatttggcattagtgttgaaggggtaattgccagtgctggtgtcgtaggcttagcagtaggttttggtgctcaaactatagttaaagacgtaattacaggattctttattatatttgaaagccaatttgatgtaggtgattatgttaagataaataacggtggtacaactgtagcagagggaacagttaaatcaattggactccgttcaacacgtattaatacaatatctggggaacttacaatcttgccaaatagtagcatgggtgaaataacgaattactcaattacgaatggaacagcaattgttaaaattccagtatctgtagatgaaaatattgataatgttgagaagaaattaaacaaattatttacatctctgcgtagtaaatattatttatttgtaagtgatcctgttgtgattggtattgatgcctttgaagatactagagtaatattaagggtttcagcagaaacaataccaggtgaaggtttctctggtgcgcgtattattcgtaaagaagtacaaaaaatgttt

SEQ ID NO: 4540 - DNA, 1092 bp, Staphylococcus aureus
gatacacagttagcccaaatcacattaactgatgattcaaccggtgctatagcgaatccaatccatttatctactgcctacaagcatccaaaactaggacaatcgacaggttttgattatacacgtactaaaaatcctacacgctcaacatttgaaacctgttttgccaaactcgaacatggtattgcatcattcgctacatcaagtggaatgtcagccattcaattaatatgtaatttatttaaaccacacgatgaaattttagtttcattcgatttatacggcggcacatttagattatttgaattttatgagcaacaatacaatatcaaatttaagtacgttgattttacagattatgaacaagttgaaaaagaaatcactgataaaacagtagcattattcattgaaccaatatctaacccacaaatgattgctattgatgtaaagccgtactatcaactttgtaaagctaaaggcttattgtcaattatcgacaatacttttttaacaccttatctttcaacaccattagcagaaggtgctgatatagtcttacattcagctacgaaatatattggtggacataacgatgtactagcaggtgtcgtaaccgtcaaagatgaatcactcgcgcaacagttgtttgattttcacaacatgactggcgcaacactttcaccaatagatagttatttgttgttacgtggacttaaaactttgcatttacgcattgagcgtgcgcaatcaaacgcaagaaaacttgctaaaaaatgtcagtcacttcaagcaattgacgaagtactatatagcgggcaaactggcatgcttagtttaagacttaacaaggcctatagcgtcgctaaactattagaaaatttagacatttgtatttttgcagaaagtttaggaggtactgaaacattagtgacgttcccttacacacaaacacatgttgatatgccagatgctgaaaaagataaacgtggcattgatgagtatttaatccgcttatcactaggcgttgaaaattatgaagacatcgaacgcgatatcatccaagcattagataaagctcagattggagagatt

SEQ ID NO: 4541 - DNA, 1173 bp, Staphylococcus aureus
atgacgagagtcgtattagcagcagcatacaggacacctattggcgtttttggaggtgcgtttaaagacgtgccagcctatgatttaggtgcgactttaatagaacatattattaaagagacgggtttgaatccaagtgagattaatgaagtcatcatcggtaacgtactacaagcaggacaaggacaaaatccagcacgaattgctgctatgaaaggtggcttgccagaaacagtacctgcatttacagtgaataaagtatgtggttctgggttaaagtcgattcaattagcatatcaatctattgtgactggtgaaaatgacatcgtgctagctggcggtatggagaatatgtctcaatcaccaatgcttgtcaacaacagtcgctttggttttaaaatgggacatcaatcaatggttgatagcatggtatatgatggtttaacagatgtatttaatcaatatcatatgggtattactgctgaaaatttagtagagcaatatggtatttcaagagaagaacaagatacatttgctgtaaactcacaacaaaaagcagtacgtgcacagcaaaatggtgaatttgatagtgaaatagttccagtatcgattcctcaacgtaaaggtgaaccaatcgttgtcactaaggatgaaggtgtacgtgaaaatgtatcagttgaaaaattaagtcgcttaagaccagctttcaaaaaagacggtacagttacagcaggtaatgcatcaggaatcaatgatggtgctgcgatgatgttagtcatgtcagaagacaaagctaaagaattaaatatcgaaccattggcagtacttgatggctttggaagtcatggtgtagatccttctattatgggtattgcaccagttggcgctgttgaaaaggctttgaaacgtagtaaaaaagaattaagcggtattgatgtatttgaattaaatgaagcatttgcagcacaatcattagctgtagatcgcgaattaaaattacctcctgaaaaggtgaatgttaaaggtggcgctattgcattaggacaccctattggtgcatctggtgctagagttttagtgacattattgcatcaactgaatgatgaagtcgaaactggtttaacatcattgtgtattggtggcggtcaagctatcgctgcagttgtatcaaag

SEQ ID NO: 4542 - DNA, 2409 bp, Staphylococcus aureus
ttgaattacaaccacaatcaaattgaaaagaaatggcaagactattgggacgaaaataaaacatttaaaacaaatgataacttaggtcaaaagaaattttatgctttagacatgtttccatacccatcaggtgctggtttacatgttggacatcctgaaggctatacagcaacagatatcatttcaagatataagagaatgcaaggatataatgtgttacatccgatggggtgggatgcattcggattaccagcagagcaatatgctttagacactggcaacgacccacgtgaatttacaaagaaaaatatccaaacttttaaacgacaaattaaagaattagggttcagttatgattgggatcgtgaagttaatacaacagatccagaatactataaatggacacagtggattttcatacagttatataacaaaggtttagcatatgttgacgaagttgcagttaactggtgtcctgcattaggcactgtcttatctaacgaagaagtgattgacggtgtctctgaacgtggtggacatccagtttatcgtaaaccaatgaagcaatgggtacttaaaattacagaatatgcagatcaattattagcagatttagatgatttagattggcctgagtctttaaaagatatgcaacgtaactggattggacgttcagaaggtgccaaagttgcatttgatgttgataatgcggaaggaaaagtagaagtatttacgactagaccagatacaatctatggtgcatcattcttagtcttaagtcctgaacatgcattagttaattcaattacaactgatgaatataaagaaaaagtaaaagcttatcaaacagaagcttctaaaaagtcagatttagaacgtacagatttagcaaaagataaatcaggtgtgtttactggtgcatatgcaattaatcctttatctggtgaaaaagtacaaatttggattgctgattatgtattatcaacatatggtactggagcaattatggcagtaccagcgcatgatgacagagattatgaatttgctaaaaagtttgatttgccaatcattgaagtcattgaaggtggaaatgttgaagaagcagcatacactggtgaaggtaaacatattaattctggtgaacttgatggtttagaaaatgaagcggcaattactaaagctattcaattattagagcaaaaaggtgctggcgaaaagaaagttaattacaaattaagagattggttattcagtcgtcagcgttattggggtgaaccaattcctgtcattcattgggaagatggaacaatgacaactgttcctgaagaagagctaccattgttgttacctgaaacagatgaaatcaagccatcagggactggtgagtctccactagctaatattgattcatttgtaaatgttgtagatgaaaaaacaggtatgaaaggacgtcgtgaaacaaatacgatgccacaatgggcaggtagttgttggtattatttacgttacatcgatcctaaaaatgaaaatatgttagcagatcccgaaaaattaaaacattggttacctgttgatttatatatcggtggagtagaacatgcggttcttcacttattatatgcaagattttggcataaagtcctttatgatttgggtatcgtacctactaaagaacctttccaaaaattatttaaccaaggtatgattttaggagaaggtaatgagaagatgagtaaatctaaaggaaatgtaatcaatcctgatgatatagtacagtctcatggtgcagatactttacgtctttacgaaatgtttatgggacctttagatgctgcaattgcatggagtgaaaaaggattagatgggtctcgtcgattcttagatcgcgtatggcgtttaatggtaaatgaagatggaacattgagttcaaaaattgtaactacaaataataaatctttagataaagtttataaccaaactgttaaaaaggtaacagaagactttgaaacattaggatttaatactgctattagtcaattaatggtatttattaatgagtgttataaagttgatgaagtttataaaccttacattgaaggtttcgttaaaatgttagcacctattgcaccacatatcggtgaagaattatggtcaaaattaggacatgaagagtctattacgtaccaaccttggccaacttatgacgaagcactacttgtagatgatgaagtagaaatcgttgttcaagttaatggtaaattgagagctaaaattaaaattgctaaagatacatcaaaagaagaaatgcaagaaattgccttatctaatgacaatgttaaagcgagtattgaaggtaaagacatcatgaaagtcatcgctgttcctcaaaaattagtcaatattgtagct

SEQ ID NO: 4543 - DNA, 1218 bp, Staphylococcus aureus
ttaatggcggcagtagctgcaagcgaacaaagtaacaatgtgttactcattgaaaaaaagaaaggtctaggtcgtaaactcaaaatatctggtggcggtagatgtaacgtaactaatcgattaccatatgctgaaattattaagaacattcctggaaatgggaaatttttatatagtcccttttcaatttttgataatgaatccatcatagatttttttgagtctaggggtgttaaattaaaagaagaagatcacgggcgtatgtttccagtctccaacaaagcacaagacgtggttgatacattagtgacaactatcgaacgccaacatgtaacgattaaagaagaagaagctgttagtagaatcgaagttaatacagaccaaactttcactgtacatactcaaagcagcagctatgtaagtcattcacttgtgattgctacaggtggtacaagtgtccctcaaacaggttcaactggtgatggttataagttcgcacaagatttaggtcataccattacagagttattcccgaccgaagttccaattacatcagctgaacctttcatcaaatcaaatcgtctaaaaggtttaagtttaaaagatgttgaattgtcagtacttaagaaaaatggtaaaaaacgcatcagtcatcaaatggatatgttatttactcattttggtatcagtggtccagctacattaagatgtagtcagtttgtttataaagaacaaaaaaatcaaaagacacagcatatttctatggcaatcgatgcatttcctgaattaaaccatgaacaattaaaacaacacatcacatcattattatcggacacaccagataaaatcataaaaaacagcttgcatggactaattgaagagcgctatttactgttcatgctggaacaagctggaatcgatgaaaataccacatcacatcacttatcaaatcaacaattgaacgacttagtaaatatgtttaaagggtttgtatttaaggtaaacgggacattacctatagataaggcatttgtcacaggtggtggtgtgtcacttaaagaaatccaacctaaaacaatgatgtctaaattagttccgggattatttttatgtggtgaagtattagatatacatggttatactggtggttataatattacaagtgcactcgtaacaggacatgtcgctggattatatgccggtcattactcacatgca

SEQ ID NO: 4544 - DNA, 1632 bp, Staphylococcus aureus
agtaaagaaatggtgcgtggaacctttttaattaccattagtatattaattaccaaggtattgggcgtactttttatcattccattcaactatttaattggtggacaagaaaatatggcgccgttcacatacgcttatgcaccatataatattgcaattgcagttgcgacagcaggtgtacctttagcagcttcgaaatatgttgcgaaatacaatgctattggggcatataaagtcagtcagaaattttataaatcgagttttattgtaatgagtattaccggtgttttaggtttcttggtactgtatttcctagcaccttatatttctgaattaacattagctagaaacgttcatgataaaaacggttggtcagtcgatgatattacttggattataagaatcattagtatggttgttatctttattcctgtattagcgacatggaggggtatattccaaggttataaatctatggggccaacagcagtgtcagaagtaactgagcaaattgcacgcgtgattttcatattaatcggaagttatttagtactaaatgtctttgatggttctattttattagccaatggtattgctacttttgcagcagcagttggtgcgattattggtatattcacactctggtattactggagaaagcgtaagcataatattgatcgtatggtcgaatctgattacacagatatagatgtgtcatatggcaagatgtataaagaaattattgcttatagtattccgttcgttattgtaagtttgaattatccattatttaacttagtagatcaatttacacataacggtgctttatctttagttggtataccttcacagttacaagatatattctttaatatgttaaatatgtcaactaataaaattgtaatgattccgacatcattaagtgctggctttgcagtaagtttaattccttatattacaaaaacatttgcagaaggtcgcttacatgaaatgcatcatcaaattagaacatctattggtgtattaatgtttataactgttccagctagtattggaattatggccttggcacaaccattattcacagttttctatggttacgatccaattgttttaggtcatgaccctaaccatgatggtagtcgcttattattctattatgcgcctgtagcaatactaatttcactattaagtgtaacggcatcaatgttacaaggtatagataaacagaaattaacagtttatgttattttagcttctgtagttatcaagttagcgttaaactatccattaattatgttattccatacacctggtgcaattttaagtactagtatcgcattattatttgcaattggatgtaatttctatattcttaaaaaatatgcgaagtttaaattcagctatagttggattcattttgcaaaaatattcttgtattcatttattatgatgctaggtgtagaattagtattcttccttgcaaatctattcttagaacctactaaactgggttacttaatcattattattttaggtgttacagtaggtattctaatttacggtacaatcactattaaaacgcgtcttgcggacgaatttttaggtgaaattcctgaaaaattaagacgt

SEQ ID NO: 4545 - DNA, 807 bp, Staphylococcus aureus
atgatttggtatacaatacgtgtgaaaggattggtaaatgtgaatgggaatatcattgttgcacatggcatgaggcacggacgacagaatcaagcgttattagcatttatttctgaattagtaaaagatgatatacatcactatgatattgcgtttttagaaagtgagcatcaggatttagagacggtaatgacgacgttggttcaaagtggggttgaccattttaaaattgtaccattgctaatctttagtgcaatgcattatctcaaggatataccggatatcgttcatgaaatgaaacgacggtatccagacataaaggtagaagtaagcgagccacttggcacacatcctttaatgagacgattaattgaacaacgtatttgtgacgcattagcaggtgacgaacaacaagttggagttatggttgttgcacacggcaatattaatggaaagtttactaaggcacacgaagagttacaaatatgcgttcaaaatttgcaaattagcaatccgacatatgcgagaacgctatatggagagattagttttacacatgatttagaaatcatctcgaaacggtatcaaaaattgattgtcgtacctttatttttatatgacggaagacttgttaacaaagtgaagcagcaaatgaataacatggttattaatccagatatacacatcacaccttcaattaacttcgacccgatattaaaacaaattattaatgatagattagaaagtcttaatgactccaatgaaaatataaaagcacaaacgaaaattaaaacctttttgaaataa

SEQ ID NO: 4546 - DNA, 552 bp, Staphylococcus aureus
ttggctttaaaagatttatttagtggattttttgtaatagatgatgaagaggaagtagaagtacctgacaaacaacaacaggtaaatgaagcgccagcaaaagagcagtcacaacaaacaacaaaacaaaacgcaatcaaatcagtccctcaaaaatctgcatcaagatatacaacaacgtcagaagaaaggaataaccgtatgtctaattattcaaaaaataattcacgtaatgttgtaactatgaacaatgctacaccaaacaatgcatcacaagaaagttcaaaaatgtgtttattcgaaccacgtgttttttcagatacacaagatattgctgatgagcttaaaaaccgccgtgcgacacttgtcaatttacaacgtattgataaagtatcagcgaaaagaattattgattttttaagcggtactgtttatgcaatcggtggagatatccaacgtgtaggtactgatattttcttatgtacgcctgataatgtggaagtagctggaagcattacagaccatattgaaaatatggaacattcattcgac

SEQ ID NO: 4547 - DNA, 615 bp, Staphylococcus aureus
atgccttttacaccaaatgaaattaagaataaagagttttcacgtgtaaagaatggtttagaacctactgaagttgctaattttttggagcaactaagcactgaaattgaacgtcttaaagaagataaaaaacaacttgaaaaagtaatcgaagagagagatactaatattaagtcttatcaagacgtgcatcaatctgtaagtgatgctttgatacaagctcaaaaagctggtgaagaaactaagcaagctgcagagaaacaagctgaagcgattatagctaaggcagaagcgcaagctaatcaaatggttggtgacgcggtagaaaaagcacgccgtttagcattccagactgaagatatgaaacgtcaatcaaaagtatttagatcgcgtttccgtatgttagttgaagcgcaattagacttattaaaaaacgaagattgggattacttgttgaattatgatttagacgctgaacaagtgacgcttgaaaatattcatcatttgcatgaaaatgatttaaagccagatgaagttgcagcaaatgcacaaaataatgcatcaaatacatcagataataatcaacaatccaatgattcagaaacaactaagaag

SEQ ID NO: 4548 - DNA, 2751 bp, Staphylococcus aureus
atggattacaaagaaacgttattaatgcctaaaacagatttcccaatgcgaggtggtttaccaaacaaggaaccgcaaattcaagaaaaatgggatgcagaagatcaataccataaagcgttagaaaaaaataaaggtaacgaaacattcattttacatgatggcccaccatacgcgaatggtaacttacatatgggacatgccttgaacaaaattttaaaagactttattgtacgttataaaactatgcaagggttctatgcaccatacgtaccaggttgggatacacatggtttaccaattgaacaagcattaacgaaaaaaggtgttgaccgtaagaaaatgtcaacagctgaattccgtgagaaatgtaaagaatttgctttagaacaaattgaattacagaaaaaagattttagacgtttaggtgtgcgtggtgactttaatgatccatatattacattaaaacctgaatacgaagctgcacaaattcgtatttttggagaaatggcagataaaggtttaatttataaaggtaaaaagccagtttattggtctccttcaagtgagtcttcattagcagaagcagaaattgaatatcacgataaacgttcagcatcaatttacgttgcatttgacgttaaagatgacaaaggtgtcgttgatgcagatgctaaatttattatctggacaacaacgccatggacaattccatcaaatgttgcgattaccgttcatcctgaattaaaatatggtcaatacaatgtaaatggcgaaaaatatattattgcagaagccttatctgacgctgtagcagaagcactggattgggataaagcatcaatcaaattagaaaaagaatacacaggtaaagaattggagtatgttgtagcacaacatccattcttagatagagaatcgttagtgattaatggtgatcatgttactacagatgctggtacaggttgtgtacatacagcaccaggtcacggggaagatgactatattgttggtcaaaaatatgaattaccagtaattagtccaatcgatgataaaggtgtatttactgaagaaggcggccaatttgaaggaatgttctatgataaagctaataaagccgttactgatttattaacagaaaaaggtgcactattaaaattagactttattacacatagctatccacacgactggagaacaaaaaaacctgtaatcttccgtgctacaccacaatggtttgcctcaatcagtaaagtaagacaagatattttagatgcaatcgaaaatacaaacttcaaagtaaattggggtaaaacacgtatttacaatatggttcgtgaccgtggcgaatgggttatttctcgtcaacgtgtttggggtgtaccgttaccagtattttatgctgaaaatggcgaaattatcatgacgaaagaaacagtgaatcatgttgctgatttatttgcagaacacggttcaaatatttggtttgaaagagaagcgatagacttactaccagaaggatttacacatccaggcagccctaacggtacatttactaaagaaacagacatcatggacgtttggtttgattctggttcatcacaccgtggcgtgctggaaacaagaccggaattaagtttcccagcagatatgtatttagaaggtagtgaccaatatcgtggttggttcaactcttctattacaacttcagttgctacaagaggagtatcaccttataaattcttactttctcatggttttgttatggacggtgaaggtaagaaaatgagtaaatctttaggtaatgtgattgtacctgaccaagtggttaaacaaaaaggtgctgatattgcgagactttgggtaagtagtacggactatttagctgatgttagaatttctgatgaaattttaaaacaaacatctgatgtttatcgtaaaatcagaaatacattaagatttatgttaggtaatattaatgatttcaatcctgatacagatagcattcctgaatcagagttattagaagttgatcgttacttgctaaatcgtttacgtgaatttactgcaagtacgattaacaactatgaaaactttgactacttaaatatttatcaagaagttcaaaactttatcaatgttgaattaagtaatttctatttggattacggtaaagatattttatatattgaacaacgtgattctcatatccgtcgtagtatgcaaacagtgttatatcaaattttagttgatatgacgaagttgttagcaccaatcttagtgcatacagctgaagaagtttggtctcatacaccacatgttaaagaagaaagtgttcacttagcagacatgcctaaagttgtagaagtagatcaagctttattggataaatggcgtacatttatgaatttacgtgatgatgtgaaccgtgcattagaaactgctcgtaatgaaaaagttattggtaaatcattagaagccaaagttacgattgctagtaacgataaatttaatgcatctgaattcttaacttcatttgatgcattacatcaattatttatcgtgtcacaagttaaagttgtagataagttagatgatcaggcaacagcttatgaacatggtgatattgtcatcgaacatgcagatggtgaaaaatgtgaaagatgttggaactattcagaggatcttggtgctgttgatgaattgacgcatctatgtccacgatgccaacaagttgtaaaatcacttgta

SEQ ID NO: 4549 - DNA, 606 bp, Staphylococcus aureus
ataatggctaaagaaattgcaaaatcattattagatattgaagctgtaacattatcaccaaatgatttatatacatggagttcaggtattaaatcaccgatttactgtgataaccgtgttacgttaggttatcctttagttcgaggcgcaatccgcgatggtttaattaacttaattaaagaacactttcctggagtagaagttatttctggtactgcaacagctggtattccacatgcagcttttattgctgaaaaattaaaattaccaatgaattatgttcgttcatcaaataagagtcatggtaagcaaaatcaaattgaaggtgctaaaagtgaaggtaaaaaagtagttgtgatagaagatttaatttcgacagggggatcttcagtcacagcagttgaagccttaaaacaagcaggtgcagaagtattaggtgttgtagctatctttacttacggtttgaaaaaagcagatgatacatttagcaatattcaactacctttttacactttaagtgattataatgaattaattgaagtggctgaaaatgaaggtaaaatttctagtgaagatatccaaacattagttgaatggagagacaac

SEQ ID NO: 4550 - DNA, 1695 bp, Staphylococcus aureus
atggcttatgatggcttatttacaaagaaaatggttgagtctctacaatttttaacaacaggacgcgttcacaaaatcaatcaacctgataatgacacgatactaatggttgtacgtcaaaatagacaaaaccatcaattgttattgtcaatccatccaaacttttcaagattacaattgactactaaaaaatatgataatccatttaatccacccatgtttgcgcgtgtttttagaaaacacttagaaggtggtattatcgaatcgattaagcaaattggtaatgatcgtcgcattgaaatcgatataaagagtaaagatgaaattggcgatactatttaccgcactgtcatccttgagattatgggtaaacatagtaacttaattttagtagatgaaaatcgtaaaataattgaaggatttaaacacttaacaccaaatacgaatcactatcgtacagtaatgccaggttttaattatgaagcaccacctactcagcacaaaatgaatccgtatgatattacaggtgcagaggtgttgaaatatatcgattttaacgcaggtaatattgctaaacaattattgaatcagtttgaaggatttagccctttaattacgaatgaaatcgttaatcgtcgtcaatttatgacttcatcaacattaccagaagcattcgacgaagtaatggcagaaaccaagttaacacctactcctatttttcataaaaatcatgaaacaggtaaagaggatttctattttataaagttaaatcaatttaatgatgatacagttacgtacgattcattaaatgatttacttgatcgtttttatgatgcgcgtggcgaacgtgaacgcgttaaacaacgtgcgaatgatttagttcgatttgttcaacagcagttgcacaaatatcaaaataaattagcgaagctgattgaagaatatgagcagtctaaaaataaagatactgaacagttatatggtgaattgatcactgctaatatatatcgaattaagcaaggcgataaagaagtgacggcattaaattattatacgaatgaagaagttgtcattcctttaaatcctacaaaatccccatctgcaaatgctcaatattattataaacaatataatcgtatgaaaacgagagaacgtgaattacaacatcaaattcaattgacgaaagacaatatagattatttttcaacaatcgaacaacaattacatcatatttctgtccatgagattgatgaaattagagatgaattagcagaacaaggctttatgaaacagcgtaaaaatcaaactaagaaaaagaaagagcagattcaattacaacattatgtatcaactgatggcgacgatatatatgttggcaagaataacaagcaaaatgattatttaacaaataaaaaagctaaaaaaactcacacatggttacacacaaaagatattcctggttcacatgtcgttatatttaatgatgcaccaagtgatacgacaatcaaggaagcggctatgttagcaggatatttttcaaaagctggtaattctggacaaatacctgttgattacacgttaattaaaaatgtgcacaaaccatcaggggcaaagcctgggtttgtaacatatgacaatcaaaaaactttgtatgctacacctgattatgaacatattcaaaaaatgaaacaatca

SEQ ID NO: 4551 - DNA, 1071 bp, Staphylococcus aureus
atgacgattaaagttggaatcattgggtgtggtggtattgcgaatggcaagcacatgccaagtttacaaaaagttgaaaatgttgaaatgatcgcattttgtgacgtagacatttcgaaagcagcgtctgcagcagaagcatacggtactgacaatgcaaaggtttatgatgattacaaagcattgttaaaagatgacacgattgatgttatccatgtttgtacgccaaatgactcgcattgtgaaattactgtagcagggttgcatgccggtaaacatgtgatgtgtgaaaaaccaatggctaaaacgacagcagaagctcaaaaaatgatagatacagctaaatcaacaggtaaaaaattaacaataggttatcaaaatcgcttcagaccagatagtcaatttttatataaatcagcacaacgtggcgacttaggtgacatttatttcggaaaggcacatgctattcgtcgtcgagcagtaccaacatggggggtctttctagacgaagaagctcaaggtggcggaccattaatcgatatcggtacacacgctttagatttaacgttatggatgatggataattatgaaccagaatcagtgatgggttcaacattccataaattaaataaacagcatgatgcggcaaacgcttggggttcatggaatccagatgaatttacagttgaagattctgcgtttggctttattaaaatgaagaatggagcgacgattattttagaatccgcttgggcgattaattctttagaagtggatgaggcaaaatgttcattatcaggaacgaaagcaggtgctgatatgaaagatggtctacgtattcatggtgaagatatgggcacactttataccaaacacgttgaattggaaaacaaaggcgtcgacttttatgaaggtaatgaagtggatgaagctgaagaagaagcaaaagcttggattgatgcagttgtaaatgatactgaaccagttgtgaaaccggaacaagcaatggtagttacaaaaattcttgaagcaatttatcagtctgcaaaatcaggcaaagcaatttacttt

SEQ ID NO: 4552 - DNA, 1023 bp, Staphylococcus aureus
ttaaaagttggtgtgataggtgttggtggtattgcacaagaccgtcatattccagcattgctgaaactcaaagacacagtctcattagttgcagtacaagatattaatacagtgcagatgattgatgttgcgaagcgctttaatatacctcatgtagttgagacacctagcgagctgtttaaacttgttgatgcggtggtcatttgtacacctaataaattccatgctgatctttctatagaagcattgaatcatggcgtccatgtattgtgtgaaaagccaatggcgatgacgacggaagagtgtgaccgcatgattgaagcggctaataaaaattgtaagttactaactgtcgcttatcattatcgccatacggatgtcgctatgactgctaaaaaagcaattgaatcaggtgtggttggtaaacctttagtagcacgtgtacaagcgatgcgtaggcgtaaagtgcctggctggggcgtttttaccaataaagcgttgcaaggtggcggtagtttaatcgattatggttgccacttgttagacttatctttgtggctactaggtaaagatatggtgccgcatgaagttctaggaaaaacatataatcaattgagcaaacaaccgaatcaaattaatgattggggaacatttgatcacactaaatttgatgtcgatgatcatgtgactagttatatgacatttgccaatcgagcaagcatgcagtttgaatgttcgtggtctgcaaatataaaggaagataaggtacacgttagtttatcaggcgaagatggcggtatcaatttatttccatttgaaatatatgagccccgctttggaactatttttgaaagcaaagctaatgttgagcataacgaagacattgctggtgagagacaggcgcgtaactttgtcaatgcgtgtttagggatagaagagattgtggtgaaaccggaagaagcacgcaatgtaaatgcccttatagaagcgatttatcgtagcgatcttgataacaagagcata

SEQ ID NO: 4553 - DNA, 882 bp, Staphylococcus aureus
tttgaagatatgttagattatgtcgcagaatctggattggatatgattgaagttggaacaggtggtaacccaggagataaattttgtaagttagatgagttgttagaaaatgaagataagcgacaagcatttatgaagtcaatcacagacagaggcttacaaataagtggtttcagttgtcataacaatccaatttctccagatccgacagaagcgaaagaagcggatgaaacgttacgtaaaacaatccgattagcaaatttattagacgtgccagttgttaatacattttctggcattgcaggatcagatgatactgctaaaaagcctaattggcctgttacaccttggccaacagcctactctgaaatttatgattatcagtggaatgaaaagttgataccatattggcaagatttagctgagtttgcaaaagagcaagatgtaaaaattgccatagagttgcatgcaggatttttagttcatacaccatatacgatgttgaagttgcgtgaggctacaaatgaatatatcggtgctaacttagatcctagtcatttatggtggcaaggtattgacccaattgctgcgattcgcatattaggccaagcaaatgcaattcatcacttccatgctaaagatacgtatattaatcaagaaaatgtaaatatgtatggcctaactgatatgcaaccatatggtaacgttgcaacaagagcatggacattccgtacagttggttatggacatagtccatatgtatgggcagatatcataagccaacttattattaatggatatgattatgtattaagtattgaacatgaagatcctattatgtcagtagaagaaggtttccaaaaagcttgtcaaactttgaaa

SEQ ID NO: 4554 - DNA, 2313 bp, Staphylococcus aureus
tattccaattatcttaatggttatcttatcctcaactaaattggaggaatcactatgacaattaataaagtaaccgttcttggcgcaggcacaatgggcgctcaactggcagcactctttgtgaatgctggacttaaagtaaaactattagatattgtagtggacaaaaacgatccaaatctcattgcgaaaaaatcttacgataaaattacagataagaaacgaccgctactattcgacttaaatctagcgagtcatttaacatatggtaattttgatgatgacttggtaaatgatgatgctgatttatatatcgaagcagtcaaagaagatattgaaattaagcatgctgtttggcaacaagttctacaacatgctaaagaagatgctttattcgctacaaatacatcaggtattccaattaatgcgattgctcaagcatttaacgagaaggatcaagaacgattctttggtctacatttctttaacccaccacgtattatgaaattagtggagttaatacctacgtcacacacgaaggaatctattatattagatgtaaaaaatttcgcgcaaaatgtgttaggtaaaggtgtcattgtcgtcaatgatgtgcctggctttgtcgcaaatagagtcggcacgcaaacaatgaatgatattatgtatcgcgccgagcaacacaagttaagcattgtagatgtagatgctttaactgggcaagcgattggtcgtcctaaaacaggtacatatgccctatctgacctagtcggtttagatattgcagtgtctgtaattaaaggcatgcaacaagtacctgaagaaacaacttattttcatgatgtcaaaattgtaaatacgttgtttgaaaatggcgcactcggacgtaaaacgaaacaaggattttacaaaaagaataaagaaactaaagctcgacttgtttacgatgttgaaaaacaagattatgtacctgtatcgcaaccacaattaccaattttaaatgaatttaataaagacttagtgcataaccttgatgtcatattcaatgcgcaagacgaagcgggactatttttatgggagacattacgtaataatttctattactctgctatcaatgtacctaaagctaccgatgatttccgagacatagatcgtgcgcttgtctgggggttcaactggaaacttggtccattccaattatgggatgcaatgggatacgaacgtgttaaaacacgtatggaagacgaacttggagacttaccacaatggattagtgatttagacggtggcttttataaacaagatgagaccattgaatatgcaacacctgtttctcacttcgtaaaagacgaactttgggataaaggtgatgccaaactttccgtaactcatgatgatcaactgctactgaaattacaaagtaaaaataatgtcattaccgatgaattcaacgatgcgttagttgatgcaattgattttctggaaaatgaacattacacaagtatggttatttatgcagatggtaataatttcagtgtgggtgctaaccttttcttaatgaaaaaggcacatgaagacggtcttgtagatgatgtcgttgcacaatcaattgataaattgcattatagctttaatcgtttgaagtatagtttgaaaccagtagtcacagctgttcaaggtcgtgccttaggcggtggctgtgagcttgtactttactcacctattgttgtcgctgcaagtgaaacatatatcggtcttgttgaagcaggtgttggcttattaccgagtggcggtggccttgcagaaatggctgatcgcatattacgcacatcgcataagtttgatgacaaacaagcttccatgacaaaagtactgaccaatatcgcatttgcgaaagtctctacaaatgcctttgaggcacgccgttatggttatttacgtgatacagatacgattattttcaatacagcacaacgtgtcgaagttgcgctcaaacgtgcgaaatatgaagcagaaacaaactatattccgaatcctagacatcaatatatcgctttaggcgaagacttcaaagcattaatccaaggacaattagatgcgcaaagacgggggcattttattagcgaccatgattatcatatcgccttaaatatcgccacaattttagcgggtggtgatttaccaagaaatacatttatcaatcaacgttacattcaatcgttggagaaaattggctttattgacttactaaaatctaaaaaatcatatgaaagaattgcgcatatgttaaaaactggtaagccattacgtaat

SEQ ID NO: 4555 - DNA, 2109 bp, Staphylococcus aureus
atgaaaaagcaaataatttcgctaggcgcattagcagttgcatctagcttatttacatgggataacaaagcagatgcgatagtaacaaaggattatagtaaagaatcaagagtgaaagagaacagtaaatatgattcgccaatttcagactggtatttaagtagtgttttgaacaggttaggggatcaaatttactacgctaaggaattaactaataaatatgaatatggtgagaaagagtataagaaagcaatagataaattgatgactagagttttgggagaagatcaatatctattagaaaaaaagaaagcacaatatgaagtatacaaaaaatggtttgaaaagcataaaagtgaaaatccaaattctgatttaaaaatgactaaattccatgactttgatatatatagactaagtatgaaagaatacaatgagatacatcaatctataaaagaagctgttgacgattttaatagtgaagtaaaagaaattcaatataaagaaaaagatttagtaccatacaatgaagaaactgaaaagcgtgtaactaacggtatatatgactttgtttgtgagatagatacactatacgcagcatatttcaatcataatcaatatggtcataatgcgaaagagttaagagcgaagttagatattattcttggtgatgtaaaagatcctattagaattacaaatgaaagaataagaaaagaaatgatggatgacttaaattcgattattgatgatttctttatggatacaaatatgaatagaccattaaatataagtaaatataatcctgatattcatgattataccaacaagcctgaaaatagagctaacttcgataaattagttaaagaaacaagagaagcggtcgataaggcagatgattcttggaaaactaaaactgtcaaaaattacggtgaatctgtaacaaaatctcctgttgtaaaagaagagaagaaagttgaagaacctcaagcacctaaagttggtaaccaacaagaggttgaaactacagttgataaagctgaagaagcaacacaaccagtggcacagccattagttaaaattccacagggcacaattacaggtgaaattgtaaaaggtcccgactatctaacgatggaaaataaaacgttacaaggtgaaatcgttcaaggtcctgatttcccaacaatggaacaaaacagaccatctttaagcgataattatactcaaccgacgacaccgaaccctattttagaaggtcttgaaggtagctcatctaaacttgaaataaaaccacaaggtactgaatcaacgttgaaaggtattcaaggagaaccaagtaatattgaggttaaacctcaagcaactgaaacaacagaaacttctcaatatggtccgagaccgcaatttaacaaaacacctaagtatgtgaaatatagagatgctggtacaggtatccgtgaatacaacgatggaacatttggatatgaagcgagaccaagattcaacaagccaagtgaaacaaatgcatacaacgtaacgacaaatcaagatggcacagtatcatatggcgctcgcccgacatacaagaaaccaagtaaaacaaatgcatataacgtaacaacacatgcaaacggccaagtgtcatacggagctcgcccaacacaaaacaagccaagcgaaacaaacgcatataacgtaacaacacatgcaaacggccaagtatcatacggagctcgcccgacacaaaacaagccaagcgaaacaaacgcatataacgtaacaacacatgcaaatggccaagtatcatacggcgcccgcccaacatacaacaagccaagcgaaacaaatgcatacaacgtaacaacgcatgcaaacggccaagtatcatacggagctcgtccgacatacaagaagccaagcgaaacaaatgcatacaacgtaacaacacatgcaaacggccaagtatcatatggcgcccgcccaacatacaacaagccaagcgaaacaaatgcatacaacgtaacaacacatgcagatggtactgcgacatatgggcctagagtaacaaaataaatttataactctatccatagacatacagtcaataca

SEQ ID NO: 4556 - DNA, 372 bp, Staphylococcus aureus
atgatgtcgaataaacttgatggaatcaataaaatgatcacagcgaaacataagcaaatggatgacttatatgatgaaaagcaagaggttgaagcattgatagatgaaagcgatgcgcttaatcattcgatagaacaattatatcaacatttaggtgagcgttattatagtagcaatatggctagtcgtatggaacagttccgcgatgaatttcattttgcgaaacgacgttcaacggaagcgttatacgagcaacaacagcaaattcaacatggcattcgtaaagcggaagaagagatgattgacttagaaatgcgaaggaatatcgaaatcgagatggtgacaaaggaggaaaataaatggaaacaatag

SEQ ID NO: 4557 - DNA, 297 bp, Staphylococcus aureus
atggaaacaataggaagcattatttatttaaaagaaggttcgcaaaagttaatgattattaatagaggaccaattgtagaaattgaaaatcaaaagtatatatttgactattcagcatgtaaatatccgattggtgttgtggaagatgaaatttattattttaacgaggaaaatatagattcagttatttttaaaggctattctgatcaagatgaggttagatttcaagagttgtttgataatatgaaacaaaatttggatagtgaaatacaacgtggagaagttacacaacaataa

SEQ ID NO: 4558 - DNA, 2826 bp, Staphylococcus aureus
atgaaagaaccatccatagtagtaaaaggtgctcgtgcgcataacttgaaagatattgatatcgaactacctaaaaataaattaattgttatgacaggattatctgggtcaggtaaatcgtcattagcattcgatactatatatgctgaaggacaacgacgttatgttgaatcattaagtgcctatgcgcgtcaatttttagggcaaatggacaaaccagatgttgatactattgaaggattatcgccagcaatttcaatagatcaaaaaacaacaagtaaaaatccaaggtcaactgttgcaacagtaacagaaatatatgattatatacgtttgttatatgcacgtgttggtaaaccttactgtccaaatcacaatatagaaattgaatcgcaaacagtacaacaaatggttgaccagattatggaattagaggcacgtacaaagattcaattattagcacctgtcatcgctcatcgtaaaggtagtcatgaaaagctaatcgaagatattggtaaaaaaggttatgtacgtttaagaatcgatggcgaaattgttgatgtaaatgatgtacctacattagataagaacaagaatcatacaatagaagttgttgtagaccgattagttgttaaagatggaattgaaacacgactagctgactctatagaaactgcgttagagctttcagaaggacaattaacagtcgatgtcattgacggggaagaccttaagttttcagaaagccacgcttgtcctatatgtggattttcaatcggagaattagaaccaagaatgtttagctttaacagtccttttggtgcttgtccaacatgtgatggcttaggtcaaaagttaacagtcgatgtagacttggttgttcccgacaaagataagacgctaaacgaaggtgcaatagaaccatggataccgacgagttctgatttttatccaacactgttaaaacgtgtttgtgaagtttataaaatcaatatggataaaccttttaaaaagttaacagaacgtcaacgtgatattttattgtatggttcgggtgacaaagaaattgaatttacatttacacaacgtcaaggtggtactagaaaacgaacaatggtcttcgagggtgtagttcctaatataagtagacgattccatgaatcaccttcagaatatacacgtgaaatgatgagtaaatatatgaccgaactaccttgcgaaacttgtcatggaaagcgattgagtcgtgaagcgttatctgtttatgtaggtggtttaaatattggtgaagtagtcgaatactcaatcagtcaagcgctgaactattataaaaacattaatttgtcagaacaagatcaagcgattgcaaatcaaatattgaaagaaattatttcccgactcacttttttaaataatgtgggacttgaatatttaacgctaaacagagcttcaggtacactttcaggtggtgaagcacaacgtattcgattggcaacgcaaattgggtcacgtttgactggtgtcttatatgtattagatgagccatcaattggactgcatcaaagagataatgatcgattaattaatacacttaaagaaatgagagatttaggaaatactttaattgtagttgaacacgatgatgatacaatgcgtgcggctgattacttagtggatatagggcctggtgctggtgagcatggaggacagattgtttctagtggtacacctcaaaaggtaatgaaagataaaaaatctttaacaggacaatacttgagtggtaagaaacgtattgaagtacctgaatatcgcagaccggcttcagatcgtaaaatttctatacgtggagctagaagtaacaaccttaaaggggttgatgtggacataccactatcaatcatgacggtcgttacaggtgtatcaggttcaggtaaaagctcattagtaaatgaagtattatacaaatcattagctcaaaaaatcaataaatctaaagtaaagccaggattgtacgataagattgaaggtattgatcaacttgataaaattattgatattgatcaatcaccgataggtagaacgccacgctctaatccagcaacgtatactggtgtgtttgatgatatacgtgatgtgtttgcgcaaacaaatgaagctaaaattcgaggatatcaaaaaggccgttttagttttaatgtaaaaggtggacgctgtgaagcttgtaaaggtgacggtattattaaaattgaaatgcattttttacctgatgtttatgttccttgtgaagtgtgtgatggtaaacgatataatcgtgagacactagaggttacttacaaaggtaaaaatattgctgacattttagaaatgactgttgaagaagcaacacaattttttgaaaatattcctaagattaatcgcaagttacaaacactagttgatgttggtcttggatacgtcacattaggtcaacaagctacaacgttatcaggtggtgaggctcaacgtgtgaaacttgcatctgaacttcataaacgttcaactggtaaatctatttatattctagacgaaccgacaacagggttacatgttgacgatattagcagattattaaaagtattaaaccgattagttgaaaatggtgacactgttgtaattattgaacataacctagatgttatcaaaacagcagactatattatagacttaggtcctgaaggtggtagtggcggtggtactattgttgcgactggcacacccgaagatattgctcagacaaagtcatcatatacaggaaagtatttaaaagaagtacttgaacgagataaa

SEQ ID NO: 4559 - DNA, 879 bp, Staphylococcus aureus
gaaaaaagtaaaagtgaactattagttgtcacaggtttatctggtgcaggtaaatctttggttattcaatgtttagaagacatgggatatttttgtgtagataatctaccaccagtgttattgcctaaatttgtagagttgatggaacaaggaaatccatccttaagaaaagtggcaattgcaattgatttaagaggtaaggaactatttaattcattagttgcagtagtggataaagtcaaaagtgaaagtgacgtcatcattgatgttatgtttttagaagctagtactgaaaaattaatttcaagatataaggaaacgcgtcgtgcacatcctttgatggaacaaggtaaaagatcgttaatcaatgcaattaatgaagagcgagagcatttgtctcaaattagaagtatagctaattttgttatagatactacaaagttatcacctaaagaattaaaagaacgcattcgtcgatactatgaagatgaagagtttgaaacttttacaattaatgtcacaagtttcggttttaaacatgggattcagatggatgcagatttagtatttgatgtacgatttttaccaaatccatattatgtagtagatttaagacctttaacaggattagataaagacgtttataattatgttatgaaatggaaagagacagagattttctttgaaaaattaactgatttgttagattttatgatacccgggtataaaaaagaagggaaatctcaattagtaattgccatcggttgtacgggtggacaacatagatctgtagcattagcagaacgactaggtaattatctaaatgaagtatttgaatataatgtttatgtgcatcatagggacgcacatattgaaagt

SEQ ID NO: 4560 - DNA, 939 bp, Staphylococcus aureus
aaagttgtacttatcggtggtggcactggcttatcagtcatggctaggggattaagagaattcccaattgatattacagcgattgtaacagttgctgataatggtgggagtacagggaaaatcagagatgaaatggatataccagcaccaggagacatcagaaatgtgattgcagctttaagtgattctgagtcagttttaagccaactttttcagtatcgttttgaagaaaatcaaattagcggtcactcattaggtaatttattaatcgcaggtatgactaatattacgaatgatttcggacatgccattaaagcattaagtaaaattttaaatattaaaggtagagtcattccatctacaaatacaagtgtgcaattaaatgctgttatggaagatggagaaattgtttttggagaaacaaatattcctaaaaaacataaaaaaattgatcgtgtgtttttagaacctaacgatgtgcaaccaatggaagaagcaatcgatgctttaagggaagcagatttaatcgttcttggaccagggtcattatatacgagcgttatttctaacttatgtgtcaatggtatttcagatgcgttaattcattctgatgcgcctaagctatatgtatctaatgtgatgacgcaacctggggaaacagatggttatagcgtgaaagatcatatcgacgcgattcatagacaagctggacaatcgtttattgattatgtcatttgtagtacacaaactttcaatgctcaagttttgaaaaaatatgaagaaaaacattctaaaccagttgaagttaataaggctgaacttgaaaaagaaagcataaatgtaaaaacatcttcaaatttagttgaaatttctgaaaatcatttagttagacataatactaaagtgttatcgacaatgatttatgacatagctttagaa

SEQ ID NO: 4561 - DNA, 942 bp, Staphylococcus aureus
atgagctttgcatcagaaatgaaaaatgaattaactagaatagacgtcgatgaaatgaatgcaaaagcagagctcagtgcactgattcgaatgaatggtgcacttagtctttcaaatcaacaatttgttataaatgttcaaacggaaaatgcaacaacggcaagacgtatttattcgttgattaaacgtgtctttaatgtggaagttgaaatattagtccgtaaaaaaatgaaacttaaaaaaaataatatttatatttgtcgtacaaagatgaaagcgaaagaaattcttgatgaattaggaattttaaaagacggcatttttacgcatgaaattgatcattcaatgattcaagatgacgaaatgagacgcagttacttgagaggagcttttctggcaggtggctcagtgaataaccccgaaacatcttcgtaccatttggaaattttttctcaaaatgagagtcatgcagaaggcttaacgaaactaatgaatagttatgagttgaatgccaaacatttagagcgaaaaaaaggaagtattacgtatttaaaagaagcggaaaagatttcggattttcttagtttgataggtggctatcaagcgttattaaaatttgaagacgtacgtattgtaagagatatgcgtaattctgttaaccgactcgttaattgtgaaacggcaaatctaaataaaacagttagtgctgcgatgaaacaagttgagagtattaaattgattgataaagaaattggtattgaaaatttaccagacaggttgagagagattgctagaattcgagtagaacatcaagaaatttcgttgaaagagcttggagaaatggtgtcaactggtccaatttcaaaatcaggtgtaaatcatcgattaagaaaacttaatgatttagccgataagattagaaatggtgaacaaatagaatta

SEQ ID NO: 4562 - DNA, 1011 bp, Staphylococcus aureus
gtgaaagacttattgcaagcacagcaaaagcttataccggatctcatagataaaatgtataaacgtttttctattcttactactatctcaaaaaatcagcctgtcggacgtcgaagtttaagcgaacatatggatatgactgaacgtgtactgcgttctgaaacagatatgcttaagaaacaagatttgataaaagttaagcctaccggaatggaaattacagctgaaggtgagcaactgatttcgcaattgaaaggttactttgatatctatgcagatgacaatcgtctgtcagaaggtattaagaataaatttcaaattaaggaagttcatgttgttcctggtgatgctgataatagccaatctgttaaaacagaattaggtagacaagcaggtcaattacttgaaggcatattacaagaagatgcgatagttgctgtaactggcggatccacgatggcatgtgttagtgaagcaattcatttattaccatataatgtattcttcgtaccagccagaggtggactaggcgaaaatgttgtctttcaggcaaacacaattgcagctagtatggcacaacaagctggcggttattatacgacgatgtatgtacctgataatgtcagcgaaacaacatataacacattgttgttagagccatcagtcataaacactttagacaaaattaaacaagcaaacgttatattacacggcattggtgatgcgctgaagatggcgcatcgacgtcaatcacctgaaaaggtcattgaacaacttcaacatcatcaagctgtcggagaggcatttggttattattttgatacacaaggtcaaattgtccataaggttaaaacaattggacttcaattagaagaccttgaatcaaaagactttatttttgcagttgcaggaggcaaatcgaaaggtgaagcaattaaagcatacttgacgattgcacccaagaatacagtgttaatcactgatgaagccgcagcaaagataatacttgaa

SEQ ID NO: 4563 - DNA, 1008 bp, Staphylococcus aureus
atggcagtaaaagtagcaattaatggttttggtagaattggtcgtttagcattcagaagaattcaagaagtagaaggtcttgaagttgtagcagtaaacgacttaacagatgacgacatgttagcgcatttattaaaatatgacactatgcaaggtcgtttcacaggtgaagtagaggtagttgatggtggtttccgcgtaaatggtaaagaagttaaatcattcagtgaaccagatgcaagcaaattaccttggaaagacttaaatatcgatgtagtattagaatgtactggtttctacactgataaagataaagcacaagctcatattgaagcaggcgctaaaaaagtattaatctcagcaccagctactggtgacttaaaaacaatcgtattcaacactaaccaccaagagttagacggttctgaaacagttgtttcaggtgcttcatgtactacaaactcattagcaccagttgctaaagttttaaacgatgactttggtttagttgaaggtttaatgactacaattcacgcttatacaggtgatcaaaatacacaagacgcacctcacagaaaaggtgacaaacgtcgtgctcgtgcagcagcagaaaacatcatccctaactcaacaggtgctgctaaagctatcggtaaagttattcctgaaatcgatggtaaattagatggtggtgcacaacgtgttcctgtagctacaggttcattaactgaattaacagtagtattagaaaaacaagacgtaacagttgaacaagttaacgaagctatgaaaaatgcttcaaacgaatcattcggttacactgaagacgaaatcgtttcttcagacgttgtaggtatgacttacggttcattatttgacgctacacaaactcgtgtaatgtcagttggcgaccgtcaattagttaaagttgcagcttggtatgataacgaaatgtcatatactgcacaattagttcgtacattagcatacttagctgaactttctaaa

SEQ ID NO: 4564 - DNA, 1302 bp, Staphylococcus aureus
atgccaattattacagatgtttacgctcgcgaagtcttagactctcgtggtaacccaactgttgaagtagaagtattaactgaaagtggcgcatttggtcgtgcattagtaccatcaggtgcttcaactggtgaacacgaagctgttgaattacgtgatggagacaaatcacgttatttaggtaaaggtgttactaaagcagttgaaaacgttaatgaaatcatcgcaccagaaattattgaaggtgaattttcagtattagatcaagtatctattgataaaatgatgatcgcattagacggtactccaaacaaaggtaaattaggtgccaatgctattttaggtgtatctatcgcagtagcacgtgcagcagctgacttattaggtcaaccgctttacaaatatttaggtggatttaatggtaagcagttaccagtaccaatgatgaacatcgttaatggtggttctcactcagatgctccaattgcattccaagaattcatgattttacctgtaggtgctacaacgttcaaagaatcattacgttggggtactgaaattttccacaacttaaaatcaattttaagcaaacgtggtttagaaactgcagtaggtgacgaaggtggtttcgctcctaaatttgaaggtactgaagatgctgttgaaacaattatccaagcaatcgaagcagctggttacaaaccaggtgaagaagtattcttaggatttgactgtgcatcatcagaattctatgaaaatggtgtatatgactacagtaagttcgaaggcgaacacggtgcaaaacgtacagctgcagaacaagttgactacttagaacaattagtagacaaatatcctatcattacaattgaagacggtatggacgaaaacgactgggatggttggaaacaacttacagaacgtatcggtgaccgtgtacaattagtaggtgacgatttattcgtaacaaacactgaaattttagcaaaaggtattgaaaacggaattggtaactcaatcttaattaaagttaaccaaatcggtacattaactgaaacatttgatgcaatcgaaatggctcaaaaagctggttacacagcagtagtttctcaccgttcaggtgaaacagaagatacaacaattgctgatatcgctgttgctacaaacgctggtcaaattaaaactggttcattatcacgtactgaccgtattgctaaatacaatcaattattacgtatcgaagatgaattatttgaaactgctaaatatgacggtatcaaatcattctataacttagataaa

SEQ ID NO: 4565 - DNA, 474 bp, Staphylococcus aureus
atgaggagtaaacaaatggctgatagaacgaataaagaaattaaaacaggacgctttattgcaactgcatcaatcgtattctcaatattgttgattattcattactttgtttcgttggataatgcgactgccaaagcattactcaatttaacgaatcaaaacacttcagataaagcgatagattacattttaaacagctttagattcactggtattatgtatattttggcttatctagcaggcttcatcactttttggaatcgacatacttatgtgtggtggtttatgtttgcagtttatgtatcaaatagtttgtttacgttgattaatttatcaatcacaattcaagcaataaaagctgcacacggtgcgtacttaacatcgccaattttaattgttattataggttcgattgcattagcgatttatatgcttgttgtttctatcaaacgtaaaagtacatttaatcgctag

SEQ ID NO: 4566 - DNA, 822 bp, Staphylococcus aureus
attgaaataagtaaagatgtaaagataccagtattaggtttcggagtatttcaaattcctcaagaacaaacagcagaagcggttaaagaagcaattaaagcgggttatagacatattgatacagcacaaagttatttaaatgaaactgaagtaggtcaaggtattgaagcttcaggtattgatagaagtgaactattcattacgactaaagtatggattgaaaatgttaactatgaagatactatcaaatcaatcgaacgatcattacaacgattaaatttggactatcttgatctagtgcttattcaccaaccttacaatgatgtatatggctcatggcgtgcattagaagagttaaaagaaactggtaaaattaaagcaatcggtgtatctaacttcagcgttgatcgaattgtagatttaggtattcataatcaaattcaaccacaagtgaaccaaatagaaattaatccattccatcaacaagaagaacaagttgcagcacttcaacaagaaaatgttgtcgtagaagcttgggcaccatttgcagaaggtaaaaatcaattattccaaaatcaattgttgcaggccattgcagataaatacaacaaatcaattgcacaagttattttacgctggttagtagaacgtgacattgttgtactcgcaaaatcagtgaatccagaacgtatggctcaaaacttagatatatttgattttgaacttacagaagaagataaacaacaaattgcgacattagaagaaagtaatagccaatttttctcacatgctgatccagagatgattaaagcacttacaagc

SEQ ID NO: 4567 - DNA, 426 bp, Staphylococcus aureus
atggcgattattattggttcagatgaagctggcaaacgattaaaagaagtcatcaaatcatacttattagacaataaatatgatgttgttgacgtaacagaaggacaggaagttgactttgttgatgcaactttggctgtagcaaaagatgttcaaagtcaagaaggtaacttaggtattgttattgatgcatttggtgcaggtagctttatggttgctacaaaaatcaaaggcatgattgctgctgaagtatcagatgaacgctctggatatatgactagaggccataacaattcaagaatgatcactatgggatctgaaattgttggagacacattagcgaaaaatgtcgttaaaggttttgttgaaggtaaatacgatggtggtagacaccaaatccgcgtagatatgcttaataaaatgtgc

SEQ ID NO: 4568 - DNA, 513 bp, Staphylococcus aureus
atgaagattgcattaggatgcgaccatattgttacagatacaaaaatgcgtgtatctgaatttttaaaatcaaaaggacatgaagtcattgacgtaggaacatacgatttcacaagaacacattatccaatttttggtaaaaaagttggcgaacaagttgttagcggtaatgcagacttaggtgtttgtatttgtggaacaggtgttggtattaacaatgctgtaaataaagtacctggcgttcgttctgcactagtacgtgatatgacatcagcgctatatgctaaagaagaattaaatgcgaacgttattggctttggtggacgtattattggtgagttattaatgtgcgatattatcgatgcatttattaatgctgaatataaaccaactgaagagaacaaaaaattaatcgctaaaattaaacatttagaaacaagcaatgctgatcaagctgatccacatttctttgatgaattcttagaaaaatgggacagaggcgaataccacgat

SEQ ID NO: 4569 - DNA, 978 bp, Staphylococcus aureus
atgtcaaaatcgcatcaaaaaatcgcatcaattgaacaattaagtaataacgaaggtatcatttctgcattagcatttgatcaacgtggtgctttaaagcgcatgatggcaaaacatcaaactgaagagccaactgtagctcaaattgaacaattaaaagtattagttgcggaagaattaacacaatatgcatcttcaattttattagatcctgaatatggtttaccagcttcagatgcacgtaacaaagactgtggattattacttgcttatgaaaaaactggatatgacgtaaacgctaaaggtcgtttacctgactgtttagtagagtggtctgcaaaacgtttaaaagaacaaggtgcaaatgctgttaaattcttactttactatgatgttgatgatgctgaagaaattaacattcaaaagaaagcatacattgaaagaatcggttcagaatgtgttgcagaagacattcctttcttcttagaagtattaacatacgatgacaacattcctgataacggtagtgttgaattcgcaaaagttaagcctagaaaggttaacgaagcaatgaaattattctcagaaccacgctttaatgttgatgtattgaaagttgaagtaccagtaaacatgaagtatgtagaaggctttgctgaaggtgaagtggtttatacaaaagaggaagcggcacaacactttaaagatcaagatgcagcaactcatttaccatacatttacttaagtgctggtgtttctgcggaattattccaagaaactttaaaatttgctcacgaagctggtgctaaattcaacggggtactttgtggccgtgctacatggtctggtgctgttcaagtatacattgaacaaggtgaagatgctgctcgtgaatggttacgtacaactggtttcaaaaatattgatgacttaaataaagtattaaaagatactgcgacatcttggaaacaaagaaaa

SEQ ID NO: 4570 - DNA, 309 bp, Staphylococcus aureus
atgaatagagaagaagtccaattattaggttttgaaattgttgcatttgcaggggatgcacgttctaagtttttagaagcattaacagcagctcaagctggagattttgcaaaagcagatgcactgattgaagaaggaaacaattgcattgcggaagcgcatagagcacaaacaagcttgttagctaaagaagcgcaaggtgatgatattgcatacagtgtaacgatgatgcatggtcaagaccatttaatgacaacaattttactgaaagatttaatgaagcatttattagaattttataaaagaggg

SEQ ID NO: 4571 - DNA, 1716 bp, Staphylococcus aureus
atgacaatgatgcaaaaattgatcgcacaaattgaaaaagggaagccatttttcgagaaattatcacgtaacatatatttaagagccatccgtgatggatttatttctgcaatgcctgtcatcttattctcaagtatctttctattaattgcatacgtgccaaatatatttggttttaaatgggataaaggcatggaagccattttaatgaaaccatataactatacgatggggcttgtagcatttttagtagcaggaacgacagcgaaatctttaacagattcatttaaccgtaagctagaaagtacaaatcaaattaactttatttctacaatgctagcagcgatgtgtggattcttgttcttagcttctgatccagccaaagatggtggattcttaagtgcatttatgggaactaaaggtttattaacagcattcttatcagcatttgtaactgttattgtttataacttctgtgtgaagcgcaatattacaattaaaatgccgaaagaagtaccgccgaatatttcacaagtatttaaggacttaattccattttcagcggtaatcatcattctttatgcattagatttagtcattcgcaacagctttaaatcaaatgtagcggaaggtattttaaaattattcgaaccattatttacagcagcagatggatggattggtgtcacaattatctttggtgcctttgcattattctggtttgtaggaattcatggtccatcaatagtagagccagcaattgcagccattacatatgcgaatatcgaagcgaacttcaagttgcttcaagctggagaacacgcagataaaattattacatcaggtacacaaatgtttatcgttacttttggaggtacgggtgcaacattggtcgtcccgttcatgtttatgtggatgacgaaatctaaacgaaacaaagcgattggacgtgcatcagttgtaccaacattctttggtgtaaacgaaccaattttatttggtgcaccactagtattgaatcctgtgttctttattccatttgtattagcaccaattgttaacgtatggattttcaaacttttcgttgaagtgttaggaatgaatagttttagtgtgaatttaccttggacaacaccaggtccattgggcattatcatgggtacaggttttggtttatggtcattcgtactagctattactttgattgttgtagatattattatttactacccattcctaaaagtttatgatagtgaaattcttgatgaagaagaaggacgtaaagaaagtaattcagatttaaaagaaaaagttgcagcaaactttgatacgaaaaaagctgattcaattttagcggcaagtggtgtatcagacgatgcagctaaagcttcaaatatcacagaacaaacaaatgtcttagtactttgtgccggtggtggtacaagtggattattagccaatgcacttaataaagcagctgaagaatatcatgtgccagtgaaagcagcagctggcggatatggcgcacatatggacattatgaaagagtaccaattaatcattttagcgccacaagttgcgtctaactatgaagatattaagcaagatacagatagattaggtattaaattagcgaagactcaaggtgctgaatatatcaaattgacacgagatggccaagcagcccttgatttcgttcaacaacaatttgaaaat

SEQ ID NO: 4572 - DNA, 1410 bp, Staphylococcus aureus
atgactaaaacattacctgaagattttatttttggtggagcaacagcagcatatcaagcagaaggtgcgacaaatacggatggtaaaggtcgcgtagcatgggatacgtatttagaagaaaactattggtacactgcagaaccagcgagtgatttttataacagatatccagtggatttagaattaagtgaaaaattcggtgttaatggtatccgtatttcaattgcatggtctcgtatcttcccaaatggatatggcgaagttaaccctaaaggtgttgagtattaccataagttatttgcggagtgtcataaacgtcatgttgaaccatttgtaacattgcatcattttgatacaccagaagtgttacacaaagatggcgattttctaaatcgtaaaacgattgactactttgtagattatgctgaatattgttttaaagaattcccagaagtaaaatattggactacattcaatgaaattggaccaattggtgatggccaatatttagtaggtaaattccctccaggtattaaatatgattttgaaaaagttttccaatctcatcataatatgatggttgctcatgcaagagcagtaaaattatttaaagatggtggctatcaaggagaaattggtgttgtacacgcattgccaacaaaatatccgttcgatccatcaaatcctgaagatgttcgtgcagcagaattagaagatatcatccataataaattcatcttagatgcaacatatttaggtaagtattctcgtgaaacgatggaaggtgtgcaacatatcttatctgttaatggcggtaaattaaacattacagatgaagattatgccattttagatgcagccaaagatttaaacgacttcttaggtatcaattactacatgagtgactggatgagaggttacgatggagaatctgaaatcacgcataatgcgacaggtgataaaggcggttctaaataccaacttaaaggtgtcggacaacgtgaatttgatgtcgacgtacctcgcacagactgggactggatgatctatcctcaaggtttatatgatcaaatcatgcgtgttgttaaagattatcctaactatcataagatttatatcactgaaaatggtttaggatataaagatgaatttattgaatctgaaaaaacagttcatgatgatgcacgtattgattatgtaagacaacatttaaacgttattgcagatgctattaaagatggtgcaaatgttaaaggttactttatttggtcattaatggatgtgttctcttggtcaaatggttatgaaaaacgatatggtttattctatgtcgattttgagactcaagaacgctatcctaagaaaagtgcttattggtacaaagagttagccgaaacaaaagaaattaaa

SEQ ID NO: 4573 - DNA, 1005 bp, Staphylococcus aureus
ttaatgatgcaaaataaacaaatactttttaataaaataccagaaggcatgcctcaagaggatacattcaaaattgaagatgttgacacgcctaaacttgagagcgatggtgtacttgtacaaacactgtatatttcagtggatccatatatgagaggacgtatgactaaggcagattcgtatgtacagccttttgaaatcggtaaaccgattgttagccatgtcgttgcaaaagtaattgattcgacactcgcagattataaaaaaggagatgtcgttgtaggtatgttgccttggcgaatcattaatcatgtccaagcggatcaaattactaaagttccaacgacagatgtaccacttgatttatatttaagtgttttaggaatgccaggacaaacagcatatcatggtctgcttgatattggacaacctaaagacggtgatactgttgtggtttcagctgcatctggtgctgtaggttcagttgtaggtcaaattgctaagattaaaggttgccgtgtagtaggtattgcgggtggcgacaaaaaagtaaattatttaacagagacactgggctttgacgctggtattgattataagaaagaggattttgcagaagcgttagcacaagcagtaccagatggtattgatgtttattttgaaaatgttggtggtacagttggcgatgaagtatttaagcatttaaatcgttttgcacgtgtaccagtatgtggcgcaatttcgtcatataatcatcctgaagcaggtatcggaccacgtattcaaggtacgcttattaagaagcaagtaatgatgagaggcttcttagtaagtgaattcgctgatgattttaaagaagctagtgaacagcttgcaacatgggttcaagaaggtaaaattcagtcacaagtaaccattgaagatggttttgaaaatgcgccacgtgcatttaaaaatttatttactggcgataactttggtaaacaagttattaaagtatcggaa

SEQ ID NO: 4574 - DNA, 999 bp, Staphylococcus aureus
atgaaaatgataggatttgaaaagccctttaaattggaagaaggaaatttatttaaagtatacgaacaaagaaagccaacgccagaaaacgatgatatcttagtcaaagtaaatagcattagtgtaaatcctgtagatacaaagcaacgacaaatggaagtcactcaagtacctcgtgtacttggatttgatgctattggtactgttgaagctatcggaccagacgttacattatttagtccgggtgacgttgtattttatgctggatcgccaaatagacaaggatcaaatgcgacatatcaattggtgtcagaagctatagttgcaaaagctccacacaacataagtgctaatgaagcggttagtctaccgctaactggtattacggcatatgaaacgttttttgatacatttaaaatttcacataatccttctgaaaatataggtaaatccgtgttaatcattaatggcgctgggggtgtaggaagtattgccactcaaattgctaaacggtatggtttaactgtcattacaacagcatcacgacaagaaacaacagagtggtgtgaaaagatgggcgcagatatcgtattgaatcatagagaggatttagtgcttcaatttaaagaaaaagaaattccattagtagattatatattttgcacctataatacagacttgtattacaatactatgattgaactgataaaaccgttagggcatattacaactatcgtagcttttaatgaagatcaagatttaaatgcattaaaattaaaaagtataacatttacacatgaatttatgtttgcgcgtccaattcatcgaacgcctgatatgattaaacaacatgagtatttagaagatattacgaaaaatatagaatcaggacattaccaaccaacaacgacacaagtttttgaaggtttgtcacctgaaaacttatatcaagcacatcaattattggaaaaacagtcaatgattgggaaattagtaatt

SEQ ID NO: 4575 - DNA, 471 bp, Staphylococcus aureus
atgtatatccaagatggacgtataactgaatatcaagactacttccttcaatttgaatggttccaaccattacttatttcacttgctgcactattgatattaataggtcttatattagtatttagtatcttcaaacctacgcatcgaaaacctggattatacaaagacttcgatgatggtcatgtttacgtatctcgtaaagctgttgaaaaaactgcatttgatacagttgcaaaatatgaccaagtaagacaaccgaatgtagttgcaaaactatataacaaaaaaaataaatcttatatcgacattaaaactgactttttcgtaccaaataatgttcaagtacaatctttaactgaagcaattcgtgcggatattaaaaagaatgtagaatatttcacagaaatgccagtacgtaagttagaagttaatgtgagagatcagaaaacttctggtccacgagtgttgtaa

SEQ ID NO: 4576 - DNA, 1209 bp, Staphylococcus aureus
gagcaagccgttattgaaggtcatccgctacatcctggggctaaattacgtaaaggtttaaatgcattacaaacattcctatattcttcagaattcaatcaacctattaagttgaaaatagtactgattcacagtaaattaagccgtactatgtcactgtctaaagattatgatacaactgttcatcaactatttccggacttaattaaacaattggaaaatgaatttacgccaaactttaactttaatgattatcacattatgattgtacatccatggcaattagatgacgtattacattctgattatcaagcagaagtagataaaaaattaatcattgaagcaaaacatacgttggattattatgctggtttatctttcagaacattagttcctaaatacccagctatgtcgccacacatcaaattgtcgacaaacgttcatattacaggtgaaattcgtacattatcagaacaaacgacgcacaatggtccactaatgacacgtattttaaatgatattttggagaaagatgtcatatttaagtcctatgcatcaacaattattgatgaagttgctggtattcatttttataatgagcaagacgaagcagactatcaaactgaacgaagtgaacaattaggtacattatttagaaaaaacatataccaaatgattccacaagaagtcacaccaatgattccttcaagcttagttgcaacctacccatttaacaatgaatcacctatcgtgacattgattaaacgttatcaatcagctgcatcattgtctgattttgaatcatcggcgaaatcgtgggttgaaacttatagtaaagcattgcttggtctcgtaatcccactagttactaaatatggcattgcattagaggctcacttgcaaaatgctattgcaacattccgaaaagatggtctattggacacgatgtatattagagactttgaaggtttaagaattgataaagcacaactaaatgaaatgggatacagtacatctcatttccatgaaaaatcaagaattcttactgattcaaaaacgtctgtgtttaacaaagccttttattctaccgttcaaaaccatttaggcgaattaattcttacaatctctaaagcatcaaaagattcaaacttagaaagacatatgtggtatatcgttcgtgatgtactagataacatctttgatcaactt

SEQ ID NO: 4577 - DNA, 930 bp, Staphylococcus aureus
atgctagaaagtaaatggggcttgagatttattgcctttcttttggcattgtttttctttttatctgttaacaatgtttttggaaatatctttaacactggtaatcttggtcaaaagtctagtaaaacgattcaagatgtacccgttgaaattctttataacactaaagatttgcatttaacaaaagcgcctgaaacagttaatgtgactatttcaggaccacaatcaaagataataaaaattgaaaatccagaagatttaagagtagtgattgatttatcaaatgcgaaagctggaaaatatcaagagaagtatcaagttaaagggttagctgatgacattcattattctgtaaaacctaaattagcaaatattacgcttgaaaacaaagtaactaaaaagatgacagttcaacctgatgtaagtcagagtgatattgatccactttttaaaattacaaagcaagaagtttcaccacaaacagttaaagtaacaggtggagaagaacaattgaatgatattgcttatttaaaagccacttttaaaactaataaaaagattaatggtgacacaaaagatgtcgcagaagtaacggcttttgataaaaaactgaataaattaaatgtatcgattcaacctaatgaagtgaatttacaagttaaagtagagccttttagcaaaaaggttaaagtaaatgttaaacagaaaggtagtttagcagatgataaagaattaagttcgattgacttagaagataaagaaattgaaatctttggtagtcgagatgacttgcaaaatataagcgaagttgatgcagaagtagatttagatggtatttcagaatcaactgagaagactgtaaaaatcaacttaccagaacatgtcactaaagcacaaccaagtgaaacgaaggcttatataaatgtaaaa

SEQ ID NO: 4578 - DNA, 1353 bp, Staphylococcus aureus
atgggaaaatattttggtacagacggagtaagaggtgtcgcaaaccaagaactaacacctgaattggcatttaaattaggaagatacggtggctatgttctagcacataataaaggtgaaaaacacccacgtgtacttgtaggtcgcgatactagagtttcaggtgaaatgttagaatcagcattaatagctggtttgatttcaattggtgcagaagtgatgcgattaggtattatttcaacaccaggtgttgcatatttaacacgcgatatgggtgcagagttaggtgtaatgatttcagcttctcataatccagttgcagataatggtattaaattctttggatcagatggttttaaactatcagatgaacaagaaaatgaaattgaagcattattggatcaagaaaacccagaattaccaagaccagttggcaatgatattgtacattattcagattactttgaaggggcacaaaaatatttgagctatttaaaatcaacagtagatgttaactttgaaggtttgaaaattgttttagatggtgcaaatggttcaacatcatcactagcgccattcttatttggtgatttagaagcagatactgaaacaattggatgtagtcctgatggatataatatcaatgagaaatgtggctctacacatcctgaaaaattagctgaaaaagtagttgaaactgaaagtgattttgggttagcatttgacggcgatggagacagaattatagcagtagatgagaatggtcaaatcgttgacggtgaccaaattatgtttattattggtcaagaaatgcataaaaatcaagaattgaataatgacatgattgtttctactgttatgagtaatttaggtttttacaaagcacttgaacaagaaggaattaaatctaataaaactaaagttggcgacagatatgtagtagaagaaatgcgtcgcggtaattataacttaggtggagaacaatctgggcatatcgttatgatggattacaatacaactggtgatggtttattaactggtattcaattagcttctgtaataaaaatgactggtaaatcactaagtgaattagctggacaaatgaaaaaatatccacaatcattaattaacgtacgtgtaacagataaatatcgtgttgaagaaaatgttgacgttaaagaagttatgactaaagtagaagttgaaatgaatggagaaggtcgaattttagtaagaccttctggaacagaaccattagttcgtgtcatggttgaagcagcaactgatgaagatgctgaaagatttgcacaacaaatagctgatgtggttcaagataaaatgggactagataaa

SEQ ID NO: 4579 - DNA, 349 bp, Staphylococcus aureus
acaaatcacaaattaatcgaagcagtaattaaatcacaattacgtacagacttaccaagtttccgtcctggcaatactttacgtgaacacgtacgtatcattaagggtactcgtgagcgtatccaagtattcgaaggcgttgtaattaagggtcgtgacggtggcgtttctaaaacgtttatctgttcgtaaaatttcatcaggtgaaaacgtggaacgtacattcccattacacacaccaaaaattgaaaaaatcgaagttaaacgtcgtggtaaagtacgtcgtgctaaattatattacttacgtagtttacgtggtaaagctgctagaatccaagaaattcgttaa

(The sequence listing continues in the following parts.)
